United States Patent Application Publication US 2023/0026259 A1 - sequence listing, part 67

SEQ ID NO: 166456 - DNA, 578 bp, Homo sapiens
  Payload ID: 12777
  Gene Symbol: PLEK2
  Gene Name: pleckstrin 2
  ENST ID: ENST00000555803
  CDS Start-End: 1-384
attgtccacaactggaaggcgcgatggttcatccttcggcagaacacgctggtgtactacaagcttgaggggggtcggagagtgacccctcccaagggccggatcctcctggatggctgcaccatcacctgcccctgcctggagtatgaaaaccgaccgctcctcattaagctgaagactcaaacatccacggagtacttcctggaggcctgttctcgagaggagcgggatgcctgggcctttgagatcaccggggctattcatgcagggcagccggggaaggtccagcagctgcacagcctgagaaactccttcaagctgcccccgcacatcagcctgcaggacacaagaggaaaaactggaaggtgcgtcgctttgttctaaggaaggatccagctttcctgcattactatgacccttccaaagaagagaacaggccagtgggtgggttttctcttcgtggttcactcgtgtctgctctggaagataatggcgttcccactggtaaggggttaaagggaatgtccagggaaacctcttcaaagtgattactaaggatgacacacactattacattc

SEQ ID NO: 166457 - DNA, 4183 bp, Homo sapiens
  Payload ID: 12778
  Gene Symbol: PSD
  Gene Name: pleckstrin and Sec7 domain containing
  Uniprot ID: A5PKW4
  ENST ID: ENST00000020673
  CDS Start-End: 528-3602
atgtaacaggtcatgtggcagcctcctagggacacgcgtggggtctggagcgggacacgcgtgtgcagccgggccttacgtgtggctcaaggggcggtgggcgagagagacgtggacacaagtggggtggggcacgtgagggtctggggaatagaaccaggggttccatgcgccctcctccttgtctggggcgggtcttaggttggcgggagagcccagcggggacctagcgacaaggggggctggcagcctccggggctctgggccctgggagagggcggggggtgggggggattagcgttgcctgagcggcgcgtagggggtagggggagggactgagaggcgggcgggcctggagcaaacgggagccgcgctgccttcacagctcagctgggcccagcctctcctctgtctctcctcggtctcagctctgggcgagcagcggcctgtctgaagagcatgcagcccccttactccccgcctggcctcgccatccctgcccccccagcctgacccccggccccagcatggcccagggtgccatgcgcttctgctcggaaggcgactgtgccatctccccaccacgatgcccacgccgctggctccccgaaggcccggtgccccagagccccccagccagcatgtatggcagcacaggctccttgctacggcgagtggcaggtccaggtcctcgaggccgggaactgggacgtgtgacagcaccctgtacacctctgcgtggccccccctcaccccgtgttgctccctcaccctgggcaccctcttcacccactgggcagcccccacccggggcccagagctctgtggtcatcttccgctttgtggagaaggccagtgtgaggccactgaatgggctacctgctccagggggcttgagtcggagctgggatctgggtggggtttctcctcccaggcccaccccagcccttgggcctggctccaaccggaagttacggctggaagcatccacatcagacccactccccgccagaggaggctcggccctacctggcagccggaaccttgtacatgggccgccagccccaccccaggttggagcagatggcctttactcctctctccccaatgggctggggggcccccctgagcgcctggccacactcttcggaggacctgctgacactggattcctgaaccagggggatacctggtcctccccccgggaagtctcctctcatgcccagagaatcgctagagccaaatgggaattcttctatggctccttggacccccccagctcaggtgctaagcccccagagcaggcccccccatctccacctggggtgggctcaaggcagggctctggggtggctgtggggcgagcagccaagtactccgagacagacctggacacggtgcccctgaggtgctaccgcgagactgacatcgatgaggtgctggctgagcgggaggaggccgactcggccatcgaaagtcagcccagctctgagggcccaccaggcactgcctacccacctgccccacggcccggcccactccctggccctcatcccagcctcggcagtggcaatgaggatgaggacgacgatgaggcaggtggggaagaagatgtggacgacgaggtgtttgaggcctctgaaggggcccggccagggagccggatgcctctcaagtcacctgtgccctttctacctgggacgagcccctcggctgatgggcctgactctttcagttgtgtgttcgaagccatcctggagtcacaccgggccaaaggcacctcctataccagcctcgcctcgctggaggccttggcctcacctggcccaacccagagccccttcttcacctttgagctgcctccccaaccccctgcaccccggcccgacccaccagctcccgccccacttgcccctcttgaaccggattctggtaccagctctgctgctgatggtccttggacacagagaggggaggaggaggaggcagaggccagagccaagctggccccagggagggagccccctagtccctgccactcagaggacagccttgggctgggggcagcaccccttggcagcgaaccacccctgagccagctggtgtccgactcagactcagagctggacagcacagagcggctggccctgggaagcacagacaccttgtccaatgggcagaaagcggacctggaggctgcgcagcgcctggccaagaggctgtaccgactagatggcttcaggaaggccgatgtggcccggcacctgggcaagaacaatgacttcagcaaactggtggctggggagtacctcaagttctttgtcttcacgggcatgactctggaccaagctctcagggtgtttctgaaggagctggccttaatgggtgagacccaggaacgagagcgcgtgctggcccacttctcccagcgatacttccagtgcaatcctgaagccctgtcctcagaggacggcgcccacacgctgacctgtgcgctcatgctgctcaacacggatctccacggccataacatcgggaagcgcatgacctgcggggacttcatcgggaacctggagggcctcaatgatggcggcgacttccctagggagctgctcaaggccttgtacagctccatcaagaatgagaagctgcagtgggccatagacgaggaggagctgagacgctctctgtctgagttggccgaccccaaccccaaggtcatcaagcggatcagcgggggcagtggcagtggctccagccctttcctggacctgactcccgagcctggggctgccgtctacaagcacggggccctggtgcgaaaggtgcacgcagaccctgactgcaggaagacacctcggggcaagcggggctggaagagcttccacgggatcctcaagggcatgatcctctacctgcagaaggaggagtacaagcctgggaaggccctttcagagacggagctcaagaatgccatcagcatccaccatgccctggccactcgtgccagtgactacagcaagaggccccacgtcttctacctgcgcacagctgactggcgggtcttcctcttccaggccccgagcctggagcagatgcagtcctggatcactcgcatcaatgtagtagccgctatgttctctgcgccccccttcccagctgctgttagctcccaaaagaagttcagccgccctctcctgcccagcgctgccacccgcctctcccaggaggagcaggtgcggacccacgaggccaagctgaaggccatggcaagtgagctgcgggagcaccgggccgcccagctgggcaagaagggccggggcaaggaggctgaagagcagcggcagaaggaggcctacctggagtttgagaaatcccgctacagcacctatgcagcgctgcttcgggtcaagctgaaggcaggcagtgaggagctggatgcagtggaggcagcactggcccaggccgggagcacagaggatggactccctccttctcactccagtccctccctgcagcccaaaccctccagccagccccgggctcagcgtcacagctcagagcctcggccaggggcaggcagtgggcggcggaagccctgagatgaggtttagggtggggagtgcctgctgggcacctgaaggatgacatggccctgcctgagcccgggccggcctcgggccacccacgagggcctcccggcctagggcccgaccgcgccggacgcggtgtccggggcagggcagggctggggcctgggcctcaggagcctaggctaggggcacctccgagagcccctttttgtgataatgttttgcactttttcgtacagggtgggcgggggcgggaggggctagcgcccctgaacttttgatgctttttttttgtgtgggagaggcctgatgccgtttctgctttctgctgagaccacccccaccctgacaccatcagtccccctctgtcctggggcctggcttggacagagaccaggatttggggctgagctggtttcccctccttcctccccaagggcttactctttctcttgctggaggtggaggaagggcgtccatgccaaggccccatacctgggccgggggcagcacggcctggctttcccccgcttcagtgggccttgccctttgtacagcctccacccccattaaaactgctctggacttgc

SEQ ID NO: 166458 - DNA, 3861 bp, Homo sapiens
  Payload ID: 12778
  Gene Symbol: PSD
  Gene Name: pleckstrin and Sec7 domain containing
  Uniprot ID: A5PKW4
  ENST ID: ENST00000406432
  CDS Start-End: 204-3278
cgcaaggcagcgagaagggagaagctagcagcggggagagacaagaaaggggtcaagttagctcagctgggcccagcctctcctctgtctctcctcggtctcagctctgggcgagcagcggcctgtctgaagagcatgcagcccccttactccccgcctggcctcgccatccctgcccccccagcctgacccccggccccagcatggcccagggtgccatgcgcttctgctcggaaggcgactgtgccatctccccaccacgatgcccacgccgctggctccccgaaggcccggtgccccagagccccccagccagcatgtatggcagcacaggctccttgctacggcgagtggcaggtccaggtcctcgaggccgggaactgggacgtgtgacagcaccctgtacacctctgcgtggccccccctcaccccgtgttgctccctcaccctgggcaccctcttcacccactgggcagcccccacccggggcccagagctctgtggtcatcttccgctttgtggagaaggccagtgtgaggccactgaatgggctacctgctccagggggcttgagtcggagctgggatctgggtggggtttctcctcccaggcccaccccagcccttgggcctggctccaaccggaagttacggctggaagcatccacatcagacccactccccgccagaggaggctcggccctacctggcagccggaaccttgtacatgggccgccagccccaccccaggttggagcagatggcctttactcctctctccccaatgggctggggggcccccctgagcgcctggccacactcttcggaggacctgctgacactggattcctgaaccagggggatacctggtcctccccccgggaagtctcctctcatgcccagagaatcgctagagccaaatgggaattcttctatggctccttggacccccccagctcaggtgctaagcccccagagcaggcccccccatctccacctggggtgggctcaaggcagggctctggggtggctgtggggcgagcagccaagtactccgagacagacctggacacggtgcccctgaggtgctaccgcgagactgacatcgatgaggtgctggctgagcgggaggaggccgactcggccatcgaaagtcagcccagctctgagggcccaccaggcactgcctacccacctgccccacggcccggcccactccctggccctcatcccagcctcggcagtggcaatgaggatgaggacgacgatgaggcaggtggggaagaagatgtggacgacgaggtgtttgaggcctctgaaggggcccggccagggagccggatgcctctcaagtcacctgtgccctttctacctgggacgagcccctcggctgatgggcctgactctttcagttgtgtgttcgaagccatcctggagtcacaccgggccaaaggcacctcctataccagcctcgcctcgctggaggccttggcctcacctggcccaacccagagccccttcttcacctttgagctgcctccccaaccccctgcaccccggcccgacccaccagctcccgccccacttgcccctcttgaaccggattctggtaccagctctgctgctgatggtccttggacacagagaggggaggaggaggaggcagaggccagagccaagctggccccagggagggagccccctagtccctgccactcagaggacagccttgggctgggggcagcaccccttggcagcgaaccacccctgagccagctggtgtccgactcagactcagagctggacagcacagagcggctggccctgggaagcacagacaccttgtccaatgggcagaaagcggacctggaggctgcgcagcgcctggccaagaggctgtaccgactagatggcttcaggaaggccgatgtggcccggcacctgggcaagaacaatgacttcagcaaactggtggctggggagtacctcaagttctttgtcttcacgggcatgactctggaccaagctctcagggtgtttctgaaggagctggccttaatgggtgagacccaggaacgagagcgcgtgctggcccacttctcccagcgatacttccagtgcaatcctgaagccctgtcctcagaggacggcgcccacacgctgacctgtgcgctcatgctgctcaacacggatctccacggccataacatcgggaagcgcatgacctgcggggacttcatcgggaacctggagggcctcaatgatggcggcgacttccctagggagctgctcaaggccttgtacagctccatcaagaatgagaagctgcagtgggccatagacgaggaggagctgagacgctctctgtctgagttggccgaccccaaccccaaggtcatcaagcggatcagcgggggcagtggcagtggctccagccctttcctggacctgactcccgagcctggggctgccgtctacaagcacggggccctggtgcgaaaggtgcacgcagaccctgactgcaggaagacacctcggggcaagcggggctggaagagcttccacgggatcctcaagggcatgatcctctacctgcagaaggaggagtacaagcctgggaaggccctttcagagacggagctcaagaatgccatcagcatccaccatgccctggccactcgtgccagtgactacagcaagaggccccacgtcttctacctgcgcacagctgactggcgggtcttcctcttccaggccccgagcctggagcagatgcagtcctggatcactcgcatcaatgtagtagccgctatgttctctgcgccccccttcccagctgctgttagctcccaaaagaagttcagccgccctctcctgcccagcgctgccacccgcctctcccaggaggagcaggtgcggacccacgaggccaagctgaaggccatggcaagtgagctgcgggagcaccgggccgcccagctgggcaagaagggccggggcaaggaggctgaagagcagcggcagaaggaggcctacctggagtttgagaaatcccgctacagcacctatgcagcgctgcttcgggtcaagctgaaggcaggcagtgaggagctggatgcagtggaggcagcactggcccaggccgggagcacagaggatggactccctccttctcactccagtccctccctgcagcccaaaccctccagccagccccgggctcagcgtcacagctcagagcctcggccaggggcaggcagtgggcggcggaagccctgagatgaggtttagggtggggagtgcctgctgggcacctgaaggatgacatggccctgcctgagcccgggccggcctcgggccacccacgagggcctcccggcctagggcccgaccgcgccggacgcggtgtccggggcagggcagggctggggcctgggcctcaggagcctaggctaggggcacctccgagagcccctttttgtgataatgttttgcactttttcgtacagggtgggcgggggcgggaggggctagcgcccctgaacttttgatgctttttttttgtgtgggagaggcctgatgccgtttctgctttctgctgagaccacccccaccctgacaccatcagtccccctctgtcctggggcctggcttggacagagaccaggatttggggctgagctggtttcccctccttcctccccaagggcttactctttctcttgctggaggtggaggaagggcgtccatgccaaggccccatacctgggccgggggcagcacggcctggctttcccccgcttcagtgggccttgccctttgtacagcctccacccccattaaaactgctctggacttgctg

SEQ ID NO: 166459 - DNA, 3382 bp, Homo sapiens
  Payload ID: 12778
  Gene Symbol: PSD
  Gene Name: pleckstrin and Sec7 domain containing
  Uniprot ID: A5PKW4
  ENST ID: ENST00000611678
  CDS Start-End: 862-2799
gcctgcgcagtgcgacaaatctggcgctgtccccttcagcaccacgcggagtccgcgccgcccctccccgcgctcagctgggcccagcctctcctctgtctctcctcggtctcagctctgggcgagcagcggcccaccccagcccttgggcctggctccaaccggaagttacggctggaagcatccacatcagacccactccccgccagaggaggctcggccctacctggcagccggaaccttgtacatgggccgccagccccaccccaggttggagcagatggcctttactcctctctccccaatgggctggggggcccccctgagcgcctggccacactcttcggaggacctgctgacactggattcctgaaccagggggatacctggtcctccccccgggaagtctcctctcatgcccagagaatcgctagagccaaatgggaattcttctatggctccttggacccccccagctcaggtgctaagcccccagagcaggcccccccatctccacctggggtgggctcaaggcagggctctggggtggctgtggggcgagcagccaagtactccgagacagacctggacacggtgcccctgaggtgctaccgcgagactgacatcgatgaggtgctggctgagcgggaggaggccgactcggccatcgaaagtcagcccagctctgagggcccaccaggcactgcctacccacctgccccacggcccggcccactccctggccctcatcccagcctcggcagtggcaatgaggatgaggacgacgatgaggcaggtggggaagaagatgtggacgacgaggtgtttgaggcctctgaaggggcccggccagggagccggatgcctctcaagtcacctgtgccctttctacctgggacgagcccctcggctgatgggcctgactctttcagttgtgtgttcgaagccatcctggagtcacaccgggccaaaggcacctcctataccagcctcgcctcgctggaggccttggcctcacctggcccaacccagagccccttcttcacctttgagctgcctccccaaccccctgcaccccggcccgacccaccagctcccgccccacttgcccctcttgaaccggattctggtaccagctctgctgctgatggtccttggacacagagaggggaggaggaggaggcagaggccagagccaagctggccccagggagggagccccctagtccctgccactcagaggacagccttgggctgggggcagcaccccttggcagcgaaccacccctgagccagctggtgtccgactcagactcagagctggacagcacagagcggctggccctgggaagcacagacaccttgtccaatgggcagaaagcggacctggaggctgcgcagcgcctggccaagaggctgtaccgactagatggcttcaggaaggccgatgtggcccggcacctgggcaagaacaatgacttcagcaaactggtggctggggagtacctcaagttctttgtcttcacgggcatgactctggaccaagctctcagggtgtttctgaaggagctggccttaatgggtgagacccaggaacgagagcgcgtgctggcccacttctcccagcgatacttccagtgcaatcctgaagccctgtcctcagaggacggcgcccacacgctgacctgtgcgctcatgctgctcaacacggatctccacggccataacatcgggaagcgcatgacctgcggggacttcatcgggaacctggagggcctcaatgatggcggcgacttccctagggagctgctcaaggccttgtacagctccatcaagaatgagaagctgcagtgggccatagacgaggaggagctgagacgctctctgtctgagttggccgaccccaaccccaaggtcatcaagcggatcagcgggggcagtggcagtggctccagccctttcctggacctgactcccgagcctggggctgccgtctacaagcacggggccctggtgcgaaaggtgcacgcagaccctgactgcaggaagacacctcggggcaagcggggctggaagagcttccacgggatcctcaagggcatgatcctctacctgcagaaggaggagtacaagcctgggaaggccctttcagagacggagctcaagaatgccatcagcatccaccatgccctggccactcgtgccagtgactacagcaagaggccccacgtcttctacctgcgcacagctgactggcgggtcttcctcttccaggccccgagcctggagcagatgcagtcctggatcactcgcatcaatgtagtagccgctatgttctctgcgccccccttcccagctgctgttagctcccaaaagaagttcagccgccctctcctgcccagcgctgccacccgcctctcccaggaggagcaggtgcggacccacgaggccaagctgaaggccatggcaagtgagctgcgggagcaccgggccgcccagctgggcaagaagggccggggcaaggaggctgaagagcagcggcagaaggaggcctacctggagtttgagaaatcccgctacagcacctatgcagcgctgcttcgggtcaagctgaaggcaggcagtgaggagctggatgcagtggaggcagcactggcccaggccgggagcacagaggatggactccctccttctcactccagtccctccctgcagcccaaaccctccagccagccccgggctcagcgtcacagctcagagcctcggccaggggcaggcagtgggcggcggaagccctgagatgaggtttagggtggggagtgcctgctgggcacctgaaggatgacatggccctgcctgagcccgggccggcctcgggccacccacgagggcctcccggcctagggcccgaccgcgccggacgcggtgtccggggcagggcagggctggggcctgggcctcaggagcctaggctaggggcacctccgagagcccctttttgtgataatgttttgcactttttcgtacagggtgggcgggggcgggaggggctagcgcccctgaacttttgatgctttttttttgtgtgggagaggcctgatgccgtttctgctttctgctgagaccacccccaccctgacaccatcagtccccctctgtcctggggcctggcttggacagagaccaggatttggggctgagctggtttcccctccttcctccccaagggcttactctttctcttgctggaggtggaggaagggcgtccatgccaaggccccatacctgggccgggggcagcacggcctggctttcccccgcttcagtgggccttgccctttgtacagcctccacccccattaaaactgctctggacttgctg

SEQ ID NO: 166460 - DNA, 4513 bp, Homo sapiens
  Payload ID: 12779
  Gene Symbol: PSD2
  Gene Name: pleckstrin and Sec7 domain containing 2
  Uniprot ID: Q9BQI7
  ENST ID: ENST00000274710
  CDS Start-End: 206-2521
ctcgctcagcctctccacatcgcggctccggcacctgaagggacgcgggcgggcgcgggcagctccgaccggcggcggcggggcgggacaggcagcccggcggcctccgatggccccgccgtgagaggccggacccgcggcggggaccagcagcggtctagaggagtcccaggagcagccaggacaggcggaagcagtggctgccatggaggaggacaagctcttatctgcagtgcctgaggaaggcgatgccacccgtgaccccggtccagagcctgaagaggagccaggggtccggaatgggatggccagtgagggcctgaacagcagcctctgcagcccagggcacgagcgaaggggcaccccagcggacactgaggaacccacgaaggacccagatgtggccttccatggcctcagccttggcctctctctcaccaatggcctagccctggggccagacttgaacattctggaagattcagcggagtccaggccctggagggctggcgtgctggcagagggggacaatgcttccaggagcctctacccagatgctgaggaccctcagctggggttggatggtcccggggagccagatgtgcgggatggcttcagcgccacgtttgagaagattctggagtcagagctgctgcggggcacccagtacagcagcctcgactccctagacgggctgagcctcacggatgagagcgacagctgcgtcagcttcgaggcccccctcacacccctcatccagcagcgggcccgtgacagccctgagccaggggctgggttgggcattggggacatggcgtttgagggggacatgggggcagctggtggtgatggggagctgggcagccccctgcggcgctccatctccagcagccgctctgagaatgtcctgagccgcctgtctctcatggccatgcccaatggattccatgaagatggccctcagggcccagggggggatgaggatgatgatgaggaggacacggacaagttgctgaactcagccagtgaccccagcctgaaggatggcctgtcagactcagactctgagctcagcagctcggaggggttggagcctggtagtgcagaccctctggccaacgggtgccagggggtcagtgaagctgctcatcggctggcacgccgtctctaccacctcgagggcttccagcgctgtgatgtggcccggcagctgggcaagaacaacgagtttagcaggctggtggccggggagtacctcagtttcttcgacttctcgggcttgactctggacggagcactcagaacattcttgaaggccttcccgctgatgggggagacacaagagcgtgagcgggtcctcacacacttctcccgccggtactgccagtgcaaccctgatgacagcacttcggaagatgggatccacacgctcacctgtgccctgatgctgctcaacacggacctgcacggccacaacattggcaaaaagatgtcctgtcagcaattcattgccaacttggaccagctgaatgatggccaagactttgccaaagacctgctgaagaccctttacaactccatcaagaatgaaaagctggaatgggccattgatgaggatgagctgaggaaatccctgtctgagctggtggatgacaagttcgggacaggcacgaagaaggtgacgcgaatcctggatggtggcaaccccttcctggatgtcccacaggcgctcagtgccaccacctacaagcacggcgtcctgacccggaagactcacgctgacatggatggcaagaggacgccccgtgggaggcgtggctggaagaaattctacgcagtgctcaaagggaccatcctgtacctgcagaaggatgagtacaggcctgacaaagctctatcggagggtgacctgaagaacgccattcgcgtgcatcacgctctggccaccagggcctctgactacagcaagaagtccaacgtgctgaagcttaagacagccgactggagggtattcctcttccaggcaccgagcaaggaagaaatgctgtcctggatcctcaggatcaacctggtggcagccatcttctctgccccggccttcccagccgctgtcagctccatgaagaagttctgtcggcccctgctgccctcctgcaccacccgcctctgccaggaggagcaactgcggtctcatgagaataagttgaggcagctgactgcggagctggccgaacacaggtgtcacccagtcgagaggggcatcaagtccaaggaggccgaggagtaccggttgaaggagcactatctcaccttcgagaaaagccgttatgagacctatatccacctcctggctatgaaaatcaaagtgggctcagatgatctggagcggattgaggcccggctggccactctggaaggggatgacccttctctccggaagacacattcaagccctgccctcagccagggccatgtgactggcagcaaaaccacaaaggatgccactgggcctgatacttagctgacatggatttgcagaccccagggtgggcagatgtctccagtggggtcagtgagcacaattccagccaggggccacttggaccaagctccagtcagttgatgggcagctagaggggtgcagaaagcctgtgggcccaggagatggagatgccgtttgtggcgttgatctccttgcgtccttgggcatctccgggcatcagaccctctccctggcccttgttttcctctccaccatggagcctcattttgtaggccagttgtgtgcatgctctagacaccacctcgctggagaagctggaagggctgttgtcttcccaggtctttctcttctcatcaagctcctctcctcatcttttttgtgtgtgagggcaggtcttgactctaggtctcagctggaaccccaccctttctcctcctccttcctctgagttgaccagcagcaggtctgccgaccaccagcaccatcctctcctcccagcagcctccagaaccatgcccaggtctcctgcctcacatcacaataatctgggacccaggcttgtgccctttcagtgtaaagctgactccatcacatgtgcatccacttcttttcatccattgagatcacactgcctcctttttatacagacacaaatatacatctataagaataatatatacataaggaacccctgaaagatggttttggaactggaatcagttagaggatgaaatcagataaaggaaaagcctattttggagcttcccctgttaggaaggatggctgcacctggccccctggcattcctgacgctctaggagggaagggggaggcagtgctggcctcccttgccctgtttttccctcttccagctgacctgtgacttatactgctcttaccgatgatacttttggaaaaaatagagcgtgtatgcaccgccccgtttgtcccatggatatcctggggtgtgagtcggatgggaccacggccctgtttatatttgggtctttatgttggtgctgccaggtctctgagctccagaggtggcctcttggacagatctactgctataggaataaaagacactctgtctcgcaaatggctgcttgtcaacaagcccaaagatgcttgtcggaggacggttatggaagcccttaattcttggttgtgggaaaaggtggaatgacaagttattgattgtttttctgtcgctatttctttcatttgtctagtgaatcagaaaggcttagccaaggccacatctgggaagagtggagaaatttgccacttgacgatcacggattagctagcacctttaagccctgcatttctccaactgacaagtgggtgggggtgatggcacattcagtgtggctatgaagagcgaatcctctctattgtttaaatagattactgtagtttggccaggaatttggcgtcagtggtaacacacttagttaataaaataagccaggcttgcaactaagtatctaactttacaggcccactcacatttgaggcaaggggctattgagtatgtggagagatgtagtgatttaaattcagattatttaagttggatcagctgaagtgtgttttagacccaaaccatctggccccttcgttttgctcagaggaagtaaatgttcacttaaatgaaattgaaaacgccatgtggcaccacaaaagagctctctgtactttccccatgctgcctcaaaagttctgtgagtttcggggtcagtgtcccacccttcacttcccgagggcgggtgagtggagagcagagccaggagctctggcagctgtggacagatgtgcttcctgagcatgggttgtgcctcccatcagtaaaaaaatgtttagttcacttccttaattgtataattatttatttgtaaattatatacatgtactactgtactaaaatattatgtacattataaaacatacacaaaaatagaaatttaaaaaagatgagatgaaaataaatctaagtcaaagttctaa

SEQ ID NO: 166461 - DNA, 6665 bp, Homo sapiens
  Payload ID: 12780
  Gene Symbol: PSD3
  Gene Name: pleckstrin and Sec7 domain containing 3
  Uniprot ID: Q9NYI0
  ENST ID: ENST00000286485
  CDS Start-End: 91-1632
aggctcggcagtcactgaacttgggagctgaagaatactggacggggcttcggagaggaaggatggtccaggcgcaccccaggggttgcgatgggctcttcttggtgtctgtatggttgctgcaatgctggggtgaaaacaacacggctagaagctcattctgaaatggggagcactgaaattttggaaaaggagaccccagaaaatctcagtaatggtaccagcagcaatgtggaagcagccaaaaggttggccaaacgcctttatcagctggacagattcaaaagatcagatgttgcaaaacaccttggcaagaacaacgaatttagcaaactagttgcagaagaatatctgaagttttttgattttacaggaatgacgctggatcagtcactcaggtatttctttaaagcattctctcttgtgggagaaactcaagaacgagagagagttttaatacacttctccaatagatatttttattgtaacccagataccattgcttcacaagatggagtccattgccttacctgtgcaataatgcttcttaataccgatctacatggccacaatattggaaagaagatgacctgtcaggagttcattgcaaatctgcaaggggtaaatgagggtgttgatttctccaaggatctgctgaaagctctgtacaactcaatcaagaatgagaagcttgaatgggcagtagatgatgaagagaaaaaaaagtctccctcagaaagtactgaggagaaagctaacggaacacatccaaagaccatcagtcgtattggaagtactactaacccatttttggacattcctcatgatccaaatgctgctgtgtacaaaagtggattcttggctcggaaaattcatgcagatatggatggaaagaagactccaagaggaaaacgaggatggaaaaccttttatgctgtactgaagggaacagttctttacttgcaaaaggatgaatacaagccagaaaaggccttgtctgaagaggacttgaaaaacgctgtgagtgtgcaccacgcattggcatccaaggccacggactatgagaagaaaccaaacgtgtttaaacttaaaactgccgactggagggtcttgctttttcaaactcagagcccagaggaaatgcaagggtggataaacaaaatcaattgtgtggcagctgtattttctgcaccaccatttccagcagcaatcggctctcagaagaagtttagccgcccacttctgcctgccactacaacaaaactgtctcaggaggagcaactgaagtcacatgaaagtaagctgaagcagatcaccaccgagctggccgagcaccgctcatatccccccgacaagaaggtcaaagccaaggacgtcgatgagtacaaactgaaagaccactatctggagtttgagaaaacccgctatgaaatgtatgtcagcattctcaaggaaggaggcaaagagctactgagtaacgatgaaagcgaggctgcaggactgaagaagtcgcactcgagtccttcgctgaacccggatacttctccaatcactgccaaagtcaagcgtaacgtgtcagagaggaaggatcaccgacctgaaacaccaagcattaagcaaaaagttacttagagtccatctgcggccaggaagtgctggtcatggagcaaaatagggtttttcaagatctttctggtaatccgtgaatatatttaaaaaaaaaaagtctgtgacaaaacggtgcattagtaattttttctattgtatatttttgttagtttctgtacagattgtctttgctcttgatttcttttgctttgatgatttttgcaacttgatagctaatgcaccttttctgtgaggaggaggggatcgtgatttcagaatgaattatgtatcccttctcttttggttttctcttgtttgcagtctgctcagttgttttatgtattctcatatcaactgttaaacttttttttaaggttaaagaatttaatccattgtgaaacacttaactggacaaactgtagttttagtaaattctagctggagttaatatacgcctttatatgtgaaatcttgcccagtcacagaggtagaattgagcactcacagatgctccagtaagaatcacagtgctgggaatctagttgctccaatatgaggcagcttcatgtgcagcttagcacttgttgttgagatcggaccctgctggaagcagggaaaagaagcgtgaagatcgtaggattgagaacttagggaagcacattagcttgcttgaagtgctgattccatttcagccaagcaagggaaagaggaagtggagtcattttgcctttgaaggctgaggaaagattgatacccagttaattttgtttgctaaaggatgggggcaataatcggcccttgaggagctgcagcagtaggcatgtgctcagtctgcaggaattgttacctcactcccacagggtctagactagaaatccatcatctctatcgttgatatccttccatccaggaatagatttttcttactctacatatgtgtgtgtgcgtgcgtgtgtgtgcgtgtgtgggcatggggttgtgtcctggttgtgatattgaggtcttccttcctaacaaattaatactaaaatgaaacagcttttcttgtgtccttaagacaaaataaggaaggaaaacgtagctgcagttgtccacgatggatattggttctttaaaatatatctgaaagtagtagtcagaatgaattatggttggaaaactgaggaatcttctggttgcaggtgcaaagtgactttgtttattcttgtctcagtctccttgatagccacttcactctgctactactcaactttctcctaaaaatacttcatctattttcagtcctttctttctgtctactcaaaatggttctattaactttgcagtcatgagcttgttccagttacagtccctttgaagttcagggtgataaacagaatattcttctgtagaggaagagaaaggagtgaaagtttagcccactgagacctagagctttgtgatttcctaaccttgaaactctgtaatccctaaagttaaaatctccgcaagtggcacaacttcagaactaatagtatcactttgatttttctttttcctcccttagaaagtttctctagttctatagtttatttgttgaaggtactatgaccaaagaatcagctgctctacaggaatagcatggttccagtgaattagagaaaacctgctgtaaagccatggtagtgtctaagtggtatgttattatgatgtactagcatttatttacagaattatttattaacgtttacttccttcccctctgtaaatgtccatgactattgcccagagaaggcttacccctctctagggttgcagttgctttctttgtaataagtattttgccacacctgtaaaaaaaaaaacctcacttttaactctctgccttgtttgggtaaaggcagtaactaagtttatgtttcagaactgcaaaacaaacaggatagttaccaatatggcccatgtatcagattgatttttgtagcctctcactgaatccaacatatccacaagcaagttatctgtctttctacctgataatctaaattatcaggatatttgttttctgcctaaatgtttatactaagccgaggggagagaggtacctagaccatgtcatctacaagcttcagtaactaaagaaaaaggaacttccctgagtggcttgaatgtgtttgcccacagtctatatctatgtatatagaatgtctgtatgtattttacttatttaatatacattgaatggtaccttgctacagtatttctgacatttagagtagtgttgaaatactcggctagcatcagcaccactatagcactgtccgtgtcatatgagtcactaatattaactccagggacttctggataggctaatagatcattggatacgaagggctcttttgaagcttcagtataccatgtttgcatagtttatctttaaaaacaactttaaaggttcttttgtgagccaggatctcagactgccgtagcatgatgctgtccatctttagcgcatgggctgagaacacctcttccctgaggcttctgaaggttgctgtctgtcatgagtgcatgaaggaggccaagagtttatgctatgggaggaaacagtcactgatttgcctagattctgagagtctggcccatagccaaccacattttcctttgggataatttatttcctgtggcatctagccagaagaaattgaggatgtttcctttcacagctgctccaagcctgttgcccaattcacggtacaagggagcaccccttccctttcctctgaaggtacgccacccacctccgtcgcccacctcagcgcccaggagccttgggacttccttccatatgataaatcattcttcttcacgtcaatacacttcatattaatttctagtacagaaaatcttgacagctatcagaatgccttggtcatagtgttgttgcaaaattgaccatacaggtggcccatgtataaaatctgaattttaggggtttgtccccacctcgcatgctggcttttacagggaggtgtctgggattcctcattagcaatcaaaacttaattactgggatgcagagtccttactttatcgccagcccgtaggcatttctgaagtgcacttttttgaaacatcattttgctaactctcagcagtgtctaattaaactgagcaatacttttgtgaattttaattaatctcagcaaaaccatgatgggagagagtcctctgatggaaatgtagtccctggattatgtgtaacctttttattcctcttagatgcagaggatagaaagcattttttggtgcagtggtcttgtggcaaacacaagaccctctatgcgtctccaactgttatcctaatctagaaaatgaggactggcccctgggcaaaagtgacatgaggaatttactctggaagaggaaaatctgggtggctttccaaggctaagataggtttgtatttcaccctgtggccaagctacagaacttctgagattgtggaagaatttttgcaaccagcagggaaagaggcctcttactgcctaaacacaaagttacactgagcttttctactgtcctttgcctattgctccctctatcatgtaaagatctgggaaggatgagaggcagggcctgcttgtcatgagctgcactcttttctttttaactaatcattgacaattggaagaaaattgacgttaaagaagtttctccattgtcttactaacaaaaccttttgggtttcattaattgtccttgaaattgagttcctttggcatttttccttgcagtcatcagttaagcatgttgcatcctgaattcacagaagtttagctttgcaggtttgaatctctgtaatttaactcccgtggacttggtcgagttttcagcaggttgggagccacctctcttcatttcagcagtgagtcatcccttgacttttcaaatgacagaattttttccaattgtaaaattagcactgtaaaacaaagaaccaaagtggcatcctaagagttgttaaacctgaagtctagtttatgaggaattgtccaagttggagtttaaatagtatctgcttttgtctcaaagcatctaagttattctgacagaaaatggtaagtcagctttgcaggcagatgcgcctctgggcctcctaccttgctccacagctttctggccatcttgtctcccaggccatgccactgctctgccacatgtcagcaaatttctttccaccagtcttatagcatcttacatgatcaaatcatcacagaataaccccgtgatagattattgatagcaatagagaggggctttgtcactgatttttctctcagattccttttccatctctcatccataaaggaaggactgaaatccaaaggcattctccttttgtacctacagtatccagaacccacgtgggcagccttctgcttatgacaataattggcccattgcatgcagagagaatgtcttcatagagagaatgtcattaaatacttgaatctgcatgacagtttgacttgaatgcaacagcaggaaaattttgcaagttacataattgtatatacagtaggttttcttaagtctcttcggttcatcctttgtaatttgtgtgtgtatctgtagtattgcaggcttttggagactattcttacaggcagtatgtcagtcatcaaagaaaatgctgtcacctgccattgttgtatttgtgggtatttatagttgtatgtatgtaaatgcatcagtgtgtagattgcatatcagtgtatggtacatgtacatcaaaattatttttgtccttaatcagtgtgatatgaaaagcaagtacaacctcataggactgattatataatgaagttgttgagagtatatatagtggtattgttttattaaacttaaactcaaataatattttgattaaaatttttaataagactttatgctagaaaattctttgagctttgaatcaccagggcaaaaatgactttcaactaaccttgtgaatcttttgcagtgtactgtgtgcaataccaagggcatagctccctgtaatttgggaaatacag

SEQ ID NO: 166462 - DNA, 11689 bp, Homo sapiens
  Payload ID: 12780
  Gene Symbol: PSD3
  Gene Name: pleckstrin and Sec7 domain containing 3
  Uniprot ID: Q9NYI0
  ENST ID: ENST00000327040
  CDS Start-End: 104-3247
aacaaagagcacgcggcgctggccgccggcactcgcgccctgaggctgcggccccggagcgcccggcggcggtttcggcgcgcggccgggctggcgatggaagatggaaggaaggagcgcagcggcagagacatttgtttgggtgaacaatgcatctgcacattcccagagtgttgccaaggccaaatatgaatttttatttggcagatctgaagggaaagctccagatactagtgatcatggaggaagcactttactcccaccaaatgtcacaaatgaatttccagaatatgggaccatggaggaaggtggagaaggcctaagggcttctctggaatttgatggtgaggctctgccatgccacccacaagagcagcagggtgtccagcctcttactggctgccactctgggctcgacagtgttacagaaggaccaaaagatgtcagagaggccccctctcaaagtcatctcaaggaacaaagtttacagcccattgactctttgatttcagctctgaaagccacagaagccagaatcatttccggaacattacaggctacaaaggtactggaccaagatgctgtttctagtttttcagttcagcaggtggaaaaagagctggacactgccagtcgtaaaacacagagagtcaacaaaacgctccctgctggccaaaaaaatttaccagaaatacctctttcagctgaagtaacaacggaggaaagtttttatttgagcatccagaaagatctcaccgcgctgttaactggagacactcaggcagagatttcccagataatgaataatgggaggaaaggggctgtctgtgtgcaggagccatcttgtcctttggcctccctcgggagctcagcagtgacctgccactctgcaggcagtgttggtttcttgaaagagcagaggtctgctcttgggagagagcacccagggggatgtgatcgaagcagctccatgggacgcccaggccgggtcaaacatgtggaatttcaaggagtggaaatactgtggacaggaggagacaagagagagacccagcatcctatagattttgagacatcactgcaaagaacagcctctcctgacagcaaagagtcttccaaagtgccacgccatctcatctcatcagctggtttgtgtaattcaagtagtttaactgagaatgtttgggatgaatcctggaaagctccttcagagaggcctggcactagctcggggacattttcccctgtgcgtcttgatgagagtggagaggatgaagtcttcctacaggaaaacaaacagcatcttgagaagacacctaaaccagagagagacagggaaaggatcagcgaacaagaggagcacgttaagggggaagatgaagacatccttgggcctggatatacggaggactccaccgacgtgtacagctcccagtttgaaaccattttggacaacacttctttatactacagtgcagagtccctggagacattatactcagagcctgatagctattttagctttgaaatgcccctcactccaatgatacaacagcgcattaaagaaggtggtcagttcttggagaggacatcagggggaggacatcaggatatcctgagtgtgtctgcagatggtggcatcgtgatgggctattctagtggcgtcaccaatgggctgaatgatgccagcgactccatctacacgaaaggcaccccggagattgctttctggggaagcaatgctggggtgaaaacaacacggctagaagctcattctgaaatggggagcactgaaattttggaaaaggagaccccagaaaatctcagtaatggtaccagcagcaatgtggaagcagccaaaaggttggccaaacgcctttatcagctggacagattcaaaagatcagatgttgcaaaacaccttggcaagaacaacgaatttagcaaactagttgcagaagaatatctgaagttttttgattttacaggaatgacgctggatcagtcactcaggtatttctttaaagcattctctcttgtgggagaaactcaagaacgagagagagttttaatacacttctccaatagatatttttattgtaacccagataccattgcttcacaagatggagtccattgccttacctgtgcaataatgcttcttaataccgatctacatggccacaatattggaaagaagatgacctgtcaggagttcattgcaaatctgcaaggggtaaatgagggtgttgatttctccaaggatctgctgaaagctctgtacaactcaatcaagaatgagaagcttgaatgggcagtagatgatgaagagaaaaaaaagtctccctcagaaagtactgaggagaaagctaacggaacacatccaaagaccatcagtcgtattggaagtactactaacccatttttggacattcctcatgatccaaatgctgctgtgtacaaaagtggattcttggctcggaaaattcatgcagatatggatggaaagaagactccaagaggaaaacgaggatggaaaaccttttatgctgtactgaagggaacagttctttacttgcaaaaggatgaatacaagccagaaaaggccttgtctgaagaggacttgaaaaacgctgtgagtgtgcaccacgcattggcatccaaggccacggactatgagaagaaaccaaacgtgtttaaacttaaaactgccgactggagggtcttgctttttcaaactcagagcccagaggaaatgcaagggtggataaacaaaatcaattgtgtggcagctgtattttctgcaccaccatttccagcagcaatcggctctcagaagaagtttagccgcccacttctgcctgccactacaacaaaactgtctcaggaggagcaactgaagtcacatgaaagtaagctgaagcagatcaccaccgagctggccgagcaccgctcatatccccccgacaagaaggtcaaagccaaggacgtcgatgagtacaaactgaaagaccactatctggagtttgagaaaacccgctatgaaatgtatgtcagcattctcaaggaaggaggcaaagagctactgagtaacgatgaaagcgaggctgcaggactgaagaagtcgcactcgagtccttcgctgaacccggatacttctccaatcactgccaaagtcaagcgtaacgtgtcagagaggaaggatcaccgacctgaaacaccaagcattaagcaaaaagttacttagagtccatctgcggccaggaagtgctggtcatggagcaaaatagggtttttcaagatctttctggtaatccgtgaatatatttaaaaaaaaaaagtctgtgacaaaacggtgcattagtaattttttctattgtatatttttgttagtttctgtacagattgtctttgctcttgatttcttttgctttgatgatttttgcaacttgatagctaatgcaccttttctgtgaggaggaggggatcgtgatttcagaatgaattatgtatcccttctcttttggttttctcttgtttgcagtctgctcagttgttttatgtattctcatatcaactgttaaacttttttttaaggttaaagaatttaatccattgtgaaacacttaactggacaaactgtagttttagtaaattctagctggagttaatatacgcctttatatgtgaaatcttgcccagtcacagaggtagaattgagcactcacagatgctccagtaagaatcacagtgctgggaatctagttgctccaatatgaggcagcttcatgtgcagcttagcacttgttgttgagatcggaccctgctggaagcagggaaaagaagcgtgaagatcgtaggattgagaacttagggaagcacattagcttgcttgaagtgctgattccatttcagccaagcaagggaaagaggaagtggagtcattttgcctttgaaggctgaggaaagattgatacccagttaattttgtttgctaaaggatgggggcaataatcggcccttgaggagctgcagcagtaggcatgtgctcagtctgcaggaattgttacctcactcccacagggtctagactagaaatccatcatctctatcgttgatatccttccatccaggaatagatttttcttactctacatatgtgtgtgtgcgtgcgtgtgtgtgcgtgtgtgggcatggggttgtgtcctggttgtgatattgaggtcttccttcctaacaaattaatactaaaatgaaacagcttttcttgtgtccttaagacaaaataaggaaggaaaacgtagctgcagttgtccacgatggatattggttctttaaaatatatctgaaagtagtagtcagaatgaattatggttggaaaactgaggaatcttctggttgcaggtgcaaagtgactttgtttattcttgtctcagtctccttgatagccacttcactctgctactactcaactttctcctaaaaatacttcatctattttcagtcctttctttctgtctactcaaaatggttctattaactttgcagtcatgagcttgttccagttacagtccctttgaagttcagggtgataaacagaatattcttctgtagaggaagagaaaggagtgaaagtttagcccactgagacctagagctttgtgatttcctaaccttgaaactctgtaatccctaaagttaaaatctccgcaagtggcacaacttcagaactaatagtatcactttgatttttctttttcctcccttagaaagtttctctagttctatagtttatttgttgaaggtactatgaccaaagaatcagctgctctacaggaatagcatggttccagtgaattagagaaaacctgctgtaaagccatggtagtgtctaagtggtatgttattatgatgtactagcatttatttacagaattatttattaacgtttacttccttcccctctgtaaatgtccatgactattgcccagagaaggcttacccctctctagggttgcagttgctttctttgtaataagtattttgccacacctgtaaaaaaaaaaacctcacttttaactctctgccttgtttgggtaaaggcagtaactaagtttatgtttcagaactgcaaaacaaacaggatagttaccaatatggcccatgtatcagattgatttttgtagcctctcactgaatccaacatatccacaagcaagttatctgtctttctacctgataatctaaattatcaggatatttgttttctgcctaaatgtttatactaagccgaggggagagaggtacctagaccatgtcatctacaagcttcagtaactaaagaaaaaggaacttccctgagtggcttgaatgtgtttgcccacagtctatatctatgtatatagaatgtctgtatgtattttacttatttaatatacattgaatggtaccttgctacagtatttctgacatttagagtagtgttgaaatactcggctagcatcagcaccactatagcactgtccgtgtcatatgagtcactaatattaactccagggacttctggataggctaatagatcattggatacgaagggctcttttgaagcttcagtataccatgtttgcatagtttatctttaaaaacaactttaaaggttcttttgtgagccaggatctcagactgccgtagcatgatgctgtccatctttagcgcatgggctgagaacacctcttccctgaggcttctgaaggttgctgtctgtcatgagtgcatgaaggaggccaagagtttatgctatgggaggaaacagtcactgatttgcctagattctgagagtctggcccatagccaaccacattttcctttgggataatttatttcctgtggcatctagccagaagaaattgaggatgtttcctttcacagctgctccaagcctgttgcccaattcacggtacaagggagcaccccttccctttcctctgaaggtacgccacccacctccgtcgcccacctcagcgcccaggagccttgggacttccttccatatgataaatcattcttcttcacgtcaatacacttcatattaatttctagtacagaaaatcttgacagctatcagaatgccttggtcatagtgttgttgcaaaattgaccatacaggtggcccatgtataaaatctgaattttaggggtttgtccccacctcgcatgctggcttttacagggaggtgtctgggattcctcattagcaatcaaaacttaattactgggatgcagagtccttactttatcgccagcccgtaggcatttctgaagtgcacttttttgaaacatcattttgctaactctcagcagtgtctaattaaactgagcaatacttttgtgaattttaattaatctcagcaaaaccatgatgggagagagtcctctgatggaaatgtagtccctggattatgtgtaacctttttattcctcttagatgcagaggatagaaagcattttttggtgcagtggtcttgtggcaaacacaagaccctctatgcgtctccaactgttatcctaatctagaaaatgaggactggcccctgggcaaaagtgacatgaggaatttactctggaagaggaaaatctgggtggctttccaaggctaagataggtttgtatttcaccctgtggccaagctacagaacttctgagattgtggaagaatttttgcaaccagcagggaaagaggcctcttactgcctaaacacaaagttacactgagcttttctactgtcctttgcctattgctccctctatcatgtaaagatctgggaaggatgagaggcagggcctgcttgtcatgagctgcactcttttctttttaactaatcattgacaattggaagaaaattgacgttaaagaagtttctccattgtcttactaacaaaaccttttgggtttcattaattgtccttgaaattgagttcctttggcatttttccttgcagtcatcagttaagcatgttgcatcctgaattcacagaagtttagctttgcaggtttgaatctctgtaatttaactcccgtggacttggtcgagttttcagcaggttgggagccacctctcttcatttcagcagtgagtcatcccttgacttttcaaatgacagaattttttccaattgtaaaattagcactgtaaaacaaagaaccaaagtggcatcctaagagttgttaaacctgaagtctagtttatgaggaattgtccaagttggagtttaaatagtatctgcttttgtctcaaagcatctaagttattctgacagaaaatggtaagtcagctttgcaggcagatgcgcctctgggcctcctaccttgctccacagctttctggccatcttgtctcccaggccatgccactgctctgccacatgtcagcaaatttctttccaccagtcttatagcatcttacatgatcaaatcatcacagaataaccccgtgatagattattgatagcaatagagaggggctttgtcactgatttttctctcagattccttttccatctctcatccataaaggaaggactgaaatccaaaggcattctccttttgtacctacagtatccagaacccacgtgggcagccttctgcttatgacaataattggcccattgcatgcagagagaatgtcttcatagagagaatgtcattaaatacttgaatctgcatgacagtttgacttgaatgcaacagcaggaaaattttgcaagttacataattgtatatacagtaggttttcttaagtctcttcggttcatcctttgtaatttgtgtgtgtatctgtagtattgcaggcttttggagactattcttacaggcagtatgtcagtcatcaaagaaaatgctgtcacctgccattgttgtatttgtgggtatttatagttgtatgtatgtaaatgcatcagtgtgtagattgcatatcagtgtatggtacatgtacatcaaaattatttttgtccttaatcagtgtgatatgaaaagcaagtacaacctcataggactgattatataatgaagttgttgagagtatatatagtggtattgttttattaaacttaaactcaaataatattttgattaaaatttttaataagactttatgctagaaaattctttgagctttgaatcaccagggcaaaaatgactttcaactaaccttgtgaatcttttgcagtgtactgtgtgcaataccaagggcatagctccctgtaatttgggaaatacagaaagaaaagaaaaaaaaaaaaaaaggcagcctgtgcagtcttagtaactttagtattaagagcacttaaagtcaaactgacaattttgggcttattacaaaatgtgatgctttaaagcacacgttctttattgttgttgtaattagtccataaaaaatatagctttcggaagaattaagtacccaccatatcatttatgtatttgtgtatgttttacgggagatcaaaccactctcgtggtgccgcatccgtactcgcttgacttggaagaaatatcacaagcactaaagtatatcagggcatcccaggattgggtactgtatcctaggtttgcagttgcagaaattagcatctagtgtcacaggtaaaagaatttcaggaccaggtttaaactttattttaaatatttttatacttaggtctctttttcctgcctctccccaaagaagagccactggccttagttgtttgagcttactgcttatattatagagtgtaaataggtaactagagactaaaattttattaaccagcatgtttggtatatttaaagcagtgactgagtgtgtttgagtgagtggctgagtgcagtgtcttttgtttaaacacactgcctcgtgtctttgtagctgattcagagagtttgaattgtggggtgggagactaacttcagctccaggctgcagtaatgtgttggtagttacacttgaggcatttttttgttgttgttaattaactctatagtctcaaactatttttgcaaatatatcatttttcctaattggttcttgacgtgcagtggactggctctgtgaatgattggcagggtcttagttttgcgagagtatttccttctaagaattattgtgatctgcagaaacagccatttgattcaaaaatcatgtagaaaaggagtaggagaagcaaaacgtttcatttttgggccttaaccatttgaaatgtttggactttaaacataaagccatggagtttataaagccaagtaaccatttgatatggataataatatctactctagagagagtatatatatgcacattgatttttaatgctgttaagatacttttgtaaaactgtaggaacaagagtaattagaccaaattgaagcttaggggacagtaaagtggttgctttccatttagggtaaccatgcatgtggttagtcctctcctcctgagattcagaaccagttgactgtccccttaggtgtataaggagaaaagttgacatgtctgggacctctgacatgtgtacacatgcttgcacacatgcacacacagtgaatgttttaagttatacaaacataagaccttaagatgcaaagagccagaatattctaaagaggtgatgaacagagggggtggaaactgcatcacagatgttttccaagggccagggtggaatctgagctctagtgtctgactttgagatgcattatatttttaacacataaatgaggggatccatatcacattctttcttgtggaccaccaaattgaaggctttcttgtaattcacaagcagcagctctccagcatctctccgtagcctgggtgaagtcccagaagctggtgtgcatcattttccaaggtggcagagctgcttgctctgcagatcattcctttgagagaggagtacaagtgaagaaacaaggaggcacttcctgtaggagcactgatgtgccttgtccacactcccctctgagctttactggtaagagagctccgactgaacatgctgagcagttgagcacttttccatcagcaacaacagcgaggatggaaatggaaaggaaccgaactaaaatgcatttccctttgcagggcagagagctaagctcttaggaatagtgttatagaaataagcaccctaacttcaattcctgaaaatgttggttaatggagagaattttggagtttcacttaatattttcccatcggtcgccataaataagtcttcaggcgctcctagaagagtcccagcccaaggctcgattaaggaccacactgcaggtctgaggctcactgctctgagtcctgaacaccagagccctgcagagagtggtgataacacatcatctctgcaaagaggaacctctcccccggccgccacttcactcaggcttctactgagcagcaaggacagcctgggtttcaaatgccacttcccctgctttagggatccaggtgtcctgatagcgtgaccctgctgaggcaaggtatcaactccgagagtgactgagtcactgagcgtggcacatgaacaaacgtcatgacaaagattctctgagtgaagttaacaccacgtattttacctttgcaaaaaacaaactggcaccctgagttctaactacggacggacgatatctttgcctccacacccagattcctggaaatggctaacgtttcctttctaggggaagggtcgaggaatactcaagtgctagcttagcagctttgttcagtccagatcagagctgttaggtaaaggcctaaccacctccctgcagtctcttatatctcaagctttaggaacccatttctaaatgtacactagcggagaatttatattgtcagccttgattaccataggacaggcagaaaggcgataatttgtatcttttaatataaaagaagcttttaacttttccagcctattataataactgagttatattcactgtggctcaaactaattggcattgtggaacatttctttaccttcaaagttttctccaccaatcatttcagttctattgcagtcctggtgccatatgtcccctgcaaattgtgaaagtaattagtgacaaaatagcagcctgctccttttcaatggcgaaactgtcggcattagcagttttgggtaagctggcggtactataacacgtactggaaacctgttcctcatcaccacctaccagattctggaaatgccgtcttctagaaaacgatggcgtttgtggtggtcttcttttgaaaggaacagtaatttgtgtggatattgttaaagtgtttaaagaatattttgacaattaagtttacattttacaattgctttattttttattaaaatagttgtatataaatattaccctatttcactgttgttcaagtaaatctaaaccttgtagacaagtgagtcatctgatatgtatagaagctgtgatatatagagtacatttattgtgtaaatgtttatgaatataattgttcctgtgtttttataagttggggatattttgttgttttacggcaacaaaatttattgcatttaaatggtttttatgtaatagaaatcacgcaaaatagtgaaggatttaaaatatgtatatgatacatgtaaatgtacaaactttagaaagaaataaatccaacaaatttcaatcatt

SEQ ID NO: 166463 - DNA, 6330 bp, Homo sapiens
  Payload ID: 12780
  Gene Symbol: PSD3
  Gene Name: pleckstrin and Sec7 domain containing 3
  ENST ID: ENST00000428502
  CDS Start-End: 168-1298
gaagatgctgggggaggcagcctggtgcttcttaagctaacgcggatcacggcgctcaggagctgctcaggcacaaccccgcagagttcctccagcgtgagagccttggaacggttggaaagtgcctttttatttctctaaaccccttccttagttgaccttcgaaaatgattggcgtgaatagtgtccagagtgccagcaaggtacgggtgaggacctcaggttccgtgaaatactcccgggaggattctatccggcggcagtctcacaggtcaaagtccatgaaaatttccaactcctcagagttttctgctaaggagaacaaggctctgtacaactcaatcaagaatgagaagcttgaatgggcagtagatgatgaagagaaaaaaaagtctccctcagaaagtactgaggagaaagctaacggaacacatccaaagaccatcagtcgtattggaagtactactaacccatttttggacattcctcatgatccaaatgctgctgtgtacaaaagtggattcttggctcggaaaattcatgcagatatggatggaaagaagactccaagaggaaaacgaggatggaaaaccttttatgctgtactgaagggaacagttctttacttgcaaaaggatgaatacaagccagaaaaggccttgtctgaagaggacttgaaaaacgctgtgagtgtgcaccacgcattggcatccaaggccacggactatgagaagaaaccaaacgtgtttaaacttaaaactgccgactggagggtcttgctttttcaaactcagagcccagaggaaatgcaagggtggataaacaaaatcaattgtgtggcagctgtattttctgcaccaccatttccagcagcaatcggctctcagaagaagtttagccgcccacttctgcctgccactacaacaaaactgtctcaggaggagcaactgaagtcacatgaaagtaagctgaagcagatcaccaccgagctggccgagcaccgctcatatccccccgacaagaaggtcaaagccaaggacgtcgatgagtacaaactgaaagaccactatctggagtttgagaaaacccgctatgaaatgtatgtcagcattctcaaggaaggaggcaaagagctactgagtaacgatgaaagcgaggctgcaggactgaagaagtcgcactcgagtccttcgctgaacccggatacttctccaatcactgccaaagtcaagcgtaacgtgtcagagaggaaggatcaccgacctgaaacaccaagcattaagcaaaaagttacttagagtccatctgcggccaggaagtgctggtcatggagcaaaatagggtttttcaagatctttctggtaatccgtgaatatatttaaaaaaaaaaagtctgtgacaaaacggtgcattagtaattttttctattgtatatttttgttagtttctgtacagattgtctttgctcttgatttcttttgctttgatgatttttgcaacttgatagctaatgcaccttttctgtgaggaggaggggatcgtgatttcagaatgaattatgtatcccttctcttttggttttctcttgtttgcagtctgctcagttgttttatgtattctcatatcaactgttaaacttttttttaaggttaaagaatttaatccattgtgaaacacttaactggacaaactgtagttttagtaaattctagctggagttaatatacgcctttatatgtgaaatcttgcccagtcacagaggtagaattgagcactcacagatgctccagtaagaatcacagtgctgggaatctagttgctccaatatgaggcagcttcatgtgcagcttagcacttgttgttgagatcggaccctgctggaagcagggaaaagaagcgtgaagatcgtaggattgagaacttagggaagcacattagcttgcttgaagtgctgattccatttcagccaagcaagggaaagaggaagtggagtcattttgcctttgaaggctgaggaaagattgatacccagttaattttgtttgctaaaggatgggggcaataatcggcccttgaggagctgcagcagtaggcatgtgctcagtctgcaggaattgttacctcactcccacagggtctagactagaaatccatcatctctatcgttgatatccttccatccaggaatagatttttcttactctacatatgtgtgtgtgcgtgcgtgtgtgtgcgtgtgtgggcatggggttgtgtcctggttgtgatattgaggtcttccttcctaacaaattaatactaaaatgaaacagcttttcttgtgtccttaagacaaaataaggaaggaaaacgtagctgcagttgtccacgatggatattggttctttaaaatatatctgaaagtagtagtcagaatgaattatggttggaaaactgaggaatcttctggttgcaggtgcaaagtgactttgtttattcttgtctcagtctccttgatagccacttcactctgctactactcaactttctcctaaaaatacttcatctattttcagtcctttctttctgtctactcaaaatggttctattaactttgcagtcatgagcttgttccagttacagtccctttgaagttcagggtgataaacagaatattcttctgtagaggaagagaaaggagtgaaagtttagcccactgagacctagagctttgtgatttcctaaccttgaaactctgtaatccctaaagttaaaatctccgcaagtggcacaacttcagaactaatagtatcactttgatttttctttttcctcccttagaaagtttctctagttctatagtttatttgttgaaggtactatgaccaaagaatcagctgctctacaggaatagcatggttccagtgaattagagaaaacctgctgtaaagccatggtagtgtctaagtggtatgttattatgatgtactagcatttatttacagaattatttattaacgtttacttccttcccctctgtaaatgtccatgactattgcccagagaaggcttacccctctctagggttgcagttgctttctttgtaataagtattttgccacacctgtaaaaaaaaaaacctcacttttaactctctgccttgtttgggtaaaggcagtaactaagtttatgtttcagaactgcaaaacaaacaggatagttaccaatatggcccatgtatcagattgatttttgtagcctctcactgaatccaacatatccacaagcaagttatctgtctttctacctgataatctaaattatcaggatatttgttttctgcctaaatgtttatactaagccgaggggagagaggtacctagaccatgtcatctacaagcttcagtaactaaagaaaaaggaacttccctgagtggcttgaatgtgtttgcccacagtctatatctatgtatatagaatgtctgtatgtattttacttatttaatatacattgaatggtaccttgctacagtatttctgacatttagagtagtgttgaaatactcggctagcatcagcaccactatagcactgtccgtgtcatatgagtcactaatattaactccagggacttctggataggctaatagatcattggatacgaagggctcttttgaagcttcagtataccatgtttgcatagtttatctttaaaaacaactttaaaggttcttttgtgagccaggatctcagactgccgtagcatgatgctgtccatctttagcgcatgggctgagaacacctcttccctgaggcttctgaaggttgctgtctgtcatgagtgcatgaaggaggccaagagtttatgctatgggaggaaacagtcactgatttgcctagattctgagagtctggcccatagccaaccacattttcctttgggataatttatttcctgtggcatctagccagaagaaattgaggatgtttcctttcacagctgctccaagcctgttgcccaattcacggtacaagggagcaccccttccctttcctctgaaggtacgccacccacctccgtcgcccacctcagcgcccaggagccttgggacttccttccatatgataaatcattcttcttcacgtcaatacacttcatattaatttctagtacagaaaatcttgacagctatcagaatgccttggtcatagtgttgttgcaaaattgaccatacaggtggcccatgtataaaatctgaattttaggggtttgtccccacctcgcatgctggcttttacagggaggtgtctgggattcctcattagcaatcaaaacttaattactgggatgcagagtccttactttatcgccagcccgtaggcatttctgaagtgcacttttttgaaacatcattttgctaactctcagcagtgtctaattaaactgagcaatacttttgtgaattttaattaatctcagcaaaaccatgatgggagagagtcctctgatggaaatgtagtccctggattatgtgtaacctttttattcctcttagatgcagaggatagaaagcattttttggtgcagtggtcttgtggcaaacacaagaccctctatgcgtctccaactgttatcctaatctagaaaatgaggactggcccctgggcaaaagtgacatgaggaatttactctggaagaggaaaatctgggtggctttccaaggctaagataggtttgtatttcaccctgtggccaagctacagaacttctgagattgtggaagaatttttgcaaccagcagggaaagaggcctcttactgcctaaacacaaagttacactgagcttttctactgtcctttgcctattgctccctctatcatgtaaagatctgggaaggatgagaggcagggcctgcttgtcatgagctgcactcttttctttttaactaatcattgacaattggaagaaaattgacgttaaagaagtttctccattgtcttactaacaaaaccttttgggtttcattaattgtccttgaaattgagttcctttggcatttttccttgcagtcatcagttaagcatgttgcatcctgaattcacagaagtttagctttgcaggtttgaatctctgtaatttaactcccgtggacttggtcgagttttcagcaggttgggagccacctctcttcatttcagcagtgagtcatcccttgacttttcaaatgacagaattttttccaattgtaaaattagcactgtaaaacaaagaaccaaagtggcatcctaagagttgttaaacctgaagtctagtttatgaggaattgtccaagttggagtttaaatagtatctgcttttgtctcaaagcatctaagttattctgacagaaaatggtaagtcagctttgcaggcagatgcgcctctgggcctcctaccttgctccacagctttctggccatcttgtctcccaggccatgccactgctctgccacatgtcagcaaatttctttccaccagtcttatagcatcttacatgatcaaatcatcacagaataaccccgtgatagattattgatagcaatagagaggggctttgtcactgatttttctctcagattccttttccatctctcatccataaaggaaggactgaaatccaaaggcattctccttttgtacctacagtatccagaacccacgtgggcagccttctgcttatgacaataattggcccattgcatgcagagagaatgtcttcatagagagaatgtcattaaatacttgaatctgcatgacagtttgacttgaatgcaacagcaggaaaattttgcaagttacataattgtatatacagtaggttttcttaagtctcttcggttcatcctttgtaatttgtgtgtgtatctgtagtattgcaggcttttggagactattcttacaggcagtatgtcagtcatcaaagaaaatgctgtcacctgccattgttgtatttgtgggtatttatagttgtatgtatgtaaatgcatcagtgtgtagattgcatatcagtgtatggtacatgtacatcaaaattatttttgtccttaatcagtgtgatatgaaaagcaagtacaacctcataggactgattatataatgaagttgttgagagtatatatagtggtattgttttattaaacttaaactcaaataatattttgattaaaatttttaataagactttatgctagaaaattctttgagctttgaatcaccagggcaaaaatgactttcaactaaccttgtgaatcttttgcagtgtactgtgtgcaataccaagggcatagctccctgtaatttgggaaataca

SEQ ID NO: 166464 - DNA, 11690 bp, Homo sapiens
  Payload ID: 12780
  Gene Symbol: PSD3
  Gene Name: pleckstrin and Sec7 domain containing 3
  Uniprot ID: Q9NYI0
  ENST ID: ENST00000440756
  CDS Start-End: 104-3250
aacaaagagcacgcggcgctggccgccggcactcgcgccctgaggctgcggccccggagcgcccggcggcggtttcggcgcgcggccgggctggcgatggaagatggaaggaaggagcgcagcggcagagacatttgtttgggtgaacaatgcatctgcacattcccagagtgttgccaaggccaaatatgaatttttatttggcagatctgaagggaaagctccagatactagtgatcatggaggaagcactttactcccaccaaatgtcacaaatgaatttccagaatatgggaccatggaggaaggtggagaaggcctaagggcttctctggaatttgatggtgaggctctgccatgccacccacaagagcagcagggtgtccagcctcttactggctgccactctgggctcgacagtgttacagaaggaccaaaagatgtcagagaggccccctctcaaagtcatctcaaggaacaaagtttacagcccattgactctttgatttcagctctgaaagccacagaagccagaatcatttccggaacattacaggctacaaaggtactggaccaagatgctgtttctagtttttcagttcagcaggtggaaaaagagctggacactgccagtcgtaaaacacagagagtcaacaaaacgctccctgctggccaaaaaaatttaccagaaatacctctttcagctgaagtaacaacggaggaaagtttttatttgagcatccagaaagatctcaccgcgctgttaactggagacactcaggcagagatttcccagataatgaataatgggaggaaaggggctgtctgtgtgcaggagccatcttgtcctttggcctccctcgggagctcagcagtgacctgccactctgcaggcagtgttggtttcttgaaagagcagaggtctgctcttgggagagagcacccagggggatgtgatcgaagcagctccatgggacgcccaggccgggtcaaacatgtggaatttcaaggagtggaaatactgtggacaggaggagacaagagagagacccagcatcctatagattttgagacatcactgcaaagaacagcctctcctgacagcaaagagtcttccaaagtgccacgccatctcatctcatcagctggtttgtgtaattcaagtagtttaactgagaatgtttgggatgaatcctggaaagctccttcagagaggcctggcactagctcggggacattttcccctgtgcgtcttgatgagagtggagaggatgaagtcttcctacaggaaaacaaacagcatcttgagaagacacctaaaccagagagagacagggaaaggatcagcgaacaagaggagcacgttaagggggaagatgaagacatccttgggcctggatatacggaggactccaccgacgtgtacagctcccagtttgaaaccattttggacaacacttctttatactacagtgcagagtccctggagacattatactcagagcctgatagctattttagctttgaaatgcccctcactccaatgatacaacagcgcattaaagaaggtggtcagttcttggagaggacatcagggggaggacatcaggatatcctgagtgtgtctgcagatggtggcatcgtgatgggctattctagtggcgtcaccaatgggctgaatgatgccagcgactccatctacacgaaaggcaccccggagattgctttctggggaagcaatgctggggtgaaaacaacacggctagaagctcattctgaaatggggagcactgaaattttggaaaaggagaccccagaaaatctcagtaatggtaccagcagcaatgtggaagcagccaaaaggttggccaaacgcctttatcagctggacagattcaaaagatcagatgttgcaaaacaccttggcaagaacaacgaatttagcaaactagttgcagaagaatatctgaagttttttgattttacaggaatgacgctggatcagtcactcaggtatttctttaaagcattctctcttgtgggagaaactcaagaacgagagagagttttaatacacttctccaatagatatttttattgtaacccagataccattgcttcacaagatggagtccattgccttacctgtgcaataatgcttcttaataccgatctacatggccacgtaaatattggaaagaagatgacctgtcaggagttcattgcaaatctgcaaggggtaaatgagggtgttgatttctccaaggatctgctgaaagctctgtacaactcaatcaagaatgagaagcttgaatgggcagtagatgatgaagagaaaaaaaagtctccctcagaaagtactgaggagaaagctaacggaacacatccaaagaccatcagtcgtattggaagtactactaacccatttttggacattcctcatgatccaaatgctgctgtgtacaaaagtggattcttggctcggaaaattcatgcagatatggatggaaagaagactccaagaggaaaacgaggatggaaaaccttttatgctgtactgaagggaacagttctttacttgcaaaaggatgaatacaagccagaaaaggccttgtctgaagaggacttgaaaaacgctgtgagtgtgcaccacgcattggcatccaaggccacggactatgagaagaaaccaaacgtgtttaaacttaaaactgccgactggagggtcttgctttttcaaactcagagcccagaggaaatgcaagggtggataaacaaaatcaattgtgtggcagctgtattttctgcaccaccatttccagcagcaatcggctctcagaagaagtttagccgcccacttctgcctgccactacaacaaaactgtctcaggaggagcaactgaagtcacatgaaagtaagctgaagcagatcaccaccgagctggccgagcaccgctcatatccccccgacaagaaggtcaaagccaaggacgtcgatgagtacaaactgaaagaccactatctggagtttgagaaaacccgctatgaaatgtatgtcagcattctcaaggaaggaggcaaagagctactgagtaacgatgaaagcgaggctgcaggactgaagaagtcgcactcgagtccttcgctgaacccggatacttctccaatcactgccaaagtcaagcgtaacgtgtcagagaggaaggatcaccgacctgaaacaccaagcattaagcaaaaagttacttagagtccatctgcggccaggaagtgctggtcatggagcaaaatagggtttttcaagatctttctggtaatccgtgaatatatttaaaaaaaaaaagtctgtgacaaaacggtgcattagtaattttttctattgtatatttttgttagtttctgtacagattgtctttgctcttgatttcttttgctttgatgatttttgcaacttgatagctaatgcaccttttctgtgaggaggaggggatcgtgatttcagaatgaattatgtatcccttctcttttggttttctcttgtttgcagtctgctcagttgttttatgtattctcatatcaactgttaaacttttttttaaggttaaagaatttaatccattgtgaaacacttaactggacaaactgtagttttagtaaattctagctggagttaatatacgcctttatatgtgaaatcttgcccagtcacagaggtagaattgagcactcacagatgctccagtaagaatcacagtgctgggaatctagttgctccaatatgaggcagcttcatgtgcagcttagcacttgttgttgagatcggaccctgctggaagcagggaaaagaagcgtgaagatcgtaggattgagaacttagggaagcacattagcttgcttgaagtgctgattccatttcagccaagcaagggaaagaggaagtggagtcattttgcctttgaaggctgaggaaagattgatacccagttaattttgtttgctaaaggatgggggcaataatcggcccttgaggagctgcagcagtaggcatgtgctcagtctgcaggaattgttacctcactcccacagggtctagactagaaatccatcatctctatcgttgatatccttccatccaggaatagatttttcttactctacatatgtgtgtgtgcgtgcgtgtgtgtgcgtgtgtgggcatggggttgtgtcctggttgtgatattgaggtcttccttcctaacaaattaatactaaaatgaaacagcttttcttgtgtccttaagacaaaataaggaaggaaaacgtagctgcagttgtccacgatggatattggttctttaaaatatatctgaaagtagtagtcagaatgaattatggttggaaaactgaggaatcttctggttgcaggtgcaaagtgactttgtttattcttgtctcagtctccttgatagccacttcactctgctactactcaactttctcctaaaaatacttcatctattttcagtcctttctttctgtctactcaaaatggttctattaactttgcagtcatgagcttgttccagttacagtccctttgaagttcagggtgataaacagaatattcttctgtagaggaagagaaaggagtgaaagtttagcccactgagacctagagctttgtgatttcctaaccttgaaactctgtaatccctaaagttaaaatctccgcaagtggcacaacttcagaactaatagtatcactttgatttttctttttcctcccttagaaagtttctctagttctatagtttatttgttgaaggtactatgaccaaagaatcagctgctctacaggaatagcatggttccagtgaattagagaaaacctgctgtaaagccatggtagtgtctaagtggtatgttattatgatgtactagcatttatttacagaattatttattaacgtttacttccttcccctctgtaaatgtccatgactattgcccagagaaggcttacccctctctagggttgcagttgctttctttgtaataagtattttgccacacctgtaaaaaaaaaaacctcacttttaactctctgccttgtttgggtaaaggcagtaactaagtttatgtttcagaactgcaaaacaaacaggatagttaccaatatggcccatgtatcagattgatttttgtagcctctcactgaatccaacatatccacaagcaagttatctgtctttctacctgataatctaaattatcaggatatttgttttctgcctaaatgtttatactaagccgaggggagagaggtacctagaccatgtcatctacaagcttcagtaactaaagaaaaaggaacttccctgagtggcttgaatgtgtttgcccacagtctatatctatgtatatagaatgtctgtatgtattttacttatttaatatacattgaatggtaccttgctacagtatttctgacatttagagtagtgttgaaatactcggctagcatcagcaccactatagcactgtccgtgtcatatgagtcactaatattaactccagggacttctggataggctaatagatcattggatacgaagggctcttttgaagcttcagtataccatgtttgcatagtttatctttaaaaacaactttaaaggttcttttgtgagccaggatctcagactgccgtagcatgatgctgtccatctttagcgcatgggctgagaacacctcttccctgaggcttctgaaggttgctgtctgtcatgagtgcatgaaggaggccaagagtttatgctatgggaggaaacagtcactgatttgcctagattctgagagtctggcccatagccaaccacattttcctttgggataatttatttcctgtggcatctagccagaagaaattgaggatgtttcctttcacagctgctccaagcctgttgcccaattcacggtacaagggagcaccccttccctttcctctgaaggtacgccacccacctccgtcgcccacctcagcgcccaggagccttgggacttccttccatatgataaatcattcttcttcacgtcaatacacttcatattaatttctagtacagaaaatcttgacagctatcagaatgccttggtcatagtgttgttgcaaaattgaccatacaggtggcccatgtataaaatctgaattttaggggtttgtccccacctcgcatgctggcttttacagggaggtgtctgggattcctcattagcaatcaaaacttaattactgggatgcagagtccttactttatcgccagcccgtaggcatttctgaagtgcacttttttgaaacatcattttgctaactctcagcagtgtctaattaaactgagcaatacttttgtgaattttaattaatctcagcaaaaccatgatgggagagagtcctctgatggaaatgtagtccctggattatgtgtaacctttttattcctcttagatgcagaggatagaaagcattttttggtgcagtggtcttgtggcaaacacaagaccctctatgcgtctccaactgttatcctaatctagaaaatgaggactggcccctgggcaaaagtgacatgaggaatttactctggaagaggaaaatctgggtggctttccaaggctaagataggtttgtatttcaccctgtggccaagctacagaacttctgagattgtggaagaatttttgcaaccagcagggaaagaggcctcttactgcctaaacacaaagttacactgagcttttctactgtcctttgcctattgctccctctatcatgtaaagatctgggaaggatgagaggcagggcctgcttgtcatgagctgcactcttttctttttaactaatcattgacaattggaagaaaattgacgttaaagaagtttctccattgtcttactaacaaaaccttttgggtttcattaattgtccttgaaattgagttcctttggcatttttccttgcagtcatcagttaagcatgttgcatcctgaattcacagaagtttagctttgcaggtttgaatctctgtaatttaactcccgtggacttggtcgagttttcagcaggttgggagccacctctcttcatttcagcagtgagtcatcccttgacttttcaaatgacagaattttttccaattgtaaaattagcactgtaaaacaaagaaccaaagtggcatcctaagagttgttaaacctgaagtctagtttatgaggaattgtccaagttggagtttaaatagtatctgcttttgtctcaaagcatctaagttattctgacagaaaatggtaagtcagctttgcaggcagatgcgcctctgggcctcctaccttgctccacagctttctggccatcttgtctcccaggccatgccactgctctgccacatgtcagcaaatttctttccaccagtcttatagcatcttacatgatcaaatcatcacagaataaccccgtgatagattattgatagcaatagagaggggctttgtcactgatttttctctcagattccttttccatctctcatccataaaggaaggactgaaatccaaaggcattctccttttgtacctacagtatccagaacccacgtgggcagccttctgcttatgacaataattggcccattgcatgcagagagaatgtcttcatagagagaatgtcattaaatacttgaatctgcatgacagtttgacttgaatgcaacagcaggaaaattttgcaagttacataattgtatatacagtaggttttcttaagtctcttcggttcatcctttgtaatttgtgtgtgtatctgtagtattgcaggcttttggagactattcttacaggcagtatgtcagtcatcaaagaaaatgctgtcacctgccattgttgtatttgtgggtatttatagttgtatgtatgtaaatgcatcagtgtgtagattgcatatcagtgtatggtacatgtacatcaaaattatttttgtccttaatcagtgtgatatgaaaagcaagtacaacctcataggactgattatataatgaagttgttgagagtatatatagtggtattgttttattaaacttaaactcaaataatattttgattaaaatttttaataagactttatgctagaaaattctttgagctttgaatcaccagggcaaaaatgactttcaactaaccttgtgaatcttttgcagtgtactgtgtgcaataccaagggcatagctccctgtaatttgggaaatacagaaagaaaagaaaaaaaaaaaaaaaggcagcctgtgcagtcttagtaactttagtattaagagcacttaaagtcaaactgacaattttgggcttattacaaaatgtgatgctttaaagcacacgttctttattgttgttgtaattagtccataaaaaatatagctttcggaagaattaagtacccaccatatcatttatgtatttgtgtatgttttacgggagatcaaaccactctcgtggtgccgcatccgtactcgcttgacttggaagaaatatcacaagcactaaagtatatcagggcatcccaggattgggtactgtatcctaggtttgcagttgcagaaattagcatctagtgtcacaggtaaaagaatttcaggaccaggtttaaactttattttaaatatttttatacttaggtctctttttcctgcctctccccaaagaagagccactggccttagttgtttgagcttactgcttatattatagagtgtaaataggtaactagagactaaaattttattaaccagcatgtttggtatatttaaagcagtgactgagtgtgtttgagtgagtggctgagtgcagtgtcttttgtttaaacacactgcctcgtgtctttgtagctgattcagagagtttgaattgtggggtgggagactaacttcagctccaggctgcagtaatgtgttggtagttacacttgaggcatttttttgttgttgttaattaactctatagtctcaaactatttttgcaaatatatcatttttcctaattggttcttgacgtgcagtggactggctctgtgaatgattggcagggtcttagttttgcgagagtatttccttctaagaattattgtgatctgcagaaacagccatttgattcaaaaatcatgtagaaaaggagtaggagaagcaaaacgtttcatttttgggccttaaccatttgaaatgtttggactttaaacataaagccatggagtttataaagccaagtaaccatttgatatggataataatatctactctagagagagtatatatatgcacattgatttttaatgctgttaagatacttttgtaaaactgtaggaacaagagtaattagaccaaattgaagcttaggggacagtaaagtggttgctttccatttagggtaaccatgcatgtggttagtcctctcctcctgagattcagaaccagttgactgtccccttaggtgtataaggagaaaagttgacatgtctgggacctctgacatgtgtacacatgcttgcacacatgcacacacagtgaatgttttaagttatacaaacataagaccttaagatgcaaagagccagaatattctaaagaggtgatgaacagagggggtggaaactgcatcacagatgttttccaagggccagggtggaatctgagctctagtgtctgactttgagatgcattatatttttaacacataaatgaggggatccatatcacattctttcttgtggaccaccaaattgaaggctttcttgtaattcacaagcagcagctctccagcatctctccgtagcctgggtgaagtcccagaagctggtgtgcatcattttccaaggtggcagagctgcttgctctgcagatcattcctttgagagaggagtacaagtgaagaaacaaggaggcacttcctgtaggagcactgatgtgccttgtccacactcccctctgagctttactggtaagagagctccgactgaacatgctgagcagttgagcacttttccatcagcaacaacagcgaggatggaaatggaaaggaaccgaactaaaatgcatttccctttgcagggcagagagctaagctcttaggaatagtgttatagaaataagcaccctaacttcaattcctgaaaatgttggttaatggagagaattttggagtttcacttaatattttcccatcggtcgccataaataagtcttcaggcgctcctagaagagtcccagcccaaggctcgattaaggaccacactgcaggtctgaggctcactgctctgagtcctgaacaccagagccctgcagagagtggtgataacacatcatctctgcaaagaggaacctctcccccggccgccacttcactcaggcttctactgagcagcaaggacagcctgggtttcaaatgccacttcccctgctttagggatccaggtgtcctgatagcgtgaccctgctgaggcaaggtatcaactccgagagtgactgagtcactgagcgtggcacatgaacaaacgtcatgacaaagattctctgagtgaagttaacaccacgtattttacctttgcaaaaaacaaactggcaccctgagttctaactacggacggacgatatctttgcctccacacccagattcctggaaatggctaacgtttcctttctaggggaagggtcgaggaatactcaagtgctagcttagcagctttgttcagtccagatcagagctgttaggtaaaggcctaaccacctccctgcagtctcttatatctcaagctttaggaacccatttctaaatgtacactagcggagaatttatattgtcagccttgattaccataggacaggcagaaaggcgataatttgtatcttttaatataaaagaagcttttaacttttccagcctattataataactgagttatattcactgtggctcaaactaattggcattgtggaacatttctttaccttcaaagttttctccaccaatcatttcagttctattgcagtcctggtgccatatgtcccctgcaaattgtgaaagtaattagtgacaaaatagcagcctgctccttttcaatggcgaaactgtcggcattagcagttttgggtaagctggcggtactataacacgtactggaaacctgttcctcatcaccacctaccagattctggaaatgccgtcttctagaaaacgatggcgtttgtggtggtcttcttttgaaaggaacagtaatttgtgtggatattgttaaagtgtttaaagaatattttgacaattaagtttacattttacaattgctttattttttattaaaatagttgtatataaatattaccctatttcactgttgttcaagtaaatctaaaccttgtagacaagtgagtcatctgatatgtatagaagctgtgatatatagagtacatttattgtgtaaatgtttatgaatataattgttcctgtgtttttataagttggggatattttgttgttttacggcaacaaaatttattgcatttaaatggtttttatgtaatagaaatcacgcaaaatagtgaaggatttaaaatatgtatatgatacatgtaaatgtacaaactttagaaagaaataaatccaacaaatttcaatca

SEQ ID NO: 166465 - DNA, 447 bp, Homo sapiens
  Payload ID: 12780
  Gene Symbol: PSD3
  Gene Name: pleckstrin and Sec7 domain containing 3
  ENST ID: ENST00000521027
  CDS Start-End: 1-358
gctagaagctcattctgaaatggggagcactgaaattttggaaaaggagaccccagaaaatctcagtaatggtaccagcagcaatgtggaagcagccaaaaggttggccaaacgcctttatcagctggacagattcaaaagatcagatgttgcaaaacaccttggcaagaacaacgaatttagcaaactagttgcagaagaatatctgaagttttttgattttacaggaatgacgctggatcagtcactcagagtctcgctctgtcacccaggctggagtgcagtagcaccatcttggctcactgcaacctccacctcccaggttcaagcagttctcctgaatcagcctcccgaataactgggactacaggaaaatgaatctacattgtcaagtgagggtcatctggattcatctcaaataaacagtgctcttagtgactccgagta

SEQ ID NO: 166466 - DNA, 627 bp, Homo sapiens
  Payload ID: 12780
  Gene Symbol: PSD3
  Gene Name: pleckstrin and Sec7 domain containing 3
  ENST ID: ENST00000521475
  CDS Start-End: 202-627
cctgagacggaggaatcagctgctttcacttgctctgctccaaaggaaaagaaggaagggaggaaaaaatcccaggatccggacgtaagcaggggtggtgattgcagatccccacatcacaggcattgccaggcccctgcctccaagacactgggctggctacagcccctggcatggaggcttcctagcccagctcccatcatgagtgatgaaagcagcagtccctccatgggctggaagcactggccagtcacttctgccacccaggatctgtggggcatggacccccgatgcagggatgccttgggatgctcccctccaagggctgtcctggtccacgctgcagatggagcggaaaggactgtgctgaggagaggcgccgagacctgccaaatactccccaggagctgtaaggaggccacaggtaccacagcgcaggcgacaagggcatggctctacaggtactgtccagctgtgcacaccagcaagggctgcccagccccgcctgccactctgcctctcaaggcagagacatttgtttgggtgaacaatgcatctgcacattcccagagtgttgccaaggccaaatatgaatttttatttggcagatctgaagggaaagctcca

SEQ ID NO: 166467 - DNA, 1806 bp, Homo sapiens
  Payload ID: 12780
  Gene Symbol: PSD3
  Gene Name: pleckstrin and Sec7 domain containing 3
  ENST ID: ENST00000518315
  CDS Start-End: 47-550
gggcttcggagaggaaggatggtccaggcgcaccccaggggttgcgatgggctcttcttggtgtctgtatggttgctgcaatgctggggtgaaaacaacacggctagaagctcattctgaaatggggagcactgaaattttggaaaaggagaccccagaaaatctcagtaatggtaccagcagcaatgtggaagcagccaaaaggttggccaaacgcctttatcagctggacagattcaaaagatcagatgttgcaaaacaccttggcaagaacaacgaatttagcaaactagttgcagaagaatatctgaagttttttgattttacaggaatgacgctggatcagtcactcaggtatttctttaaagcattctctcttgtgggagaaactcaagaacgagagagagttttaatacacttctccaatagatatttttattgtaacccagataccattgcttcacaagatggagtccattgccttacctgtgcaataatgcttcttaataccgatctacatggccaccggtggtggcttttgcagccgtagccaagattaaggctcaggatctttgaggcaagaaggaagaggagctgctaagacagctggacaacctgaaggtagacctgtcccagataatattggaaagaagatgacctgtcaggagttcattgcaaatctgcaaggggtaaatgagggtgttgatttctccaaggatctgctgaaagctctgtacaactcaatcaagaatgagaagcttgaatgggcagtagatgatgaagagaaaaaaaagtctccctcagaaagtactgaggagaaagctaacggaacacatccaaagaccatcagtcgtattggaagtactactaacccatttttggacattcctcatgatccaaatgctgctgtgtacaaaagtggattcttggctcggaaaattcatgcagatatggatggaaagaagactccaagaggaaaacgaggatggaaaaccttttatgctgtactgaagggaacagttctttacttgcaaaaggatgaatacaagccagaaaaggccttgtctgaagaggacttgaaaaacgctgtgagtgtgcaccacgcattggcatccaaggccacggactatgagaagaaaccaaacgtgtttaaacttaaaactgccgactggagggtcttgctttttcaaactcagagcccagaggaaatgcaagggtggataaacaaaatcaattgtgtggcagctgtattttctgcaccaccatttccagcagcaatcggctctcagaagaagtttagccgcccacttctgcctgccactacaacaaaactgtctcaggaggagcaactgaagtcacatgaaagtaagctgaagcagatcaccaccgagctggccgagcaccgctcatatccccccgacaagaaggtcaaagccaaggacgtcgatgagtacaaactgaaagaccactatctggagtttgagaaaacccgctatgaaatgtatgtcagcattctcaaggaaggaggcaaagagctactgagtaacgatgaaagcgaggctgcaggactgaagaagtcgcactcgagtccttcgctgaacccggatacttctccaatcactgccaaagtcaagcgtaacgtgtcagagaggaaggatcaccgacctgaaacaccaagcattaagcaaaaagttacttagagtccatctgcggccaggaagtgctggtcatggagcaaaatagggtttttcaagatctttctggtaatccgtgaatatatttaaaaaaaaaaagtctgtgacaaaa

SEQ ID NO: 166468 - DNA, 815 bp, Homo sapiens
  Payload ID: 12780
  Gene Symbol: PSD3
  Gene Name: pleckstrin and Sec7 domain containing 3
  ENST ID: ENST00000519851
  CDS Start-End: 321-815
ggagggaagctgtgttgagagaggaggctgggaagagggggacgtcctccttcaacttctttcaagttcgtatccctgagcccctgagggatccagtggcattctgggagaatgtcactgcggagtcagtgtgtagcagtttgtacttgcaacagaagcagctttagaagtacattaaaagagcccttgcggaagatgaaagtttgctgagcagatggaatgggagaatgctcttcaattcctgacaaaattatgggcagactgtttgctgacgaagcaatgctggggtgaaaacaacacggctagaagctcattctgaaatggggagcactgaaattttggaaaaggagaccccagaaaatctcagtaatggtaccagcagcaatgtggaagcagccaaaaggttggccaaacgcctttatcagctggacagattcaaaagatcagatgttgcaaaacaccttggcaagaacaacgaatttagcaaactagttgcagaagaatatctgaagttttttgattttacaggaatgacgctggatcagtcactcaggtatttctttaaagcattctctcttgtgggagaaactcaagaacgagagagagttttaatacacttctccaatagatatttttattgtaacccagataccattgcttcacaagatggagtccattgccttacctgtgcaataatgcttcttaataccgatctacatggccacaatattggaaagaagatgacctgtcaggagttcattgcaaatctgcaaggggtaaatgagggtgttgatttctccaaggatctgctgaaa

SEQ ID NO: 166469 - DNA, 580 bp, Homo sapiens
  Payload ID: 12780
  Gene Symbol: PSD3
  Gene Name: pleckstrin and Sec7 domain containing 3
  ENST ID: ENST00000517971
  CDS Start-End: 82-423
agtcactgaacttgggagctgaagaatactggacggggcttcggagaggaaggatggtccaggcgcaccccaggggttgcgatgggctcttcttggtgtctgtatggttgctgcaatgctggggtgaaaacaacacggctagaagctcattctgaaatggggagcactgaaattttggaaaaggagaccccagaaaatctcagtaatggtaccagcagcaatgtggaagcagccaaaaggttggccaaacgcctttatcagctggacagattcaaaagatcagatgttgcaaaacaccttggcaagaacaacgaatttagcaaactagttgcagaagaatatctgaagttttttgattttacaggaatgacgctggatcagtcactcaggaaaatgaatctacattgtcaagtatttctttaaagcattctctcttgtgggagaaactcaagaacgagagagagttttaatacacttctccaatagatatttttattgtaacccagataccattgcttcacaagatggagtccattgccttacctgtgcaataatgcttcttaataccgatctacatggc

SEQ ID NO: 166470 - DNA, 8145 bp, Homo sapiens
  Payload ID: 12780
  Gene Symbol: PSD3
  Gene Name: pleckstrin and Sec7 domain containing 3
  ENST ID: ENST00000523619
  CDS Start-End: 165-3113
gggggacatggttacattaaagctaactcccgtcatctcaattatctccttggaagtagttttcacaaatataaaaacgccctacggtggctgttttcggtgatcatggaggaagcactttactcccaccaaatgtcacaaatgaatttccagaatatgggaccatggaggaaggtggagaaggcctaagggcttctctggaatttgatggtgaggctctgccatgccacccacaagagcagcagggtgtccagcctcttactggctgccactctgggctcgacagtgttacagaaggaccaaaagatgtcagagaggccccctctcaaagtcatctcaaggaacaaagtttacagcccattgactctttgatttcagctctgaaagccacagaagccagaatcatttccggaacattacaggctacaaaggtactggaccaagatgctgtttctagtttttcagttcagcaggtggaaaaagagctggacactgccagtcgtaaaacacagagagtcaacaaaacgctccctgctggccaaaaaaatttaccagaaatacctctttcagctgaagtaacaacggaggaaagtttttatttgagcatccagaaagatctcaccgcgctgttaactggagacactcaggcagagatttcccagataatgaataatgggaggaaaggggctgtctgtgtgcaggagccatcttgtcctttggcctccctcgggagctcagcagtgacctgccactctgcaggcagtgttggtttcttgaaagagcagaggtctgctcttgggagagagcacccagggggatgtgatcgaagcagctccatgggacgcccaggccgggtcaaacatgtggaatttcaaggagtggaaatactgtggacaggaggagacaagagagagacccagcatcctatagattttgagacatcactgcaaagaacagcctctcctgacagcaaagagtcttccaaagtgccacgccatctcatctcatcagctggtttgtgtaattcaagtagtttaactgagaatgtttgggatgaatcctggaaagctccttcagagaggcctggcactagctcggggacattttcccctgtgcgtcttgatgagagtggagaggatgaagtcttcctacaggaaaacaaacagcatcttgagaagacacctaaaccagagagagacagggaaaggatcagcgaacaagaggagcacgttaagggggaagatgaagacatccttgggcctggatatacggaggactccaccgacgtgtacagctcccagtttgaaaccattttggacaacacttctttatactacagtgcagagtccctggagacattatactcagagcctgatagctattttagctttgaaatgcccctcactccaatgatacaacagcgcattaaagaaggtggtcagttcttggagaggacatcagggggaggacatcaggatatcctgagtgtgtctgcagatggtggcatcgtgatgggctattctagtggcgtcaccaatgggctgaatgatgccagcgactccatctacacgaaaggcaccccggagattgctttctggggaagcaatgctggggtgaaaacaacacggctagaagctcattctgaaatggggagcactgaaattttggaaaaggagaccccagaaaatctcagtaatggtaccagcagcaatgtggaagcagccaaaaggttggccaaacgcctttatcagctggacagattcaaaagatcagatgttgcaaaacaccttggcaagaacaacgaatttagcaaactagttgcagaagaatatctgaagttttttgattttacaggaatgacgctggatcagtcactcaggtatttctttaaagcattctctcttgtgggagaaactcaagaacgagagagagttttaatacacttctccaatagatatttttattgtaacccagataccattgcttcacaagatggagtccattgccttacctgtgcaataatgcttcttaataccgatctacatggccacaatattggaaagaagatgacctgtcaggagttcattgcaaatctgcaaggggtaaatgagggtgttgatttctccaaggatctgctgaaagctctgtacaactcaatcaagaatgagaagcttgaatgggcagtagatgatgaagagaaaaaaaagtctccctcagaaagtactgaggagaaagctaacggaacacatccaaagaccatcagtcgtattggaagtactactaacccatttttggacattcctcatgatccaaatgctgctgtgtacaaaagtggattcttggctcggaaaattcatgcagatatggatggaaagaagactccaagaggaaaacgaggatggaaaaccttttatgctgtactgaagggaacagttctttacttgcaaaaggatgaatacaagccagaaaaggccttgtctgaagaggacttgaaaaacgctgtgagtgtgcaccacgcattggcatccaaggccacggactatgagaagaaaccaaacgtgtttaaacttaaaactgccgactggagggtcttgctttttcaaactcagagcccagaggaaatgcaagggtggataaacaaaatcaattgtgtggcagctgtattttctgcaccaccatttccagcagcaatcggctctcagaagaagtttagccgcccacttctgcctgccactacaacaaaactgtctcaggaggagcaactgaagtcacatgaaagtaagctgaagcagatcaccaccgagctggccgagcaccgctcatatccccccgacaagaaggtcaaagccaaggacgtcgatgagtacaaactgaaagaccactatctggagtttgagaaaacccgctatgaaatgtatgtcagcattctcaaggaaggaggcaaagagctactgagtaacgatgaaagcgaggctgcaggactgaagaagtcgcactcgagtccttcgctgaacccggatacttctccaatcactgccaaagtcaagcgtaacgtgtcagagaggaaggatcaccgacctgaaacaccaagcattaagcaaaaagttacttagagtccatctgcggccaggaagtgctggtcatggagcaaaatagggtttttcaagatctttctggtaatccgtgaatatatttaaaaaaaaaaagtctgtgacaaaacggtgcattagtaattttttctattgtatatttttgttagtttctgtacagattgtctttgctcttgatttcttttgctttgatgatttttgcaacttgatagctaatgcaccttttctgtgaggaggaggggatcgtgatttcagaatgaattatgtatcccttctcttttggttttctcttgtttgcagtctgctcagttgttttatgtattctcatatcaactgttaaacttttttttaaggttaaagaatttaatccattgtgaaacacttaactggacaaactgtagttttagtaaattctagctggagttaatatacgcctttatatgtgaaatcttgcccagtcacagaggtagaattgagcactcacagatgctccagtaagaatcacagtgctgggaatctagttgctccaatatgaggcagcttcatgtgcagcttagcacttgttgttgagatcggaccctgctggaagcagggaaaagaagcgtgaagatcgtaggattgagaacttagggaagcacattagcttgcttgaagtgctgattccatttcagccaagcaagggaaagaggaagtggagtcattttgcctttgaaggctgaggaaagattgatacccagttaattttgtttgctaaaggatgggggcaataatcggcccttgaggagctgcagcagtaggcatgtgctcagtctgcaggaattgttacctcactcccacagggtctagactagaaatccatcatctctatcgttgatatccttccatccaggaatagatttttcttactctacatatgtgtgtgtgcgtgcgtgtgtgtgcgtgtgtgggcatggggttgtgtcctggttgtgatattgaggtcttccttcctaacaaattaatactaaaatgaaacagcttttcttgtgtccttaagacaaaataaggaaggaaaacgtagctgcagttgtccacgatggatattggttctttaaaatatatctgaaagtagtagtcagaatgaattatggttggaaaactgaggaatcttctggttgcaggtgcaaagtgactttgtttattcttgtctcagtctccttgatagccacttcactctgctactactcaactttctcctaaaaatacttcatctattttcagtcctttctttctgtctactcaaaatggttctattaactttgcagtcatgagcttgttccagttacagtccctttgaagttcagggtgataaacagaatattcttctgtagaggaagagaaaggagtgaaagtttagcccactgagacctagagctttgtgatttcctaaccttgaaactctgtaatccctaaagttaaaatctccgcaagtggcacaacttcagaactaatagtatcactttgatttttctttttcctcccttagaaagtttctctagttctatagtttatttgttgaaggtactatgaccaaagaatcagctgctctacaggaatagcatggttccagtgaattagagaaaacctgctgtaaagccatggtagtgtctaagtggtatgttattatgatgtactagcatttatttacagaattatttattaacgtttacttccttcccctctgtaaatgtccatgactattgcccagagaaggcttacccctctctagggttgcagttgctttctttgtaataagtattttgccacacctgtaaaaaaaaaaacctcacttttaactctctgccttgtttgggtaaaggcagtaactaagtttatgtttcagaactgcaaaacaaacaggatagttaccaatatggcccatgtatcagattgatttttgtagcctctcactgaatccaacatatccacaagcaagttatctgtctttctacctgataatctaaattatcaggatatttgttttctgcctaaatgtttatactaagccgaggggagagaggtacctagaccatgtcatctacaagcttcagtaactaaagaaaaaggaacttccctgagtggcttgaatgtgtttgcccacagtctatatctatgtatatagaatgtctgtatgtattttacttatttaatatacattgaatggtaccttgctacagtatttctgacatttagagtagtgttgaaatactcggctagcatcagcaccactatagcactgtccgtgtcatatgagtcactaatattaactccagggacttctggataggctaatagatcattggatacgaagggctcttttgaagcttcagtataccatgtttgcatagtttatctttaaaaacaactttaaaggttcttttgtgagccaggatctcagactgccgtagcatgatgctgtccatctttagcgcatgggctgagaacacctcttccctgaggcttctgaaggttgctgtctgtcatgagtgcatgaaggaggccaagagtttatgctatgggaggaaacagtcactgatttgcctagattctgagagtctggcccatagccaaccacattttcctttgggataatttatttcctgtggcatctagccagaagaaattgaggatgtttcctttcacagctgctccaagcctgttgcccaattcacggtacaagggagcaccccttccctttcctctgaaggtacgccacccacctccgtcgcccacctcagcgcccaggagccttgggacttccttccatatgataaatcattcttcttcacgtcaatacacttcatattaatttctagtacagaaaatcttgacagctatcagaatgccttggtcatagtgttgttgcaaaattgaccatacaggtggcccatgtataaaatctgaattttaggggtttgtccccacctcgcatgctggcttttacagggaggtgtctgggattcctcattagcaatcaaaacttaattactgggatgcagagtccttactttatcgccagcccgtaggcatttctgaagtgcacttttttgaaacatcattttgctaactctcagcagtgtctaattaaactgagcaatacttttgtgaattttaattaatctcagcaaaaccatgatgggagagagtcctctgatggaaatgtagtccctggattatgtgtaacctttttattcctcttagatgcagaggatagaaagcattttttggtgcagtggtcttgtggcaaacacaagaccctctatgcgtctccaactgttatcctaatctagaaaatgaggactggcccctgggcaaaagtgacatgaggaatttactctggaagaggaaaatctgggtggctttccaaggctaagataggtttgtatttcaccctgtggccaagctacagaacttctgagattgtggaagaatttttgcaaccagcagggaaagaggcctcttactgcctaaacacaaagttacactgagcttttctactgtcctttgcctattgctccctctatcatgtaaagatctgggaaggatgagaggcagggcctgcttgtcatgagctgcactcttttctttttaactaatcattgacaattggaagaaaattgacgttaaagaagtttctccattgtcttactaacaaaaccttttgggtttcattaattgtccttgaaattgagttcctttggcatttttccttgcagtcatcagttaagcatgttgcatcctgaattcacagaagtttagctttgcaggtttgaatctctgtaatttaactcccgtggacttggtcgagttttcagcaggttgggagccacctctcttcatttcagcagtgagtcatcccttgacttttcaaatgacagaattttttccaattgtaaaattagcactgtaaaacaaagaaccaaagtggcatcctaagagttgttaaacctgaagtctagtttatgaggaattgtccaagttggagtttaaatagtatctgcttttgtctcaaagcatctaagttattctgacagaaaatggtaagtcagctttgcaggcagatgcgcctctgggcctcctaccttgctccacagctttctggccatcttgtctcccaggccatgccactgctctgccacatgtcagcaaatttctttccaccagtcttatagcatcttacatgatcaaatcatcacagaataaccccgtgatagattattgatagcaatagagaggggctttgtcactgatttttctctcagattccttttccatctctcatccataaaggaaggactgaaatccaaaggcattctccttttgtacctacagtatccagaacccacgtgggcagccttctgcttatgacaataattggcccattgcatgcagagagaatgtcttcatagagagaatgtcattaaatacttgaatctgcatgacagtttgacttgaatgcaacagcaggaaaattttgcaagttacataattgtatatacagtaggttttcttaagtctcttcggttcatcctttgtaatttgtgtgtgtatctgtagtattgcaggcttttggagactattcttacaggcagtatgtcagtcatcaaagaaaatgctgtcacctgccattgttgtatttgtgggtatttatagttgtatgtatgtaaatgcatcagtgtgtagattgcatatcagtgtatggtacatgtacatcaaaattatttttgtccttaatcagtgtgatatgaaaagcaagtacaacctcataggactgattatataatgaagttgttgagagtatatatagtggtattgttttattaaacttaaactcaaataatattttgattaaaatttttaataagactttatgctagaaaattctttgagctttgaatcaccagggcaaaaatgactttcaactaaccttgtgaatcttttgcagtgtactgtgtgcaataccaagggcatagctccctgtaatttgggaaataca

SEQ ID NO: 166471 - DNA, 610 bp, Homo sapiens
  Payload ID: 12780
  Gene Symbol: PSD3
  Gene Name: pleckstrin and Sec7 domain containing 3
  ENST ID: ENST00000520858
  CDS Start-End: 1-496
ggagaccccagaaaatctcagtaatggtaccagcagcaatgtggaagcagccaaaaggttggccaaacgcctttatcagctggacagattcaaaagatcagatgttgcaaaacaccttggcaagaacaacgaatttagcaaactagttgcagaagaatatctgaagttttttgattttacaggaatgacgctggatcagtcactcaggtatttctttaaagcattctctcttgtgggagaaactcaagaacgagagagagttttaatacacttctccaatagatatttttattgtaacccagataccattgcttcacaagatggagtccattgccttacctgtgcaataatgcttcttaataccgatctacatggccacaatattggaaagaagatgacctgtcaggagttcattgcaaatctgcaaggggtaaatgagggtgttgatttctccaaggatctgctgaaagtgttgtgggattggagaagatgctgaaaccaaatgggcacctgtcctcagagatcacagactactgagaaatattggaggtgtctttctccataaaataaacagttattccatgttgaaataaaagtataagccaaattc

SEQ ID NO: 166472 - DNA, 6136 bp, Homo sapiens
  Payload ID: 12780
  Gene Symbol: PSD3
  Gene Name: pleckstrin and Sec7 domain containing 3
  ENST ID: ENST00000614430
  CDS Start-End: 145-954
ggtgcttcttaagctaacgcggatcacggcgctcaggagctgctcaggcacaaccccgcagagttcctccagcgtgagagccttggaacggttggaaagtgcctttttatttctctaaaccccttccttagttgaccttcgaaaatgattggcgtgaatagtgtccagagtgccagcaaggtacgggtgaggacctcaggttccgtgaaatactcccgggaggattctatccggcggcagtctcacaggtcaaagtccatgaaaatttccaactcctcagagttttctgctaaggagaacaaggctctgtacaactcaatcaagaatgagaagcttgaatgggcagtagatgatgaagagaaaaaaaagtctccctcagaaagtactgaggagaaagctaacggaacacatccaaagaccatcagtcgtattggaagtactactaacccatttttggacattcctcatgatccaaatgctgctgtgtacaaaagtggattcttggctcggaaaattcatgcagatatggatggaaagaagactccaagaggaaaacgaggatggaaaaccttttatgctgtactgaagggaacagttctttacttgcaaaagcatgaaagtaagctgaagcagatcaccaccgagctggccgagcaccgctcatatccccccgacaagaaggtcaaagccaaggacgtcgatgagtacaaactgaaagaccactatctggagtttgagaaaacccgctatgaaatgtatgtcagcattctcaaggaaggaggcaaagagctactgagtaacgatgaaagcgaggctgcaggactgaagaagtcgcactcgagtccttcgctgaacccggatacttctccaatcactgccaaagtcaagcgtaacgtgtcagagaggaaggatcaccgacctgaaacaccaagcattaagcaaaaagttacttagagtccatctgcggccaggaagtgctggtcatggagcaaaatagggtttttcaagatctttctggtaatccgtgaatatatttaaaaaaaaaaagtctgtgacaaaacggtgcattagtaattttttctattgtatatttttgttagtttctgtacagattgtctttgctcttgatttcttttgctttgatgatttttgcaacttgatagctaatgcaccttttctgtgaggaggaggggatcgtgatttcagaatgaattatgtatcccttctcttttggttttctcttgtttgcagtctgctcagttgttttatgtattctcatatcaactgttaaacttttttttaaggttaaagaatttaatccattgtgaaacacttaactggacaaactgtagttttagtaaattctagctggagttaatatacgcctttatatgtgaaatcttgcccagtcacagaggtagaattgagcactcacagatgctccagtaagaatcacagtgctgggaatctagttgctccaatatgaggcagcttcatgtgcagcttagcacttgttgttgagatcggaccctgctggaagcagggaaaagaagcgtgaagatcgtaggattgagaacttagggaagcacattagcttgcttgaagtgctgattccatttcagccaagcaagggaaagaggaagtggagtcattttgcctttgaaggctgaggaaagattgatacccagttaattttgtttgctaaaggatgggggcaataatcggcccttgaggagctgcagcagtaggcatgtgctcagtctgcaggaattgttacctcactcccacagggtctagactagaaatccatcatctctatcgttgatatccttccatccaggaatagatttttcttactctacatatgtgtgtgtgcgtgcgtgtgtgtgcgtgtgtgggcatggggttgtgtcctggttgtgatattgaggtcttccttcctaacaaattaatactaaaatgaaacagcttttcttgtgtccttaagacaaaataaggaaggaaaacgtagctgcagttgtccacgatggatattggttctttaaaatatatctgaaagtagtagtcagaatgaattatggttggaaaactgaggaatcttctggttgcaggtgcaaagtgactttgtttattcttgtctcagtctccttgatagccacttcactctgctactactcaactttctcctaaaaatacttcatctattttcagtcctttctttctgtctactcaaaatggttctattaactttgcagtcatgagcttgttccagttacagtccctttgaagttcagggtgataaacagaatattcttctgtagaggaagagaaaggagtgaaagtttagcccactgagacctagagctttgtgatttcctaaccttgaaactctgtaatccctaaagttaaaatctccgcaagtggcacaacttcagaactaatagtatcactttgatttttctttttcctcccttagaaagtttctctagttctatagtttatttgttgaaggtactatgaccaaagaatcagctgctctacaggaatagcatggttccagtgaattagagaaaacctgctgtaaagccatggtagtgtctaagtggtatgttattatgatgtactagcatttatttacagaattatttattaacgtttacttccttcccctctgtaaatgtccatgactattgcccagagaaggcttacccctctctagggttgcagttgctttctttgtaataagtattttgccacacctgtaaaaaaaaaaacctcacttttaactctctgccttgtttgggtaaaggcagtaactaagtttatgtttcagaactgcaaaacaaacaggatagttaccaatatggcccatgtatcagattgatttttgtagcctctcactgaatccaacatatccacaagcaagttatctgtctttctacctgataatctaaattatcaggatatttgttttctgcctaaatgtttatactaagccgaggggagagaggtacctagaccatgtcatctacaagcttcagtaactaaagaaaaaggaacttccctgagtggcttgaatgtgtttgcccacagtctatatctatgtatatagaatgtctgtatgtattttacttatttaatatacattgaatggtaccttgctacagtatttctgacatttagagtagtgttgaaatactcggctagcatcagcaccactatagcactgtccgtgtcatatgagtcactaatattaactccagggacttctggataggctaatagatcattggatacgaagggctcttttgaagcttcagtataccatgtttgcatagtttatctttaaaaacaactttaaaggttcttttgtgagccaggatctcagactgccgtagcatgatgctgtccatctttagcgcatgggctgagaacacctcttccctgaggcttctgaaggttgctgtctgtcatgagtgcatgaaggaggccaagagtttatgctatgggaggaaacagtcactgatttgcctagattctgagagtctggcccatagccaaccacattttcctttgggataatttatttcctgtggcatctagccagaagaaattgaggatgtttcctttcacagctgctccaagcctgttgcccaattcacggtacaagggagcaccccttccctttcctctgaaggtacgccacccacctccgtcgcccacctcagcgcccaggagccttgggacttccttccatatgataaatcattcttcttcacgtcaatacacttcatattaatttctagtacagaaaatcttgacagctatcagaatgccttggtcatagtgttgttgcaaaattgaccatacaggtggcccatgtataaaatctgaattttaggggtttgtccccacctcgcatgctggcttttacagggaggtgtctgggattcctcattagcaatcaaaacttaattactgggatgcagagtccttactttatcgccagcccgtaggcatttctgaagtgcacttttttgaaacatcattttgctaactctcagcagtgtctaattaaactgagcaatacttttgtgaattttaattaatctcagcaaaaccatgatgggagagagtcctctgatggaaatgtagtccctggattatgtgtaacctttttattcctcttagatgcagaggatagaaagcattttttggtgcagtggtcttgtggcaaacacaagaccctctatgcgtctccaactgttatcctaatctagaaaatgaggactggcccctgggcaaaagtgacatgaggaatttactctggaagaggaaaatctgggtggctttccaaggctaagataggtttgtatttcaccctgtggccaagctacagaacttctgagattgtggaagaatttttgcaaccagcagggaaagaggcctcttactgcctaaacacaaagttacactgagcttttctactgtcctttgcctattgctccctctatcatgtaaagatctgggaaggatgagaggcagggcctgcttgtcatgagctgcactcttttctttttaactaatcattgacaattggaagaaaattgacgttaaagaagtttctccattgtcttactaacaaaaccttttgggtttcattaattgtccttgaaattgagttcctttggcatttttccttgcagtcatcagttaagcatgttgcatcctgaattcacagaagtttagctttgcaggtttgaatctctgtaatttaactcccgtggacttggtcgagttttcagcaggttgggagccacctctcttcatttcagcagtgagtcatcccttgacttttcaaatgacagaattttttccaattgtaaaattagcactgtaaaacaaagaaccaaagtggcatcctaagagttgttaaacctgaagtctagtttatgaggaattgtccaagttggagtttaaatagtatctgcttttgtctcaaagcatctaagttattctgacagaaaatggtaagtcagctttgcaggcagatgcgcctctgggcctcctaccttgctccacagctttctggccatcttgtctcccaggccatgccactgctctgccacatgtcagcaaatttctttccaccagtcttatagcatcttacatgatcaaatcatcacagaataaccccgtgatagattattgatagcaatagagaggggctttgtcactgatttttctctcagattccttttccatctctcatccataaaggaaggactgaaatccaaaggcattctccttttgtacctacagtatccagaacccacgtgggcagccttctgcttatgacaataattggcccattgcatgcagagagaatgtcttcatagagagaatgtcattaaatacttgaatctgcatgacagtttgacttgaatgcaacagcaggaaaattttgcaagttacataattgtatatacagtaggttttcttaagtctcttcggttcatcctttgtaatttgtgtgtgtatctgtagtattgcaggcttttggagactattcttacaggcagtatgtcagtcatcaaagaaaatgctgtcacctgccattgttgtatttgtgggtatttatagttgtatgtatgtaaatgcatcagtgtgtagattgcatatcagtgtatggtacatgtacatcaaaattatttttgtccttaatcagtgtgatatgaaaagcaagtacaacctcataggactgattatataatgaagttgttgagagtatatatagtggtattgttttattaaacttaaactcaaataatattttgattaaaatttttaataagactttatgctagaaaattctttgagctttgaatcaccagggcaaaaatgactttcaactaaccttgtgaatcttttgcagtgtactgtgtgcaataccaagggcatagctccctgtaatttgggaaatacagaaagaaaagaaaaaaaaaaaaaaaggcagcctgtgcagtcttagtaactttagtattaagagcacttaaagtcaaactgacaattttgggcttattacaaaatgtgatgctttaaagcacacgttctttattgttgttgtaattagtcc

SEQ ID NO: 166473 - DNA, 5843 bp, Homo sapiens
  Payload ID: 12780
  Gene Symbol: PSD3
  Gene Name: pleckstrin and Sec7 domain containing 3
  ENST ID: ENST00000615573
  CDS Start-End: 1-810
atgattggcgtgaatagtgtccagagtgccagcaaggtacgggtgaggacctcaggttccgtgaaatactcccgggaggattctatccggcggcagtctcacaggtcaaagtccatgaaaatttccaactcctcagagttttctgctaaggagaacaaggctctgtacaactcaatcaagaatgagaagcttgaatgggcagtagatgatgaagagaaaaaaaagtctccctcagaaagtactgaggagaaagctaacggaacacatccaaagaccatcagtcgtattggaagtactactaacccatttttggacattcctcatgatccaaatgctgctgtgtacaaaagtggattcttggctcggaaaattcatgcagatatggatggaaagaagactccaagaggaaaacgaggatggaaaaccttttatgctgtactgaagggaacagttctttacttgcaaaaggatgaaagtaagctgaagcagatcaccaccgagctggccgagcaccgctcatatccccccgacaagaaggtcaaagccaaggacgtcgatgagtacaaactgaaagaccactatctggagtttgagaaaacccgctatgaaatgtatgtcagcattctcaaggaaggaggcaaagagctactgagtaacgatgaaagcgaggctgcaggactgaagaagtcgcactcgagtccttcgctgaacccggatacttctccaatcactgccaaagtcaagcgtaacgtgtcagagaggaaggatcaccgacctgaaacaccaagcattaagcaaaaagttacttagagtccatctgcggccaggaagtgctggtcatggagcaaaatagggtttttcaagatctttctggtaatccgtgaatatatttaaaaaaaaaaagtctgtgacaaaacggtgcattagtaattttttctattgtatatttttgttagtttctgtacagattgtctttgctcttgatttcttttgctttgatgatttttgcaacttgatagctaatgcaccttttctgtgaggaggaggggatcgtgatttcagaatgaattatgtatcccttctcttttggttttctcttgtttgcagtctgctcagttgttttatgtattctcatatcaactgttaaacttttttttaaggttaaagaatttaatccattgtgaaacacttaactggacaaactgtagttttagtaaattctagctggagttaatatacgcctttatatgtgaaatcttgcccagtcacagaggtagaattgagcactcacagatgctccagtaagaatcacagtgctgggaatctagttgctccaatatgaggcagcttcatgtgcagcttagcacttgttgttgagatcggaccctgctggaagcagggaaaagaagcgtgaagatcgtaggattgagaacttagggaagcacattagcttgcttgaagtgctgattccatttcagccaagcaagggaaagaggaagtggagtcattttgcctttgaaggctgaggaaagattgatacccagttaattttgtttgctaaaggatgggggcaataatcggcccttgaggagctgcagcagtaggcatgtgctcagtctgcaggaattgttacctcactcccacagggtctagactagaaatccatcatctctatcgttgatatccttccatccaggaatagatttttcttactctacatatgtgtgtgtgcgtgcgtgtgtgtgcgtgtgtgggcatggggttgtgtcctggttgtgatattgaggtcttccttcctaacaaattaatactaaaatgaaacagcttttcttgtgtccttaagacaaaataaggaaggaaaacgtagctgcagttgtccacgatggatattggttctttaaaatatatctgaaagtagtagtcagaatgaattatggttggaaaactgaggaatcttctggttgcaggtgcaaagtgactttgtttattcttgtctcagtctccttgatagccacttcactctgctactactcaactttctcctaaaaatacttcatctattttcagtcctttctttctgtctactcaaaatggttctattaactttgcagtcatgagcttgttccagttacagtccctttgaagttcagggtgataaacagaatattcttctgtagaggaagagaaaggagtgaaagtttagcccactgagacctagagctttgtgatttcctaaccttgaaactctgtaatccctaaagttaaaatctccgcaagtggcacaacttcagaactaatagtatcactttgatttttctttttcctcccttagaaagtttctctagttctatagtttatttgttgaaggtactatgaccaaagaatcagctgctctacaggaatagcatggttccagtgaattagagaaaacctgctgtaaagccatggtagtgtctaagtggtatgttattatgatgtactagcatttatttacagaattatttattaacgtttacttccttcccctctgtaaatgtccatgactattgcccagagaaggcttacccctctctagggttgcagttgctttctttgtaataagtattttgccacacctgtaaaaaaaaaaacctcacttttaactctctgccttgtttgggtaaaggcagtaactaagtttatgtttcagaactgcaaaacaaacaggatagttaccaatatggcccatgtatcagattgatttttgtagcctctcactgaatccaacatatccacaagcaagttatctgtctttctacctgataatctaaattatcaggatatttgttttctgcctaaatgtttatactaagccgaggggagagaggtacctagaccatgtcatctacaagcttcagtaactaaagaaaaaggaacttccctgagtggcttgaatgtgtttgcccacagtctatatctatgtatatagaatgtctgtatgtattttacttatttaatatacattgaatggtaccttgctacagtatttctgacatttagagtagtgttgaaatactcggctagcatcagcaccactatagcactgtccgtgtcatatgagtcactaatattaactccagggacttctggataggctaatagatcattggatacgaagggctcttttgaagcttcagtataccatgtttgcatagtttatctttaaaaacaactttaaaggttcttttgtgagccaggatctcagactgccgtagcatgatgctgtccatctttagcgcatgggctgagaacacctcttccctgaggcttctgaaggttgctgtctgtcatgagtgcatgaaggaggccaagagtttatgctatgggaggaaacagtcactgatttgcctagattctgagagtctggcccatagccaaccacattttcctttgggataatttatttcctgtggcatctagccagaagaaattgaggatgtttcctttcacagctgctccaagcctgttgcccaattcacggtacaagggagcaccccttccctttcctctgaaggtacgccacccacctccgtcgcccacctcagcgcccaggagccttgggacttccttccatatgataaatcattcttcttcacgtcaatacacttcatattaatttctagtacagaaaatcttgacagctatcagaatgccttggtcatagtgttgttgcaaaattgaccatacaggtggcccatgtataaaatctgaattttaggggtttgtccccacctcgcatgctggcttttacagggaggtgtctgggattcctcattagcaatcaaaacttaattactgggatgcagagtccttactttatcgccagcccgtaggcatttctgaagtgcacttttttgaaacatcattttgctaactctcagcagtgtctaattaaactgagcaatacttttgtgaattttaattaatctcagcaaaaccatgatgggagagagtcctctgatggaaatgtagtccctggattatgtgtaacctttttattcctcttagatgcagaggatagaaagcattttttggtgcagtggtcttgtggcaaacacaagaccctctatgcgtctccaactgttatcctaatctagaaaatgaggactggcccctgggcaaaagtgacatgaggaatttactctggaagaggaaaatctgggtggctttccaaggctaagataggtttgtatttcaccctgtggccaagctacagaacttctgagattgtggaagaatttttgcaaccagcagggaaagaggcctcttactgcctaaacacaaagttacactgagcttttctactgtcctttgcctattgctccctctatcatgtaaagatctgggaaggatgagaggcagggcctgcttgtcatgagctgcactcttttctttttaactaatcattgacaattggaagaaaattgacgttaaagaagtttctccattgtcttactaacaaaaccttttgggtttcattaattgtccttgaaattgagttcctttggcatttttccttgcagtcatcagttaagcatgttgcatcctgaattcacagaagtttagctttgcaggtttgaatctctgtaatttaactcccgtggacttggtcgagttttcagcaggttgggagccacctctcttcatttcagcagtgagtcatcccttgacttttcaaatgacagaattttttccaattgtaaaattagcactgtaaaacaaagaaccaaagtggcatcctaagagttgttaaacctgaagtctagtttatgaggaattgtccaagttggagtttaaatagtatctgcttttgtctcaaagcatctaagttattctgacagaaaatggtaagtcagctttgcaggcagatgcgcctctgggcctcctaccttgctccacagctttctggccatcttgtctcccaggccatgccactgctctgccacatgtcagcaaatttctttccaccagtcttatagcatcttacatgatcaaatcatcacagaataaccccgtgatagattattgatagcaatagagaggggctttgtcactgatttttctctcagattccttttccatctctcatccataaaggaaggactgaaatccaaaggcattctccttttgtacctacagtatccagaacccacgtgggcagccttctgcttatgacaataattggcccattgcatgcagagagaatgtcttcatagagagaatgtcattaaatacttgaatctgcatgacagtttgacttgaatgcaacagcaggaaaattttgcaagttacataattgtatatacagtaggttttcttaagtctcttcggttcatcctttgtaatttgtgtgtgtatctgtagtattgcaggcttttggagactattcttacaggcagtatgtcagtcatcaaagaaaatgctgtcacctgccattgttgtatttgtgggtatttatagttgtatgtatgtaaatgcatcagtgtgtagattgcatatcagtgtatggtacatgtacatcaaaattatttttgtccttaatcagtgtgatatgaaaagcaagtacaacctcataggactgattatataatgaagttgttgagagtatatatagtggtattgttttattaaacttaaactcaaataatattttgattaaaatttttaataagactttatgctagaaaattctttgagctttgaatcaccagggcaaaaatgactttcaactaaccttgtgaatcttttgcagtgtactgtgtgcaataccaagggcatagctccctgtaatttgggaaatacag

SEQ ID NO: 166474 - DNA, 5188 bp, Homo sapiens
  Payload ID: 12781
  Gene Symbol: PSD4
  Gene Name: pleckstrin and Sec7 domain containing 4
  Uniprot ID: Q8NDX1
  ENST ID: ENST00000245796
  CDS Start-End: 196-3366
acattcactgggcaagccgactgtgagccaggaagtgctcttggggagcccaggccaagccatccattcttgggtcctttggagggtagatatggattcccagtttctccagcggccagtgctccccctagtccacacagtgagaccgtgaaagcagatgctccggggcactcctgggcagcttttgctcagtggatgatgggtgactacagactccctgaccacccccagcccatggaaattctcaacctgtacttgggagacagcctggagccccacccaggagagtgcccaagggaaacgtgcagccatgaggatccaccggagcctttcgaggagcaaacctgggccactgaccctcctgaacctaccagacaaaatgttcctccctggggctccggtgtggagctcacacacctggggagctgggtccatcaggacgggctggagccttgccaggagcaaacccgggccactgaccctcctgaatctaccagacaagatgctcctccctggggctccggtgtggagctcacacacctggggagcccctctgcccagagggagcacaggcagaacacagcatcaccagggtcaccagtgaacagccatctaccggggagcccaaagcagaaccggagcacgtccacacaggtagtgttctgggcaggcatcctgcaggcccagatgtgtgtcctagacctggaggaggagctggagaagacggaagggctcaaggctgggctgaaatgctgtctccccacgccccctgtggacctccccggggacacgggcctgcactccagcccacctgagaatgaagactcaggggaagacagcagtgagcctgagggagagggccaggcatggctgagagagggaaccccagactcttccccacagtggggagctgaggaggagagcatgttcttcagcaaccccctcttcctggcgagtccttgctcagagaacagtgcttctggagagtgcttttcctggggggcttcagactcccatgcaggtgtgaggactggacctgagagcccagcgactctggagcctcccctcccagaagacacagtgctgtgggagctggaaagtgagccagatttgggggacggcgctgctatcagtgggcattgtacccctccattccctgtgcccatctataaaccacactccatctgctgggcctcagtggctgccgctgagggggctcctgcagcacctcctggtcacggggagagtgagggagataggcttggtcctgctccatctgcagcaccgtgtgtggacgaagcattgacctgggaatcaggatgtgtcggatctgatcttggccctgctgcacatcctgtgcaaccttgggcctctctcagccctgagggctggcagagaggaggtcctttttggccccaggtgactcttaactcccaggacagagatgagagggagggtggacacccccaggaatctcttccctgcaccttggccccctgcccctggaggagcccagcttcttctccagagcctagcagcccagaatctgagagcagaggccctggtcccaggcccagccctgcatcgtcccaggagggcagcccgcagcttcaacaccacagctcaggcattttgcccaagtggacactagatgcttcacagtcttcactcttggagacggatggggaacagccaagttccttgaagaaaaaggaggcaggggaggccccaaaaccaggcgaggaagtaaagagtgaaggaacagccaggcctgcagagactggagacgtccagcctgacattcacctgacttctgcagaacatgagaatctgaggacaccgatgaactcttcttggcttcctgggagccctatgccccaagcacagtccccagaggaaggccagagaccaccagctggagacaagctagctaatggcgtcaggaacaacaaggtagcctggaacttggcctcacgcctctatcgcctggagggcttccggaagtctgaagtggctgcctacctgcagaagaacaatgactttagcagggctgtggctgaggagtacctgtccttcttccagtttggaggccagagtctggaccgagccctccggagcttcctccaggccttggtgctcagtggggagactcaggaacgggagcgaatcctctaccagttctccagacgcttccaccattgcaatccggggatcttcccctcagtagattctgtacacaccttgacatgtgcaatcatgctgcttaacacggacctgcatggacagaacattgggaagagcatgagctgccaggaattcataaccaacctgaatgggctgagggatggcgggaacttccccaaggagctgctgaaggccctctactggtctatccgcagcgagaagctcgagtgggccgtggatgaagaagacacagccagacctgagaaggcccagccgtccctgccagctggcaagatgagcaagcccttccttcagctggctcaggatcccacagtgcccacctacaagcagggcatcctggctcggaaaatgcatcaagatgcagacggcaagaagacgccatggggcaagcgtggctggaagatgttccacaccttactgcgagggatggttctctacttcctgaagcagggagaagaccactgtctggagggggagagcttggtggggcagatggtggatgagcccgtgggggtgcaccactcgctggccacccccgccacgcattacaccaagaagccgcacgtcttccagctgcgcacggctgactggcgcctctacctcttccaggcacccactgccaaggagatgagctcctggatcgcgcgcatcaacttggctgcggccacgcactccgcgccgcccttccccgccgctgtgggctcccagcgcagattcgtgcggcccatcctgcccgtgggccccgcccagagctccctggaggagcagcatcgatcccacgagaactgcctggacgctgccgcggacgacctgctggatctacagaggaacctgccggagcggcggggccgtggccgcgagctggaggagcaccgcctgcggaaggagtacctggagtacgagaaaacccgctacgagacctacgtgcagctgctggtggcccgcctgcactgcccctctgatgctctggacctgtgggaggagcagctggggagggaagctggaggcactcgggagcccaagctcagcctgaagaagtcccactcgagcccgtccctgcaccaggatgaggctcccaccacggccaaggtgaagcgcaacatctcagagcgcagaacctaccggaagatcatccctaagcggaaccgcaatcagctgtgaagccagcaccacctcagagacactgttccctgctccagggtagacctgagatgaacctccctggaggagacttatttcaatgagtccaccatgacggatgaggcacctcctttccctgctgaaggacaaaccttgtttccctgtggccctcattcttgtgctccctgaagctttcctaatattgctgtgctccccaccacccccatggcagtccctccgcagccccagtccctggccacgcccaagggaagagggaggtgaggacttgactttcctcccagagctcagcccatgtcaccctccaggccccagaatccagagtggcctcatttcctagacttgctgagaactcagcacttgtttgagaaccagtgcttatgtggtgtgcccttggcttctgggggagagcttggggcagcagaggcccctgggcagcccagccaggggagccacagccccaaggatggtcttgctctgggaattaggtgaccttcctggggaggccccaggagagtgaatcagggactcttgagaaattcctaaccagcctcctgtgacccagggagcagggtcgctaaggtcctgcccactgaggggacagccttctgggcagggacctcggggggcttcaagggctctgcacggctgtggggccctgtgcctttgtctccttgtgtctcctttcccccgaagtagatgaaacagtctcacatacccaactgctcatcaacagagcagagctgatggcatgagtgagggctgggcggggtggggcctccagagctttgcagggaaccctggaaccctaggaacaaggagcctttgttccaacagagcagagaaggaggttctctatgttcagaccactggagaggatagagaggtaaaaggtggcgacagtttcccttaggggtctgcctggcaggagccacagctcaggagagttgtgagggatgggacggaggctggcgaccaggcgaggcctaggccaggctcgggagacttttctgtgctcctttctacacatgccttaaaccttccttcctgtggggtgcctggaccccttccccatctctggcagctcagagggtctctgctgctctcccctgggaaatcccctcatcctgccctctggctgcctcccagctgggcttgttctctgagggaggttccggagactcatggacttggggctctgcctgtaggaaggaggctgggccggagggaccagccaccattgtctctgttcagccaagtgtgcaagtaggctgcccgccaagagggggcctctgctacccgctgctgcctgccggctgacacactgcctccccagccttcctgctaggccaccctcctcccttcccatgcttgtaaccagctctggggcttgcacctccacaaagtaaggttggcccttggaggccatgtttgggtctccggccagggcctagggctaggccatgcacccaatgggtgcacaataaataacaggtcaacaaagagggaggtgtgtcagtgtgtgaggaagggaggtcaggcagctaggaccacctgcagtgtggcaggcttcatccctctttgctccaagtgtgtatgtgtgtctgtgcatgtgtgtagtgtctgtgtctgtgtgttcatgcatatgcaggagtcacacggtcataggccatcaaagctggaggagacctcagaatcattcattcacctacttgctcatttattcattcattcattttgcagataatatgggacgctttctatgtgccagtaccaggggattcacaaatgaattaaacatgtccctgactccatgagttgacaa

SEQ ID NO: 166475 - DNA, 2394 bp, Homo sapiens
  Payload ID: 12781
  Gene Symbol: PSD4
  Gene Name: pleckstrin and Sec7 domain containing 4
  ENST ID: ENST00000409656
  CDS Start-End: 1-126
ggccctgctgcacatcctgtgcaaccttgggcctctctcagccctgagggctggcagagaggaggtcctttttggccccaggtgactcttaactcccaggacagagcaaaggtcctgagcccttagttgcctggaggcttgagtcctgggagcccgctgtctgctgcctctgcaagtgggagaggtcactgcccgagggaggacagggcatgctgccaggctccaggggaggagccccagggagggagcctctggaggtggtgcccaggccgttctcctgcctcctgccctgtgcccgcctcacttcatgttcttcctcagatgagagggagggtggacacccccaggaatctcttccctgcaccttggccccctgcccctggaggagcccagcttcttctccagagcctagcagcccagaatctgagagcagaggccctggtcccaggcccagccctgcatcgtcccaggagggcagcccgcagcttcaacaccacagctcaggcattttgcccaagtggacactagatgcttcacagtcttcactcttggagacggatggggaacagccaagttccttgaagaaaaaggaggcaggggaggccccaaaaccaggcgaggaagtaaagagtgaaggaacagccaggcctgcagagactggagacgtccagcctgacattcacctgacttctgcagaacatgagaatctgaggacaccgatgaactcttcttggcttcctgggagccctatgccccaagcacagtccccagaggaaggccagagaccaccagctggagacaagctagctaatggcgtcaggaacaacaaggtagcctggaacttggcctcacgcctctatcgcctggagggcttccggaagtctgaagtggctgcctacctgcagaagaacaatgactttagcagggctgtggctgaggagtacctgtccttcttccagtttggaggccagagtctggaccgagccctccggagcttcctccaggccttggtgctcagtggggagactcaggaacgggagcgaatcctctaccagttctccagacgcttccaccattgcaatccggggatcttcccctcagtagattctgtacacaccttgacatgtgcaatcatgctgcttaacacggacctgcatggacagaacattgggaagagcatgagctgccaggaattcataaccaacctgaatgggctgagggatggcgggaacttccccaaggagctgctgaaggccctctactggtctatccgcagcgagaagctcgagtgggccgtggatgaagaagacacagccagacctgagaaggcccagccgtccctgccagctggcaagatgagcaagcccttccttcagctggctcaggatcccacagtgcccacctacaagcagggcatcctggctcggaaaatgcatcaagatgcagacggcaagaagacgccatggggcaagcgtggctggaagatgttccacaccttactgcgagggatggttctctacttcctgaagcagggagaagaccactgtctggagggggagagcttggtggggcagatggtggatgagcccgtgggggtgcaccactcgctggccacccccgccacgcattacaccaagaagccgcacgtcttccagctgcgcacggctgactggcgcctctacctcttccaggcacccactgccaaggagatgagctcctggatcgcgcgcatcaacttggctgcggccacgcactccgcgccgcccttccccgccgctgtgggctcccagcgcagattcgtgcggcccatcctgcccgtgggccccgcccagagctccctggaggagcagcatcgatcccacgagaactgcctggacgctgccgcggacgacctgctggatctacagaggaacctgccggagcggcggggccgtggccgcgagctggaggagcaccgcctgcggaaggagtacctggagtacgagaaaacccgctacgagacctacgtgcagctgctggtggcccgcctgcactgcccctctgatgctctggacctgtgggaggagcagctggggagggaagctggaggcactcgggagcccaagctcagcctgaagaagtcccactcgagcccgtccctgcaccaggatgaggctcccaccacggccaaggtgaagcgcaacatctcagagcgcagaacctaccggaagatcatccctaagcggaaccgcaatcagctgtgaagccagcaccacctcagagacactgttccctgctccagggtagacctgagatgaacctccctggaggagacttatttcaatgagtccaccatgacggatgaggcacctcctttccctgctgaaggacaaaccttgtttccctgtggccctc

SEQ ID NO: 166476 - DNA, 580 bp, Homo sapiens
  Payload ID: 12781
  Gene Symbol: PSD4
  Gene Name: pleckstrin and Sec7 domain containing 4
  ENST ID: ENST00000409378
  CDS Start-End: 1-537
atgcatcaagatgcagacggcaagaagacgccatggggcaagcgtggctggaagatgttccacaccttactgcgagggatggttctctacttcctgaagggagaagaccactgtctggagggggagagcttggtggggcagatggtggatgagcccgtgggggtgcaccactcgctggccacccccgccacgcattacaccaagaagccgcacgtcttccagctgcgcacggctgactggcgcctctacctcttccaggcaccgaggagcagcatcgatcccacgagaactgcctggacgctgccgcggacgacctgctggatctacagaggaacctgccggagcggcggggccgtggccgcgagctggaggagcaccgcctgcggaaggagtacctggagtacgagaaaacccgctacgagacctacgtgcagctgctggtggcccgcctgcactgcccctctgatgctctggacctgtgggaggagcagctggggagggaagctggaggcactcgggagcccaagctcagcctgaagaagtcccactcgagcccgtccctgcaccaggatgaggctcc

SEQ ID NO: 166477 - DNA, 11234 bp, Homo sapiens
  Payload ID: 12781
  Gene Symbol: PSD4
  Gene Name: pleckstrin and Sec7 domain containing 4
  Uniprot ID: Q8NDX1
  ENST ID: ENST00000441564
  CDS Start-End: 170-3253
gccaggaagtgctcttggggagcccaggccaagccatccattcttgggtcctttggagggtagatatggattcccagtttctccagcggccagtgctccccctagtccacacagtgagaccgtgaaagcagatgctccggggcactcctgggcagcttttgctcagtggatgatgggtgactacagactccctgaccacccccagcccatggaaattctcaacctgtacttgggagacagcctggagccccacccaggagagtgcccaagggaaacgtgcagccatgaggatccaccggagcctttcgaggagcaaacctgggccactgaccctcctgaacctaccagacaaaatgttcctccctggggctccggtgtggagctcacacacctggggagctgggtccatcaggacgggctggagccttgccaggagcaaacccgggccactgaccctcctgaatctaccagacaagatgctcctccctggggctccggtgtggagctcacacacctggggagcccctctgcccagagggagcacaggcagaacacagcatcaccagggtcaccagtgaacagccatctaccggggagcccaaagcagaaccggagcacgtccacacaggtagtgttctgggcaggcatcctgcaggcccagatgtgtgtcctagacctggaggaggagctggagaagacggaagggctcaaggctgggctgaaatgctgtctccccacgccccctgtggacctccccggggacacgggcctgcactccagcccacctgagaatgaagactcaggggaagacagcagtgagcctgagggagagggccaggcatggctgagagagggaaccccagactcttccccacagtggggagctgaggaggagagcatgttcttcagcaaccccctcttcctggcgagtccttgctcagagaacagtgcttctggagagtgcttttcctggggggcttcagactcccatgcaggtgtgaggactggacctgagagcccagcgactctggagcctcccctcccagaagacacagtgctgtgggagctggaaagtgagccagatttgggggacggcgctgctatcagtgggcattgtacccctccattccctgtgcccatctataaaccacactccatctgctgggcctcagtggctgccgctgagggggctcctgcagcacctcctggtcacggggagagtgagggagataggcttggtcctgctccatctgcagcaccgtgtgtggacgaagcattgacctgggaatcaggatgtgtcggatctgatcttggccctgctgcacatcctgtgcaaccttgggcctctctcagccctgagggctggcagagaggaggtcctttttggccccaggtgactcttaactcccaggacagagagcctagcagcccagaatctgagagcagaggccctggtcccaggcccagccctgcatcgtcccaggagggcagcccgcagcttcaacaccacagctcaggcattttgcccaagtggacactagatgcttcacagtcttcactcttggagacggatggggaacagccaagttccttgaagaaaaaggaggcaggggaggccccaaaaccaggcgaggaagtaaagagtgaaggaacagccaggcctgcagagactggagacgtccagcctgacattcacctgacttctgcagaacatgagaatctgaggacaccgatgaactcttcttggcttcctgggagccctatgccccaagcacagtccccagaggaaggccagagaccaccagctggagacaagctagctaatggcgtcaggaacaacaaggtagcctggaacttggcctcacgcctctatcgcctggagggcttccggaagtctgaagtggctgcctacctgcagaagaacaatgactttagcagggctgtggctgaggagtacctgtccttcttccagtttggaggccagagtctggaccgagccctccggagcttcctccaggccttggtgctcagtggggagactcaggaacgggagcgaatcctctaccagttctccagacgcttccaccattgcaatccggggatcttcccctcagtagattctgtacacaccttgacatgtgcaatcatgctgcttaacacggacctgcatggacagaacattgggaagagcatgagctgccaggaattcataaccaacctgaatgggctgagggatggcgggaacttccccaaggagctgctgaaggccctctactggtctatccgcagcgagaagctcgagtgggccgtggatgaagaagacacagccagacctgagaaggcccagccgtccctgccagctggcaagatgagcaagcccttccttcagctggctcaggatcccacagtgcccacctacaagcagggcatcctggctcggaaaatgcatcaagatgcagacggcaagaagacgccatggggcaagcgtggctggaagatgttccacaccttactgcgagggatggttctctacttcctgaagggagaagaccactgtctggagggggagagcttggtggggcagatggtggatgagcccgtgggggtgcaccactcgctggccacccccgccacgcattacaccaagaagccgcacgtcttccagctgcgcacggctgactggcgcctctacctcttccaggcacccactgccaaggagatgagctcctggatcgcgcgcatcaacttggctgcggccacgcactccgcgccgcccttccccgccgctgtgggctcccagcgcagattcgtgcggcccatcctgcccgtgggccccgcccagagctccctggaggagcagcatcgatcccacgagaactgcctggacgctgccgcggacgacctgctggatctacagaggaacctgccggagcggcggggccgtggccgcgagctggaggagcaccgcctgcggaaggagtacctggagtacgagaaaacccgctacgagacctacgtgcagctgctggtggcccgcctgcactgcccctctgatgctctggacctgtgggaggagcagctggggagggaagctggaggcactcgggagcccaagctcagcctgaagaagtcccactcgagcccgtccctgcaccaggatgaggctcccaccacggccaaggtgaagcgcaacatctcagagcgcagaacctaccggaagatcatccctaagcggaaccgcaatcagctgtgaagccagcaccacctcagagacactgttccctgctccagggtagacctgagatgaacctccctggaggagacttatttcaatgagtccaccatgacggatgaggcacctcctttccctgctgaaggacaaaccttgtttccctgtggccctcattcttgtgctccctgaagctttcctaatattgctgtgctccccaccacccccatggcagtccctccgcagccccagtccctggccacgcccaagggaagagggaggtgaggacttgactttcctcccagagctcagcccatgtcaccctccaggccccagaatccagagtggcctcatttcctagacttgctgagaactcagcacttgtttgagaaccagtgcttatgtggtgtgcccttggcttctgggggagagcttggggcagcagaggcccctgggcagcccagccaggggagccacagccccaaggatggtcttgctctgggaattaggtgaccttcctggggaggccccaggagagtgaatcagggactcttgagaaattcctaaccagcctcctgtgacccagggagcagggtcgctaaggtcctgcccactgaggggacagccttctgggcagggacctcggggggcttcaagggctctgcacggctgtggggccctgtgcctttgtctccttgtgtctcctttcccccgaagtagatgaaacagtctcacatacccaactgctcatcaacagagcagagctgatggcatgagtgagggctgggcggggtggggcctccagagctttgcagggaaccctggaaccctaggaacaaggagcctttgttccaacagagcagagaaggaggttctctatgttcagaccactggagaggatagagaggtaaaaggtggcgacagtttcccttaggggtctgcctggcaggagccacagctcaggagagttgtgagggatgggacggaggctggcgaccaggcgaggcctaggccaggctcgggagacttttctgtgctcctttctacacatgccttaaaccttccttcctgtggggtgcctggaccccttccccatctctggcagctcagagggtctctgctgctctcccctgggaaatcccctcatcctgccctctggctgcctcccagctgggcttgttctctgagggaggttccggagactcatggacttggggctctgcctgtaggaaggaggctgggccggagggaccagccaccattgtctctgttcagccaagtgtgcaagtaggctgcccgccaagagggggcctctgctacccgctgctgcctgccggctgacacactgcctccccagccttcctgctaggccaccctcctcccttcccatgcttgtaaccagctctggggcttgcacctccacaaagtaaggttggcccttggaggccatgtttgggtctccggccagggcctagggctaggccatgcacccaatgggtgcacaataaataacaggtcaacaaagagggaggtgtgtcagtgtgtgaggaagggaggtcaggcagctaggaccacctgcagtgtggcaggcttcatccctctttgctccaagtgtgtatgtgtgtctgtgcatgtgtgtagtgtctgtgtctgtgtgttcatgcatatgcaggagtcacacggtcataggccatcaaagctggaggagacctcagaatcattcattcacctacttgctcatttattcattcattcattttgcagataatatgggacgctttctatgtgccagtaccaggggattcacaaatgaattaaacatgtccctgactccatgagttgacaatcttgcccactggtttcctgctctcagtttacagaggcacttttatcttgctggggaagtgtgctgaaaagacacattcccagcccacacccagggatgctgattcagtcagcctgggtcagagggatagataaatatgtttaaagctccttgggtaattctgatgtgtaagtagcagttagctgcagtagagtccaattgcctcatttgattgaagtggaatcccagcatcaagtggacatgacttttggcccaagactgatgcttacaaactaagtggagtaggttatttgacctcactgaacatgcatccttttttttttttttttttttttttttttttggagacggagtttcgctcttgtaacccaggctggagtgcaatggtgtgatcttggctgactgcaacctccactgaatcaagcgattctcctgcctcagcctcccaagtagctaggattacaggcgtgtgccaccacgcccggctattttttgtatttttagtagagatggggtttcgtcatgttggctaggctggtctcgaactcctgacctcaggtagtctgcctgcctcggccccccaaagtgctgggattacaggcgtgaaccaccacacctggcctatgcatccttatttctaaaaccatgataaaaggtgaaagtctgaatgcatgtgtgtgtgacactttgatgctcctttgctcatgtagaaccggcacctctctttcacctgagcacgtggaatcttcagagccagatgatggtggctgcctggcctgccatagtcaatgctgcccaggcacctctgcctggagggtctgggttgtgggctgcagttatgacatgtgaccacttggaggcaggcttgcatctttctagcttctggctgctcaggtgtcctgctgtggagctgagctgtgctccctgaaaggcaggaagttattatgtgtgcccctgtgccatcaccgaaccaggaccttcaacttcgtaaaacccacagtggcctgggccaggactcccaccatctagggaagcctctcctagggaaaagactggggctctgacatcttcctgcagatggagagaaagaaagacatctcagaagtctatggggacagcctacagctccccacagggttgctccaggtaacgctggaaggtgaaagctgagcaggctccagtccccatcctaggtatggaacagatcaaaccaccacaggcctatgtctgaccttgttcccaccccatgctcctctcccacctgtgtccttctctttgcaggagaagggacagacagaggttctcagtgatgagctcaggctctggaagggcacttgaagtttggctttagttcttcctttcccatataggggagctcagcttccagggtcctgggcctgctgtgacccaggttgttactcctgatataactgcttcctgggctctcatgatctcagctgagcctggctttctgctgatgatatttgtttgttgcttgccaggcaccagggtagataaaaagatcaccaagacccgcacctttttccttaggagggtctgagtcttcaggagacggagacatatggaatgtgtcggggttggaaggagcaggactggagggtcggggtgaggggggcagagggaaacagggccgtcagggtggcctgaggccagatcatacagggtctccaatgcagccaaggagagtggctttttgtgaatgtgcagtgcaacttttttttttttttgagacagagtctcgctctgttgcccaggctggagtgcaatggtgcgatctcagctcactgcaacctccgcctcctgggttcaagagattctcctttcccagcctcccaagtagctgggattacaggcatgcaccaccatgcccagctaattttgtattttttagtagagacagggtttcaccatgttggtcaggctggtctcaaactcctgacctcaagtgatccagctgcctcggcctcccaaagcattgggatcacaggcgtgagccaacgtgcctggccagtgcagtgcaatttttaaagagaagagtgccaagctcagggcttggaggacagcctagggattttgttttaagaagatgagctgggcgcggtggctcatgcctgtaatcccagcactttgggaggctgaagcgggcgcatcacctgagatcaggagttcgagaccagcctggccaacgtggtgaaacccagtctttactaaaaatacaaaaaatagccgggcatggtggcacatgcctataatcccagctactcaggaggctgaagcaggagaatggcttgaacccaggaggcggaggttgcagtgagctgaggttgcgccattgcactccagcctgggtaacagagcgagactctgtcgaaaaagaaaaaaaagatgaaatgccttgaaaaagtaaggccaatgggtagggtcagaatatggcctgcaaatgcactgtactatttgtgtaacttatatgtaaatctgaaattatttcaaaataaatacaaaaagaaaaaaaggcaatatcccagaaccttgtgaaaacctggccgtagcaggtcctttttcctcctgctgagctgagcaggcatgctcacagatcctcaaggtttcttgaatggctactgtcctccccactggcccctctgccaacacctctgcccctcagcttttctgatgcccatgccccctcaccagctaactgtggcttgcacctttacctgttcccttcattttcccttctccagaggaagaggtgctctccacaagcctgtgaccaactgttcccctcagccggcacactggctcctcttctcctgcctgccacagacctctctccttcatgggcccactggggctctttgagcctattctctacccccttcattatcatgccttgcaaacaccatcatgagcaaaaatcaaagctggtgttagactctcttgctttccatagctgaccctggcttccctgctttctgtgatgaattcacggtatgtgtgggctttgccaactgttcccagcccttaccaggttcccattcatacctggctctaattcacaccttacaaatcggcgtccaccccacctttgcctgaaatggcacctcctagggcaattgatggctgcagtcatcaactctgatgccttctcagccttcttccgccatcacctctcagcgacctttggccttgatagctatgtgatcatctaccagaccctgcacccaggctcagcctgatcttgccccagtggccaggcccttgagtgggactgccgggaattgagtccagcttttctagccatctgaccgtggccagttagcctcttatgttctgtttgcttctctataaaatggggataataacactacttatgtcacaaggtcctcatgaagattaagtgaaattatgcacgtaaacatctcagaacaatgcctggcacagaagggacacctgtgaggttagctattaattcatagcctcaccagacttaccccacgtctgctcccctcctcctttgggctctggcttaggctctgccctcatgcatgccatcctgcttggatgctgggtagctttgcacttggctctgccttggcctgcaaataacaaatctgagctcaaatgagctttagcagaaaaggactttgattggctccaatagctgaataatctgtatccaggtcaggtgaggcttcatctcgggcttcactctgattcaaggccccttttctctcttgttcttttgggggctccatctcccaggcctatgagcaggaacaaccctcatgcttccaagatggccccaggaactctcaagatccattttcttggtgcaaatatagcagaaagtgactctctgcttcctggaagtttcaaactcaaatccaggaatagtctcctgtagcagcctgccttgggccgtgtgcccatatctgagccagtcactagagccaggggtttaaggagatcagagtccacttctggagaggatgagagtgaagtcagcaccaccaaaacatagggaccagctgtggagaaattgtgagtactggaaggacaggataggaggaatggatgatggggagaaaaccgactaatatgcagatgccctttcctccaagaggccttccctaagtcttcctccttcagtttctattacatgaaactctgtaactctcctctcctctctcctcttcttttttttttttttttttttgagatggagtcttgctcggtcgcccaggctggagtgcggtggcatgatctcggctcactgcaagctctgcctcccgagttcacgccattctcctgcctcagcctcccgagtagctgggactacaggcgcccgctaccatgcccggctaatttttttgtatttttagtagagacggggtttcaccgtgttagccaggatggtctcaatctcctgatcttgtgatccgcctgcctcagcctcccaaagtgctgggattacaggcgtaagccaccacgccccggccctcttcatttctttttgcctctctgcttccagagcaacataaactccctgtgggcaggaactgggattgttgatttccactgcttccccagggcctgatatctagagtcgaaagaatgcacatctcaaaactatgtcctggttctttttctactttcttgcatattctttttcaggcaggagtgcagtggcacgatctcaattcactgcaacctctgcctcccgggttcaagcaattctccttcctcagcctcctgagtagctgggattacaggcatgcaccaccacacccagctaatctttgtattttcagtagagatggggtttcaccatgttggtcaggctggtctcaaactcctgacctcgtgatccgccggcctctgcctcccaaagtactggtgcatattctttttctgtctttcctgctactccctcttgctcttcccacccctaaactatgtagcctcaaagatcttacctggctgactgctgggctttcaagatagtttctggaagaagtctctaaatctaagccttcaactctcatctctgttctgaatttcagacctggaattctaactgtccacaatacatggctcctcaatatatcttcctgaaattacaaatgaccatacggtacaggtgttactatattacctgtaagaccacactcggtgtcatctcctgcaaactagtcctctcctgactcctctgtttctgtgagtgattctgcgatggcttgaggtcatccgtttgctttgaaagatcacacaccaggatacatacagagatgtgacccggatggatggacctttgcctcacaatcagggtagaagcctctggttttcttatttctttgtcctcctctgtggtgtgacacaggttcaggaggaggtacccagacacagaagagatgctttccctgtgcaggcttgctgacagtcttgcccaccactcctggcctcctccctctacatgtccacattcgctgctctgaccctgagttggacccagctaggaattgtgacttcagttactagtatttcctctgagcctctagtcatggtcatgggctaatctgtatatgaaaacccacttgaaagaaatcccagtgctgaagaaagaattgaaacatacagatcgtttctttgctcaagggagtgtggatttcagtgctctcactgagcagaggctgagggtgaccaccttggatcttcctgcaggacacagcccagagaaactgagcctgaatttgctgccatgttttgaggacattatccacgctagtctctttcatctgggccgaggtgggtaattttccttagagtcaagtactagaaaaagttttgcttcttctaagagctggtacattgccctcttgtgaatgagagccatgtatgtgaccacaacaccctttcagttgaccactaagagactgaaggccaattccggatcaactttacagccgcctacggcctgctataccacccatggcatagtttctgtggtctgatgctttattttttattgcattttactaatttatggcatgcatatcatatgagcagtctcaaatcctccccagaacaaggtgaggaatatattaatatttaaaataaaataaacaaaatgtcagtgtg

SEQ ID NO: 166478 - DNA, 3872 bp, Homo sapiens
  Payload ID: 12782
  Gene Symbol: PLEKHA1
  Gene Name: pleckstrin homology domain containing, family A (phosphoinositide binding specific) member 1
  Uniprot ID: Q9HB21
  ENST ID: ENST00000368988
  CDS Start-End: 97-1101
ttgaacagatttgcagtccatgagaaatactttcctgtttcatagggagcttactgttaatatttttattttacagtgtaatgttcaagctcagaaatgccttatgtggatcgtcagaatcgcatttgtggttttctagacattgaagaaaatgaaaacagtgggaaatttcttcgaaggtacttcatactggataccagagaagatagtttcgtgtggtacatggataatccacagaacctaccttctggatcatcacgtgttggagccattaagcttacctacatttcaaaggttagcgatgctactaagctaaggccaaaggcggagttctgttttgttatgaatgcaggaatgaggaagtacttcctacaagccaatgatcagcaggacctagtggaatgggtaaatgtgttaaacaaagctataaaaattacagtaccaaagcagtcagactcacagcctaattctgataacctaagtcgccatggtgaatgtgggaaaaagcaagtgtcttacagaactgatattgttggtggcgtacccatcattactcccactcagaaagaagaagtaaatgaatgtggtgaaagtattgacagaaataatctgaaacggtcacaaagccatcttccttactttactcctaaaccacctcaagatagtgcggttatcaaagctggatattgtgtaaaacaaggagcagtgatgaaaaactggaagagaagatattttcaattggatgaaaacacaataggctacttcaaatctgaactggaaaaggaacctcttcgtgtaataccacttaaagaggttcataaagtccaggaatgtaagcaaagcgacataatgatgagggacaacctctttgaaattgtaacaacgtctcgaactttctatgtgcaggctgatagccctgaagagatgcacagttggattaaagcagtctctggcgccattgtagcacagcggggtcccggcagatctgcgtcttctatgcggcaggccagaaggctgtcgaacccttgtatacagaggtatacatcaagagctggtgaatgcagcacgtatgtgggctctcacgcaaacgtgccttcttagtggagggcccagacttactacttacaactgatcatagaaagagcatccccccggtccttcagaatccaaacacgctttccgtcctaccaacgcagccaccgccacctcacattccacagcctctcgcagcaactctttggtctcaacctttaccatggagaagcgaggattttacgagtctcttgccaaggtcaagccagggaacttcaaggtccagactgtctctccaagagaaccagcttccaaagtgactgaacaagctctgttaagacctcaaagtaaaaatggccctcaggaaaaagattgtgacctagtagacttggacgatgcgagccttccggtcagtgacgtgtgaggcagaagcgcacggagcctgcctgcctctgccgtcctcagtttcctttcatgaggcttctagccaaagatgataaagggggaaatggtttttagtgcgtatattatactgcctcttaggtgtactctttataagctggtaaaccaagaatctagggagtggccaaactaaatataatttctttaaaaaagaaagaaaaaggaaaaatccaaaatatctcagtatcatctgtctgaagcattgtgtgttctcattcgggtggtaacaatgtatgtgtaatatttttttcttagtgattttgacagtttaaatgtttaacaacttaaagcattaaaaatgcttattaataactttggtcatttaaaaaatgctacaatgacttcctattaaaggttcaatatttacacattcttattggttgatattaccacatgaaatattgccagaccaagatacctaaactcatgatgtctgtggtgctgtaaaatttatactaaaatgtggactattttgaaattataaccatttttgatgccctgaatcttgaggtgacttattttgcatagaggatatggatagaccaacagtaagggttgtgggttataccggcatagagaaaagaagaaaactagaattgaaacaactgtgtcttagacatttgtttgaaaaagcttcatcaggccttggagcagtcactgctttattccgcaaaaattatttggtaggaaatttttgggagatctgattttcttatccaagttttgtaaatagttgttatttctatatttggattggtgaaagacctcaagtttatatgtaaagacataactgcccttagtcatgaaattgttgtgacctctactttttgtcactaatagcctacattcaagtgcctgtgttttttcatcttgtttaggaatgttttgagattaatgtgcttaaaagtcctacgtgactgattttaaacattgtgataaaattaattttcagtagaatagttgaatgtgttaagataggattttatgttagagataccagaatgctggtattctactacttgtgcaatatatatgttttaaaaaacaaatttgagaatacatttaatcatagggatatagatataagcacctctctaaagaatctttagtttccgacgttgaattatagaccagtttgagtaagtactgctttttttttttggagacgggctctcgctctgttgctcaggctggagtgcagtggcgtgatctcagctcactacagcctccacctcgtgggttcaaacagttgtgctgcctcagcttcccgagtagctaggattacaggtgcatgccaccacacctggctaatttttgtattttagtagagatggggtttcaccatgttggccaggctcgtctcgaactcctgacttcaggtgatccacccatctcagcctcccaaagtgctgggattacaggcgtgagccaccatgcccggcccataagtaccgtttttgaggttcagtcttaaacatttgctttaagaaaacagtcttgaatttcacatgctgctatttttatattttgccattttacagtactgttttgttttgaattcatgcatatcattgaaaatttctcgttttcattttcttagatgacttcttgtctgagacagaaaaatttcctactacagcagtgcagtccagaggttaagatgtattagaattatacaatatcagtttaaaaatctgtatgcataaagaatgcaccactcaacttttttattcataagctaatatttttttaaagttacattaagattttttctcttttgcagctacatttgaaagtgatagaataaagagattttaatgagttatcactttttcagctgatatattcattttaatggcttttttgaaagttcctttttcatgaacacacccgagaaatcttaaatagacactttgcaatatttaagaacctaatgctgtttaattttggtacagcttccacattgcatgttcactttagtatttgcaatttgatatatttcatggtggcaaaatattagctctgttttgggacattttaaaatagaactatccttgttcgatagcataggaaaatgttctggtgattgtcagggtctcctaatatttatctcaattcttttataagtctatggaaattatttaattattttaaaacgtacacacttttcttgtaaatatgtcacatctgagttcaaaaaaattactttgaataccttaatatttgctgcatttttttccgtatatataacatgtcttctttcagaatgggaatatatgtgtgcctcccaacatttactgttaaagtgtgttatctttatatgtcaaactggttgaacactgtaatgagaataaactgcacagagtttattctgactt

SEQ ID NO: 166479 - DNA, 3771 bp, Homo sapiens
  Payload ID: 12782
  Gene Symbol: PLEKHA1
  Gene Name: pleckstrin homology domain containing, family A (phosphoinositide binding specific) member 1
  ENST ID: ENST00000368989
  CDS Start-End: 109-1260
tgggagccggggccgcggcggcgcgggtgctccgggccgaggccgcggtaaagtttagcttgaagaacgcggccgcgctggagcagggtgtaatgttcaagctcagaaatgccttatgtggatcgtcagaatcgcatttgtggttttctagacattgaagaaaatgaaaacagtgggaaatttcttcgaaggtacttcatactggataccagagaagatagtttcgtgtggtacatggataatccacagaacctaccttctggatcatcacgtgttggagccattaagcttacctacatttcaaaggttagcgatgctactaagctaaggccaaaggcggagttctgttttgttatgaatgcaggaatgaggaagtacttcctacaagccaatgatcagcaggacctagtggaatgggtaaatgtgttaaacaaagctataaaaattacagtaccaaagcagtcagactcacagcctaattctgataacctaagtcgccatggtgaatgtgggaaaaagcaagtgtcttacagaactgatattgttggtggcgtacccatcattactcccactcagaaagaagaagtaaatgaatgtggtgaaagtattgacagaaataatctgaaacggtcacaaagccatcttccttactttactcctaaaccacctcaagatagtgcggttatcaaagctggatattgtgtaaaacaaggagcagtgatgaaaaactggaagagaagatattttcaattggatgaaaacacaataggctacttcaaatctgaactggaaaaggaacctcttcgtgtaataccacttaaagaggttcataaagtccaggaatgtaagcaaagcgacataatgatgagggacaacctctttgaaattgtaacaacgtctcgaactttctatgtgcaggctgatagccctgaagagatgcacagttggattaaagcagtctctggcgccattgtagcacagcggggtcccggcagatctgcgtcttctatgcggcaggccagaaggctgtcgaacccttgtatacagaggagcatccccccggtccttcagaatccaaacacgctttccgtcctaccaacgcagccaccgccacctcacattccacagcctctcgcagcaactctttggtctcaacctttaccatggagaagcgaggattttacgagtctcttgccaaggtcaagccagggaacttcaaggtccagactgtctctccaagagaaccagcttccaaagtgactgaacaagctctgttaagacctcaaagtaaaaatggccctcaggaaaaagattgtgacctagtagacttggacgatgcgagccttccggtcagtgacgtgtgaggcagaagcgcacggagcctgcctgcctctgccgtcctcagtttcctttcatgaggcttctagccaaagatgataaagggggaaatggtttttagtgcgtatattatactgcctcttaggtgtactctttataagctggtaaaccaagaatctagggagtggccaaactaaatataatttctttaaaaaagaaagaaaaaggaaaaatccaaaatatctcagtatcatctgtctgaagcattgtgtgttctcattcgggtggtaacaatgtatgtgtaatatttttttcttagtgattttgacagtttaaatgtttaacaacttaaagcattaaaaatgcttattaataactttggtcatttaaaaaatgctacaatgacttcctattaaaggttcaatatttacacattcttattggttgatattaccacatgaaatattgccagaccaagatacctaaactcatgatgtctgtggtgctgtaaaatttatactaaaatgtggactattttgaaattataaccatttttgatgccctgaatcttgaggtgacttattttgcatagaggatatggatagaccaacagtaagggttgtgggttataccggcatagagaaaagaagaaaactagaattgaaacaactgtgtcttagacatttgtttgaaaaagcttcatcaggccttggagcagtcactgctttattccgcaaaaattatttggtaggaaatttttgggagatctgattttcttatccaagttttgtaaatagttgttatttctatatttggattggtgaaagacctcaagtttatatgtaaagacataactgcccttagtcatgaaattgttgtgacctctactttttgtcactaatagcctacattcaagtgcctgtgttttttcatcttgtttaggaatgttttgagattaatgtgcttaaaagtcctacgtgactgattttaaacattgtgataaaattaattttcagtagaatagttgaatgtgttaagataggattttatgttagagataccagaatgctggtattctactacttgtgcaatatatatgttttaaaaaacaaatttgagaatacatttaatcatagggatatagatataagcacctctctaaagaatctttagtttccgacgttgaattatagaccagtttgagtaagtactgctttttttttttggagacgggctctcgctctgttgctcaggctggagtgcagtggcgtgatctcagctcactacagcctccacctcgtgggttcaaacagttgtgctgcctcagcttcccgagtagctaggattacaggtgcatgccaccacacctggctaatttttgtattttagtagagatggggtttcaccatgttggccaggctcgtctcgaactcctgacttcaggtgatccacccatctcagcctcccaaagtgctgggattacaggcgtgagccaccatgcccggcccataagtaccgtttttgaggttcagtcttaaacatttgctttaagaaaacagtcttgaatttcacatgctgctatttttatattttgccattttacagtactgttttgttttgaattcatgcatatcattgaaaatttctcgttttcattttcttagatgacttcttgtctgagacagaaaaatttcctactacagcagtgcagtccagaggttaagatgtattagaattatacaatatcagtttaaaaatctgtatgcataaagaatgcaccactcaacttttttattcataagctaatatttttttaaagttacattaagattttttctcttttgcagctacatttgaaagtgatagaataaagagattttaatgagttatcactttttcagctgatatattcattttaatggcttttttgaaagttcctttttcatgaacacacccgagaaatcttaaatagacactttgcaatatttaagaacctaatgctgtttaattttggtacagcttccacattgcatgttcactttagtatttgcaatttgatatatttcatggtggcaaaatattagctctgttttgggacattttaaaatagaactatccttgttcgatagcataggaaaatgttctggtgattgtcagggtctcctaatatttatctcaattcttttataagtctatggaaattatttaattattttaaaacgtacacacttttcttgtaaatatgtcacatctgagttcaaaaaaattactttgaataccttaatatttgctgcatttttttccgtatatataacatgtcttctttcagaatgggaatatatgtgtgcctcccaacatttactgttaaagtgtgttatctttatatgtcaaactggttgaacactgtaatgagaataaactgcacagagttta

SEQ ID NO: 166480 - DNA, 14010 bp, Homo sapiens
  Payload ID: 12782
  Gene Symbol: PLEKHA1
  Gene Name: pleckstrin homology domain containing, family A (phosphoinositide binding specific) member 1
  Uniprot ID: Q9HB21
  ENST ID: ENST00000368990
  CDS Start-End: 132-1346
ggggacgcgtgcgcagtgcgcgggctggccgtcgcggacgccgctccgggcagccgagcctctgtgggagccggggccgcggcggcgcgggtgctccgggccgaggccgcgtgtaatgttcaagctcagaaatgccttatgtggatcgtcagaatcgcatttgtggttttctagacattgaagaaaatgaaaacagtgggaaatttcttcgaaggtacttcatactggataccagagaagatagtttcgtgtggtacatggataatccacagaacctaccttctggatcatcacgtgttggagccattaagcttacctacatttcaaaggttagcgatgctactaagctaaggccaaaggcggagttctgttttgttatgaatgcaggaatgaggaagtacttcctacaagccaatgatcagcaggacctagtggaatgggtaaatgtgttaaacaaagctataaaaattacagtaccaaagcagtcagactcacagcctaattctgataacctaagtcgccatggtgaatgtgggaaaaagcaagtgtcttacagaactgatattgttggtggcgtacccatcattactcccactcagaaagaagaagtaaatgaatgtggtgaaagtattgacagaaataatctgaaacggtcacaaagccatcttccttactttactcctaaaccacctcaagatagtgcggttatcaaagctggatattgtgtaaaacaaggagcagtgatgaaaaactggaagagaagatattttcaattggatgaaaacacaataggctacttcaaatctgaactggaaaaggaacctcttcgtgtaataccacttaaagaggttcataaagtccaggaatgtaagcaaagcgacataatgatgagggacaacctctttgaaattgtaacaacgtctcgaactttctatgtgcaggctgatagccctgaagagatgcacagttggattaaagcagtctctggcgccattgtagcacagcggggtcccggcagatctgcgtcttctgagcatccccccggtccttcagaatccaaacacgctttccgtcctaccaacgcagccaccgccacctcacattccacagcctctcgcagcaactctttggtctcaacctttaccatggagaagcgaggattttacgagtctcttgccaaggtcaagccagggaacttcaaggtccagactgtctctccaagagaaccagcttccaaagtgactgaacaagctctgttaagacctcaaagtaaaaatggccctcaggaaaaagattgtgacctagtagacttggacgatgcgagccttccggtcagtgacgtgtgaggcagaagcgcacggagcctgcctgcctctgccgtcctcagtttcctttcatgaggcttctagccaaagatgataaagggggaaatggtttttagtgcgtatattatactgcctcttaggtgtactctttataagctggtaaaccaagaatctagggagtggccaaactaaatataatttctttaaaaaagaaagaaaaaggaaaaatccaaaatatctcagtatcatctgtctgaagcattgtgtgttctcattcgggtggtaacaatgtatgtgtaatatttttttcttagtgattttgacagtttaaatgtttaacaacttaaagcattaaaaatgcttattaataactttggtcatttaaaaaatgctacaatgacttcctattaaaggttcaatatttacacattcttattggttgatattaccacatgaaatattgccagaccaagatacctaaactcatgatgtctgtggtgctgtaaaatttatactaaaatgtggactattttgaaattataaccatttttgatgccctgaatcttgaggtgacttattttgcatagaggatatggatagaccaacagtaagggttgtgggttataccggcatagagaaaagaagaaaactagaattgaaacaactgtgtcttagacatttgtttgaaaaagcttcatcaggccttggagcagtcactgctttattccgcaaaaattatttggtaggaaatttttgggagatctgattttcttatccaagttttgtaaatagttgttatttctatatttggattggtgaaagacctcaagtttatatgtaaagacataactgcccttagtcatgaaattgttgtgacctctactttttgtcactaatagcctacattcaagtgcctgtgttttttcatcttgtttaggaatgttttgagattaatgtgcttaaaagtcctacgtgactgattttaaacattgtgataaaattaattttcagtagaatagttgaatgtgttaagataggattttatgttagagataccagaatgctggtattctactacttgtgcaatatatatgttttaaaaaacaaatttgagaatacatttaatcatagggatatagatataagcacctctctaaagaatctttagtttccgacgttgaattatagaccagtttgagtaagtactgctttttttttttggagacgggctctcgctctgttgctcaggctggagtgcagtggcgtgatctcagctcactacagcctccacctcgtgggttcaaacagttgtgctgcctcagcttcccgagtagctaggattacaggtgcatgccaccacacctggctaatttttgtattttagtagagatggggtttcaccatgttggccaggctcgtctcgaactcctgacttcaggtgatccacccatctcagcctcccaaagtgctgggattacaggcgtgagccaccatgcccggcccataagtaccgtttttgaggttcagtcttaaacatttgctttaagaaaacagtcttgaatttcacatgctgctatttttatattttgccattttacagtactgttttgttttgaattcatgcatatcattgaaaatttctcgttttcattttcttagatgacttcttgtctgagacagaaaaatttcctactacagcagtgcagtccagaggttaagatgtattagaattatacaatatcagtttaaaaatctgtatgcataaagaatgcaccactcaacttttttattcataagctaatatttttttaaagttacattaagattttttctcttttgcagctacatttgaaagtgatagaataaagagattttaatgagttatcactttttcagctgatatattcattttaatggcttttttgaaagttcctttttcatgaacacacccgagaaatcttaaatagacactttgcaatatttaagaacctaatgctgtttaattttggtacagcttccacattgcatgttcactttagtatttgcaatttgatatatttcatggtggcaaaatattagctctgttttgggacattttaaaatagaactatccttgttcgatagcataggaaaatgttctggtgattgtcagggtctcctaatatttatctcaattcttttataagtctatggaaattatttaattattttaaaacgtacacacttttcttgtaaatatgtcacatctgagttcaaaaaaattactttgaataccttaatatttgctgcatttttttccgtatatataacatgtcttctttcagaatgggaatatatgtgtgcctcccaacatttactgttaaagtgtgttatctttatatgtcaaactggttgaacactgtaatgagaataaactgcacagagtttattctgacttatttctcattttgtttggttcagcccttgtgtgatgaagtaaatacaatgattaggggtgtgtttggttaattgacttcagtttacatatttaaggacagagtaattatttggtcatctttgcaagaataagaaacttcagatctgtgaattcttaatgcatccctgcatgtgaaattatagaaggaaaaatgatttttttttgataggggaaagaacttgcttatttttcttaattaaaaaacatgttctcaaaagcagaattatcatatgttagcctcagagcatcgtgtggatcatctgggctgctcacagtgctccatgattatttagacggcatgatgtaaggcggaaagcagagggcatcttaatctccgggtgggcagttgagatgcactcaaaaaactatgtcgggtgttagaggctgctccttgcaaacgttccctattggtgataaatattccacgtctgttgcggtgaacaccatatacagggcctagtgcagtgcttggtgcacttggtaaagcttaaatacttctccagtgaggacaaggcattactgtagaatgtgtgaacttcccacattagagaaaagtgtatacctatttgttagataaattgtacttttgaatttctggaatattctttccttaaagcaacttgccttcaatgattcgagataccttcttttgcttgttgtgtctaatccattgtcagatcctgctgcttttccctggcatgttcataccttgttctctgaaattcagccgggaatgactttgaaccagtatgtctgctcacctattcatgtcctgttggggctctcctggactaccctattcctgtcattgtgcagagtaggtatcaaagtagacatcttcatctgttgccttttcctgaaaagctgaatgacgacttaaagatcagctaggccaagcccccaccatcaatgctaactgagataaattgagaccccagaaaggaggaggatttgcctggcccatggggcacgttagcaacgaagctgtaactgttggcttctcactgtacttgggagcatcattaggatctgtgcccagggtgtagctagagtaatccagccaaatataccaggttgcttcctaataacctatggcattccgcacctcctctccaaaacacataggcttagtgttctttttttttttctcagtctttttctgaaggccatttgttgtgtgaaatggctttcttcatcttagaccttcagatctctgttgaatcaagtgacttgtgaatgtctagccatgcaacagcagctcacgtacttcctgtgtgtgttctaatatgctgctgctacaaatggatggaatacattgtcctagaatgcaaggaccttgaggtttgtgtctgcgtttcacctgttaggttttctgtagttctgttagacgatggatatgtttatgtttgatacccctttattgcagcatgttcagcactttcaaaaaggagagcatttagtatttggttctatttaggaagggcttttaattatttccaagaacttatctaggtttagcaaatgaagctttaatttttttagtatgtcctacctatttttctgaaatattattttcttaccaaaagtgccattgcgtgtgtaagccatgttttcttgttcacgccagccatgggaggtgataatagcctgggtaacaatttcagtcatacttgtccaggagcctgcttccttgaaagtgactgatgttccggtgttcctttctttcccattgggtcttggacacctgattgttaccatggtgtttgtccactgctgctatggtcttgttgatgctgctccaaatatgtagctgtgttttctggatacataatttttatttaaagcttattcctggacacattttgtccatttttgaaaagatctaaactaatttgactagtagaattaggctaacaatacatggttcaaggaaaaatactgccttttgtaataaaagtttcttcttgcctagtgtctcattggtctgaatataatggctgtcttagacccggcatcctggcgcctgtcttcaactctagttctgccgtatgtgactttaggcaagtgtgtgtgtttcggaacttcattttctacattatataaaatggaattggataaaagctacatctgtcttggtaattattattattaactgatgcaactttttttcctttgaaaagtattttttttattatttaagttttagggtacatgtgcacaatgtgcaggttagttacatatgtatacatgtgccatgctggtgtgctgcacccattaactcgtcatttagcattaggtatatctcctaatgctatccctcccccctccccccaccccccaacagtccccagagtgtgatgttccccttcctgtgtccatgtgttctcattgttcaattcccatctatgagtgagaacatgcggtgtttggttttttgtccttgcgatagtttactgagaatgatgatttccaatttcatccatgtccctacaaaggacatgaactcatcattttttatggctgcatagtattccatggtgtatatgtgccacattttcttaatccagtcgatcattgttggacatttgggaaaagtatttttaatgtttttatcctaaacccaaaataagaagggaaagctgtaaacatttttgctttaacaaaaaggaaatccctttcttagcttttctttcacttctagttgcagttcaggaattttctgtaagtggtgcttgtacctttatcaaaagttctgttaacagttggtgaggcaagaaatatttgtatcaaaaatgcaaagatatgacagcttaataccagatctcagtgttcagaagtttagtccatataggatttgtgtatgttatctattttttaaatgattaaattgtatgttttaaacctcaagtaagacacatgttgaaaatatggctgaattgaggctagcatttacagttttgattgatgaaatctgtattttttgatacatttaatagtgccttactgtggtatattcatgtggtaatagcgccaccttctggttatatcattgctaaatttaaaatttggaaatttggagtctgtttattgcctccatcgtagaaaattagataagatatgtgattgcctaggatagttttgaaattaatataaaattcaaactaacatttacaaattataaattttttatttagagatgattgtaggttcacatatagttgtaagaaataaaactttccaaactttcaaaatggggaatatttagtatttggtcctatttggaaagagctttaattatttccaagaacttacctgggtttagaaaatgaagttttggttttttaattatgtcctacctgtcaatttctgtttctgtaagaaataatgtagacccacacgcctgtagtcccagctattcaggaagctgaggcaattggaacacttgagcttaggggtttgagatcagcctgggcagaataatgagacaccatctcaaaaaaaaaaaaagaaaagaaaaagatattgtgtaccctttactcagtttccccccaacagcatcttgaaaaactaatacaatattataaccaagatactgacactgatacagtcaagatgcagaacagttccatcatcacaaaggcccctctttgttgttctttttatagtcacatccatctcctattctgcaggtttggaagcagacttagccacttgtccagagtcagattaggcttgaaatgtatctttctgataccaaagtttgggctcttaacacactacttctactgtctcagtagaagtcttgaaaacttctcttttaaaatagtacttccagattactaaatgagttgaattcagtctgttttcaacatttctagaaccatactatttcaaatgacatattatttatacatacctttaaatttaacatttgagaatcaatcataggtacgtatcaaattacaacttccctgaaagatttcaagccctgacatttgataaataaggttaccagaataaatagtaagtaacagattgaaatagctttaagatgctggattcttgctttggaaacagctatagggcctggttataaagataatcacttggtataggctaacaggttttttccatgtggagaagctttgacctgatggagttgggtcaattggtgtcttcagtgtacgacatgcagcacacaggagacctaagaagacgacaaagatgtccacgaggaatctgccgaaagaaaatataaagtaatatgtgataaaatctagcatggaaaactacgcatcagagactgagatggcccatgggtgatggtgtgggtaagataagtgttgtgatggagagggcctttggggggtcccatgagagaaaaaggtacttctaagtaaaagccatgtgactttataaatttctaaatgttgattcaggggtcctaagtgatggagaaagtttacattgttctcttaaggctccattgcctctttccctcccgaactgtggtatgtatacctctaatgcacgttttctttagtggggaggaaaggaggggctgtggagaactttccatggtcaggaacttacatcagccttttttttttttttttttttgcctgtctttggtaccttatcttcatgttatgaatgtaacctattccctgtggaaacatttattattatttccaaatagggcctttggtcccaatggcgtctgtttctttttgacttctacatacgtcatgctcacggtcttggttcgtattgtcactcatgccattttttcttcccatttgctttttgcctgtctagtttgaaggtggaagattttccgatgaatcagatatggcaagtgaaaggaagtgaagaattaagggtaatgacaaggttttcagcccgaacaactagaagccatgaactgaggtagcaaagattgcaggtagagcaggtttgatggaaaagatcatgattgcagtattggttgcagtattgagtgttagggttgacatgtcagacatccaagtagaaatggcaggcaggcagttggatatgcaaatttggaattgagagaaatcattattggaaataaaaatgtgggagtcttcaaagtattcggtgctattgaaggctttgaaactggatgagatcatctttagagagaatgaagatgaaagaagaaaagagaaccatggaatgagccctggggcgctccaatattaagagctttggaagaagaggaggaagtagccatgatgaatgagaaggtgtgaccaccacatcaacaggatatcaagagtacgttgtgtcttagaagccaagtgaagaaaatgaagtgaggaggagatcggatgtttcaaattctgctcgcaggtcaagttaagaggcagcctgagaaatgccctttgtgtttggcaacgtggacagtacagatgtcattggtgatcttgccagggcctgttctgatggagtggtggggacaaatagaactctttttgaggcattttgctgcaagaggactggagaaaggtgacggttgctagtagcaaaagtagtcttttcttcttaagacagtggcttggccagacacggtggttcacgcctgtaatcccagttttggaggtctaggtgggagaatagcttgaatctaggagttcaagaccatcctgggcaacatggcaaaatcccatttctacaaaaaatacaaaaattagcagggtgtggtggcgtgcatctgtagtcccagctacttgggaggctgaggcgggaggatcacctgagcctggggaggttgaggccacagtgagctgtgattgtgccactgcactctagcctgggtgatagagtgagtcactgtctcaaaaaacaaacagaaaacaataacaaaagatggtggcttatttgttgatgaaatgacccagtaggaaaagaaagattgatgatgtagaagagtacagaattgttggaacaagtccttgaggaggtgagatgagatggaagctagggcacaagttggcttgacttcttcaaatgcacaggtgtttatctggggtaggaaggcacagtatgtggtgcagccactggttaagtgggtagacgtggaggggtaagtctctgaaagtctctgccttagtctcagtaaactaggaaacaaaattcgcaactgcaagtaaggtggggaaaggtgtgaaaggcatgagagaatagatgtctaggattggggagaaggaatggactagggacatttaggatattctgagcagcactgaaaacccactgagctctgtgtgcatgaatgacagtgttcaataactgataactgtagtcatttttgtcacgctcctgacttcagtggaaaagcctctagtgcaggcatgtccaatcttttggcttccctgggccccagtggaagaagaagaattgtcttgggtcatacatgaaatacactaacattaatgatagctgatgagctaaaaaaaaaaaaatcgcaaaaaaatctcataatgtttttaagaaagtttacaaatctgtgttgggccgcattcaaagccgtcctgggccacatgcggcccgtgggctgtgggttggacaagcttgctctagtggttccccatgctgctggcttttgggctgagaaatattttatcaggttaaagaagtatccaactattcatattttgttgagtttttttcttaagaatggtgattgaattttgttaaatatcttcaatatgtctggaaataatatttttatccctctttaatttggtgaaagctgttaatccagttctcaatatttaaccatcattacatttctggaataaatcccatttggtcaagatatgttattttaaaaatctgctagattttgtttgctattagggatttttgcataaatataaatgatactggtctgcatttttcttttgtgtagctctagtctttgtaggttttgtggtgttttactagcttcatagaaaatacttgaaaggtttttttttttttttaaattttaagctgttacagaacagcttcaaaagaattggtattctaggctgggcacagtggctcacgcctgtaatcctagcattttgggaggccaaggcatttctcaggctggatcacctgaggtcaggagttcgagactagcctgctcaacatggcgaaaccctgtctctactaaaaatacaaaaaattagccaggcatggtggcaggtgcctgtaatcccagctacgtgggaggctgaggcaggagaattgcttgaacccgggaggcagaggttgcagtaagctgagatggtgccactacactccagcctgggtgacaagagtgaaactccatctcaaaaaaaaaaagttggtattctatactccttaaagagttagtggacttccgctaggaaatcctctcaacctggtgctcttttgagggtgtgccattgacaacctcctcatttcctctatgagaattgatatgcttaggctttctatcttttctggggtcagttttgatcaattatatccatagaaaattatacattttatctaagtttttaaatgtatttgcatggagctgagcacaatatacagaacttatttaaggagaaatgcattactgcagatcccactttgttcttcaactcaaaatatccaatgctgtgaagattgcttatatgacaagttgtgctatcttctgatttttacctggaagcaatgtgatcacaaacataccaccagattaaagtggtagtactcaggtaacaggaggccatccaaattaaatttaggagtctttaaaaaattatcaaaattcaatgtaaaaagtataatttcttgtaaagaacatgtggttcctggagaacatgtctaggttccccatttgagaaacactgtcctagtgaatagcatttgaacttatcctacgttcattgcccttccatgtccaccttctcacacagtgcttctgtgtatatctggcactccagttcaactgaacctttccatctccctgtttcccaccttcctgctattatttgtgctgtttcttctgcctggaacgccactttcctaataattgttgcctgttaattccacaccttcaattctcaccaaaatgccactttctccttgaagtgttggaattgctttctcatctttcccatcacacaagccttggtgaccccaaaacactggattcccttctcccttcccatgccaacgttcagtacagttcattggaacagaattcactttaagctttgctcttaaactttggcctagtaaatagcttttctcctttcactgtagtcccttttaaaagccaaagacttcaaaatttggaagagattagaaaatgaaaacagtccaaatccagctctttgttgattagattggcccaaaggggacataaataagacaagcaaaatgcaaacgaattctagtagtaatggccactgtataagcactgcaccagtgcagtggtttcagcagctggtcctgggcccctttcatacttaatgtatgtttggttttacgtttaattttaggtgctaacaattacctcatgggcccctcttaagtctgctgtgagagaaatcctaatcccctaaggcagtggttctcaaagtgtggtccctgagaccaacaatgtcaacattactgagaacttgctagaagtgcaaattattgctcccatcccagtcctactgaatcagattttctgggattagggcaggcaatctgttttaacaaggcctacaggtgattctgacatccattaaagtttgagatcggctgggcatggttgctcacacctataatcgcagcactttgggaagccgaggcgagaagattgcttgagttcaggagttcgagatgagcctaggtaacatagtgagacatcgtctctactaaaattcaaaaagaattaggcatggtggtgtgtgtctgtagtcccagcgacttgcattgcgtgctgaggtgagaggatcgcttgagcctgggagatcaaggctgcagtgagccctgagtgtcactgcactccagcctgggcaacagagtgagaccctgtctcaaaaaaaaaaaaagtttgagatcctctgccctaagatatccattatccattacatgtaaggaattaacttctctcctatgcgaccaggatggcctttgttacatagtatccttagagctgagaaaacagttacctaaatcactgcctgtgttctgtggttcagataaagaacccactgaaagaggctgcgtgcatgaaccggctctgaccaactgaacatgaaacacaggttggaataaaaatatttttttatttgatggtcttccatatagacagaatttcatcaggaatcaaagaaaggtggttaccacatataaacaccaactaaactctgagctttctggcaactgaaaaggaaaacgttgagttctagaatagcctttgttgtttgatgcaactaaccatatcaccttttagagctagagaaccgtccaggtattaaatgtttggaatcttttatgatgtggattgtgctacaggggacactgagtaacgtggggaccaatgtccttcacagtttttgtagaaaaatttttaggtggtcttccatattcacccttagaagcaaggacaacccttcgagtgtaattccgtggagatgatttccttctgactcaaacacccatagcttccctgtctgtccatttcgtgagctcctcattaccttccatgactcacttttccatgtgacacggagcctccctggcttccactgctgatactgaccattcctttctttgttctctatgctgccgtggacacagagccaccatcgctgttaactgtactagagtctttactttttttttcttttgtgagcctaagccttcctcaagacaagaatctttgttttgtttaaaaaaagaatagccttaatgtttttttttctgattttaaagtgaacaccctattgtagaacatccatgtaagcaaaaagaaaaaaaataaaaatgatttgtaatttctccaagaaatgacctgtgttgacatttcagtgattatacttccaagtcttttactaaatgtgtacgtaaatagctttatttttgtgtgtgtaaaaatctgtagcctctgtaaacaagccaaatgtcatatacaccccacacaaaacaataaaagcaaaaatcaccaga

SEQ ID NO: 166481 - DNA, 3221 bp, Homo sapiens
  Payload ID: 12782
  Gene Symbol: PLEKHA1
  Gene Name: pleckstrin homology domain containing, family A (phosphoinositide binding specific) member 1
  Uniprot ID: Q9HB21
  ENST ID: ENST00000392799
  CDS Start-End: 1466-2680
attttacattgagtcagtgatccatttgagttagtttttttcctcatagacagtcgattattccagtcttgtttgttgaaaagactgtcctttctctacaaaattgccttggcaccttggttgaaaattaactgttctctcttcctgtttactagaagaatttttaaaagaccggtgttatttttttccttaagggattggtagaattcacatatgaactatttctaggctttgacttttctttttggggttttagtagtgaattcatttgctttagtagaaataggtacttcagattttcttttttgtcttgtgtcagttttttcaaagttgtgttttttcaaagaatttgtttacttctaaattgtcaaatttgtttgcatgaattcttattacccacttaatgtctatagggtgtgtagtgtgtacttcctaatattggtgatttgctttctctctttcacttggttcacatagctatagatttatcaatttgatcttttcaagaaacagcttttggttttaatttgtattgtttgttttcaattttattagtttcttttctgatatttattattccctttctattttgggtttactttacctttttctagctttttagggtggagtttatgccattcatattagaccttttctaataaaaatatcttaagactataaattttctttcaaaatcacctttagctgcatactacaaattttgacttttaaaatttttcatttagttaagaatgttttctgatttcccttttgatttcttcttttacccatattttatttaaaagtgtattttaattttcaaatagctattcaggtgataatttcatctatagcactaaaaaccaatgaaaattctgacatatatttgtttataaaattccttgaatgctctgtatattgtatttatatggtatatacctgagggcttttctgtagcataaaagaacagttcattatttttcactgttctctgggttgaaggagctcatttgggcagctccatcttgggggtctctctcttgtagttgcagtcagatggcagctggaatgagagtcatctgaaggcttgactgggctggatggtcaagatagcctcttcactcactctgctagaatgactgggacagctgggtgtgggctggtcacctctctccgcacagcttcttcatgggactagttggctttcacacaacggggcagtctgaaggcagtcagatttcctacatgacagctgacttctagagtgagcattctaagacattgagttttttcaagtagataatttatttgctctactctttcaaactaagaagtaagataaatgtatggggccagtcattgtagaaactgcctgtctggctcttgctgattgaattcctttggtgcagtttagcatgttcctctgtgttctgcatctcctgtagtgtaatgttcaagctcagaaatgccttatgtggatcgtcagaatcgcatttgtggttttctagacattgaagaaaatgaaaacagtgggaaatttcttcgaaggtacttcatactggataccagagaagatagtttcgtgtggtacatggataatccacagaacctaccttctggatcatcacgtgttggagccattaagcttacctacatttcaaaggttagcgatgctactaagctaaggccaaaggcggagttctgttttgttatgaatgcaggaatgaggaagtacttcctacaagccaatgatcagcaggacctagtggaatgggtaaatgtgttaaacaaagctataaaaattacagtaccaaagcagtcagactcacagcctaattctgataacctaagtcgccatggtgaatgtgggaaaaagcaagtgtcttacagaactgatattgttggtggcgtacccatcattactcccactcagaaagaagaagtaaatgaatgtggtgaaagtattgacagaaataatctgaaacggtcacaaagccatcttccttactttactcctaaaccacctcaagatagtgcggttatcaaagctggatattgtgtaaaacaaggagcagtgatgaaaaactggaagagaagatattttcaattggatgaaaacacaataggctacttcaaatctgaactggaaaaggaacctcttcgtgtaataccacttaaagaggttcataaagtccaggaatgtaagcaaagcgacataatgatgagggacaacctctttgaaattgtaacaacgtctcgaactttctatgtgcaggctgatagccctgaagagatgcacagttggattaaagcagtctctggcgccattgtagcacagcggggtcccggcagatctgcgtcttctgagcatccccccggtccttcagaatccaaacacgctttccgtcctaccaacgcagccaccgccacctcacattccacagcctctcgcagcaactctttggtctcaacctttaccatggagaagcgaggattttacgagtctcttgccaaggtcaagccagggaacttcaaggtccagactgtctctccaagagaaccagcttccaaagtgactgaacaagctctgttaagacctcaaagtaaaaatggccctcaggaaaaagattgtgacctagtagacttggacgatgcgagccttccggtcagtgacgtgtgaggcagaagcgcacggagcctgcctgcctctgccgtcctcagtttcctttcatgaggcttctagccaaagatgataaagggggaaatggtttttagtgcgtatattatactgcctcttaggtgtactctttataagctggtaaaccaagaatctagggagtggccaaactaaatataatttctttaaaaaagaaagaaaaaggaaaaatccaaaatatctcagtatcatctgtctgaagcattgtgtgttctcattcgggtggtaacaatgtatgtgtaatatttttttcttagtgattttgacagtttaaatgtttaacaacttaaagcattaaaaatgcttattaataactttggtcatttaaaaaatgctacaatgacttcctattaaaggttcaatatttacacattcttattggttgatattaccacatgaaatattgccagaccaagatacctaaactcatgatgtctgtggtgctgtaaaatttatactaaaatgtggactattttgaaattataaccatttttgatgccctgaa

SEQ ID NO: 166482 - DNA, 3704 bp, Homo sapiens
  Payload ID: 12782
  Gene Symbol: PLEKHA1
  Gene Name: pleckstrin homology domain containing, family A (phosphoinositide binding specific) member 1
  Uniprot ID: Q9HB21
  ENST ID: ENST00000433307
  CDS Start-End: 74-1288
gaaatactttcctgtttcatagggagcttactgttaatatttttattttacagtgtaatgttcaagctcagaaatgccttatgtggatcgtcagaatcgcatttgtggttttctagacattgaagaaaatgaaaacagtgggaaatttcttcgaaggtacttcatactggataccagagaagatagtttcgtgtggtacatggataatccacagaacctaccttctggatcatcacgtgttggagccattaagcttacctacatttcaaaggttagcgatgctactaagctaaggccaaaggcggagttctgttttgttatgaatgcaggaatgaggaagtacttcctacaagccaatgatcagcaggacctagtggaatgggtaaatgtgttaaacaaagctataaaaattacagtaccaaagcagtcagactcacagcctaattctgataacctaagtcgccatggtgaatgtgggaaaaagcaagtgtcttacagaactgatattgttggtggcgtacccatcattactcccactcagaaagaagaagtaaatgaatgtggtgaaagtattgacagaaataatctgaaacggtcacaaagccatcttccttactttactcctaaaccacctcaagatagtgcggttatcaaagctggatattgtgtaaaacaaggagcagtgatgaaaaactggaagagaagatattttcaattggatgaaaacacaataggctacttcaaatctgaactggaaaaggaacctcttcgtgtaataccacttaaagaggttcataaagtccaggaatgtaagcaaagcgacataatgatgagggacaacctctttgaaattgtaacaacgtctcgaactttctatgtgcaggctgatagccctgaagagatgcacagttggattaaagcagtctctggcgccattgtagcacagcggggtcccggcagatctgcgtcttctgagcatccccccggtccttcagaatccaaacacgctttccgtcctaccaacgcagccaccgccacctcacattccacagcctctcgcagcaactctttggtctcaacctttaccatggagaagcgaggattttacgagtctcttgccaaggtcaagccagggaacttcaaggtccagactgtctctccaagagaaccagcttccaaagtgactgaacaagctctgttaagacctcaaagtaaaaatggccctcaggaaaaagattgtgacctagtagacttggacgatgcgagccttccggtcagtgacgtgtgaggcagaagcgcacggagcctgcctgcctctgccgtcctcagtttcctttcatgaggcttctagccaaagatgataaagggggaaatggtttttagtgcgtatattatactgcctcttaggtgtactctttataagctggtaaaccaagaatctagggagtggccaaactaaatataatttctttaaaaaagaaagaaaaaggaaaaatccaaaatatctcagtatcatctgtctgaagcattgtgtgttctcattcgggtggtaacaatgtatgtgtaatatttttttcttagtgattttgacagtttaaatgtttaacaacttaaagcattaaaaatgcttattaataactttggtcatttaaaaaatgctacaatgacttcctattaaaggttcaatatttacacattcttattggttgatattaccacatgaaatattgccagaccaagatacctaaactcatgatgtctgtggtgctgtaaaatttatactaaaatgtggactattttgaaattataaccatttttgatgccctgaatcttgaggtgacttattttgcatagaggatatggatagaccaacagtaagggttgtgggttataccggcatagagaaaagaagaaaactagaattgaaacaactgtgtcttagacatttgtttgaaaaagcttcatcaggccttggagcagtcactgctttattccgcaaaaattatttggtaggaaatttttgggagatctgattttcttatccaagttttgtaaatagttgttatttctatatttggattggtgaaagacctcaagtttatatgtaaagacataactgcccttagtcatgaaattgttgtgacctctactttttgtcactaatagcctacattcaagtgcctgtgttttttcatcttgtttaggaatgttttgagattaatgtgcttaaaagtcctacgtgactgattttaaacattgtgataaaattaattttcagtagaatagttgaatgtgttaagataggattttatgttagagataccagaatgctggtattctactacttgtgcaatatatatgttttaaaaaacaaatttgagaatacatttaatcatagggatatagatataagcacctctctaaagaatctttagtttccgacgttgaattatagaccagtttgagtaagtactgctttttttttttggagacgggctctcgctctgttgctcaggctggagtgcagtggcgtgatctcagctcactacagcctccacctcgtgggttcaaacagttgtgctgcctcagcttcccgagtagctaggattacaggtgcatgccaccacacctggctaatttttgtattttagtagagatggggtttcaccatgttggccaggctcgtctcgaactcctgacttcaggtgatccacccatctcagcctcccaaagtgctgggattacaggcgtgagccaccatgcccggcccataagtaccgtttttgaggttcagtcttaaacatttgctttaagaaaacagtcttgaatttcacatgctgctatttttatattttgccattttacagtactgttttgttttgaattcatgcatatcattgaaaatttctcgttttcattttcttagatgacttcttgtctgagacagaaaaatttcctactacagcagtgcagtccagaggttaagatgtattagaattatacaatatcagtttaaaaatctgtatgcataaagaatgcaccactcaacttttttattcataagctaatatttttttaaagttacattaagattttttctcttttgcagctacatttgaaagtgatagaataaagagattttaatgagttatcactttttcagctgatatattcattttaatggcttttttgaaagttcctttttcatgaacacacccgagaaatcttaaatagacactttgcaatatttaagaacctaatgctgtttaattttggtacagcttccacattgcatgttcactttagtatttgcaatttgatatatttcatggtggcaaaatattagctctgttttgggacattttaaaatagaactatccttgttcgatagcataggaaaatgttctggtgattgtcagggtctcctaatatttatctcaattcttttataagtctatggaaattatttaattattttaaaacgtacacacttttcttgtaaatatgtcacatctgagttcaaaaaaattactttgaataccttaatatttgctgcatttttttccgtatatataacatgtcttctttcagaatgggaatatatgtgtgcctcccaacatttactgttaaagtgtgttatctttatatgtcaaactggttgaacactgtaatgagaataaactgcacagagtttattctgactt

SEQ ID NO: 166483 - DNA, 617 bp, Homo sapiens
  Payload ID: 12782
  Gene Symbol: PLEKHA1
  Gene Name: pleckstrin homology domain containing, family A (phosphoinositide binding specific) member 1
  ENST ID: ENST00000463663
  CDS Start-End: 219-617
gcgctggagcaggggtggtggacggggccaggcgcgaggtggcggcggctgcggggctgccgggctgctggagcgcggttcccgctgtggcgagcggggaggcgtccgcagaggggcggtgggtgctgtctggctcttgctgattgaattcctttggtgcagtttagcatgttcctctgtgttctgcatctcctgtagtgtaatgttcaagctcagaaatgccttatgtggatcgtcagaatcgcatttgtggttttctagacattgaagaaaatgaaaacagtgggaaatttcttcgaaggtacttcatactggataccagagaagatagtttcgtgtggtacatggataatccacagaacctaccttctggatcatcacgtgttggagccattaagcttacctacatttcaaaggttagcgatgctactaagctaaggccaaaggcggagttctgttttgttatgaatgcaggaatgaggaagtacttcctacaagccaatgatcagcaggacctagtggaatgggtaaatgtgttaaacaaagctataaaaattacagtaccaaagcagtcagactcacagcctaattctgataacctaagtcgccatggtgaa

SEQ ID NO: 166484 - DNA, 565 bp, Homo sapiens
  Payload ID: 12783
  Gene Symbol: PLEKHA2
  Gene Name: pleckstrin homology domain containing, family A (phosphoinositide binding specific) member 2
  ENST ID: ENST00000519640
  CDS Start-End: 221-565
gcagacccagaaatccctggagcgcggcggacccggcggccggaggggcgaccccgcccgatgtaacgcgccccgcccgagccccggcccctgcacggggggcagcgaaacttctctgcgggttctggcgctggggcaccgaccccgcaacgactgcccgggctgcgggaggggaggagagcagagaacgtccccagggtgatgtgagcagagcccaggaatgccttatgtggatcggcagaaccgaatctgtgggtttctggacatcgaggagcatgagaacagcggcaagtttctgcggaggtacttcattctggacacccaggctaactgcctcctctggtatatggacaacccccagaatctggcaatgggggcaggagctgttggagctttgcagctgacctacatctcgaaggtgagcatagctaccccaaaacagaaaccaaaaactccattttgctttgttatcaatgccctgtctcagagatatttccttcaagccaatgatcagaaagatatgaaggactgggttgaagccctgaaccaagccagcaagatcacc

SEQ ID NO: 166485 - DNA, 2127 bp, Homo sapiens
  Payload ID: 12783
  Gene Symbol: PLEKHA2
  Gene Name: pleckstrin homology domain containing, family A (phosphoinositide binding specific) member 2
  ENST ID: ENST00000521746
  CDS Start-End: 235-984
aatgcgaaacgtaattaacccggaaaaaagagccgagggacgggagagaaggagggggcactgggggagaccagagcgaggggagcgagaggcgcggagagtttggcaggcagacccagaaatccctggagcgcggcggacccggcggccggaggggcgaccccgcccgatgtaacgcgccccgcccgagccccggcccctgcacggggggggtgatgtgagcagagcccaggaatgccttatgtggatcggcagaaccgaatctgtgggtttctggacatcgaggagcatgagaacagcggcaagtttctgcggaggtacttcattctggacacccaggctaactgcctcctctggtatatggacaacccccagaatctggcaatgggggcaggagctgttggagctttgcagctgacctacatctcgaaggtgagcatagctaccccaaaacagaaaccaaaaactccattttgctttgttatcaatgccctgtctcagagatatttccttcaagccaatgatcagaaagatatgaaggactgggttgaagccctgaaccaagccagcaagatcaccgttcccaaaggtgggggcctacccatgaccactgaagttctcaagagcttagcagctcctccagccctggagaagaagccacaggtggcctacaagacggagatcattggaggggtggtggtccacacacccatcagccagaacggtggggatgggcaggaagggagtgagcccgggtcccacaccatccttcgaaggtctcagagttacatccccacgtcaggctgccgtgcttccactgggcctcccctcattaagagtggttactgcgtgaagcaagggaatgtgcggaagagctggaaacgtcgcttctttgcacttgatgactttaccatctgctacttcaagtgtgagcaggagttcgagatcagcctggccaacatggtgaaaccccgcctctactaaaaaatatgcaaaattagccgggcgtggtggtgcaggcctgtaatcccagctactcagaggctgaggcaggagattcacttgaacccaggaggtggaggttgcagtgagccaagatcgcgccattgcactccagtcagggcaacaagagtgaaactccgtctcaaaatataaaagaaaattgagtgtcccacccaaattttagggcgtacctccttccatttgataagaagatgctatttccagtgtccctgggagaattcttccatccagtttatatggtgaattgccaccagcgttccctaaaggaagagagaacttagcttatttctgtctgtgacttttatcagctagatcagttaattgtatttttaaattaaaaattagtaactagaggaagagactaagagaactatttttacctgagtaaatgctctcctcttcttgtgtccaaatctaatgcagaggtgaaaacacttgatgagaaaatcctttgtggcttgaggggaatcatgtttctttcaggacgtgttgtttccctgaagtctatgtcacactgagaactttttctgactgcactgctttggagctattcatttaaattgagtttggcctagttttcctggtataaaacaggaaatctacattgttccctctttctctcccttccatcccttcccctgcctttcctatacacgctggtgtgcttttgccctcagaaattcttggtttgggagttatgtatttttgagtgatcgaggttatgacatacttggagcggcatgatttcaagaagccattccaaattcttatagctccttagctctggttttactctcgtattttccccaagaaaattttttggctattcaaagaaagcacaaaatatgtgatgtggaactcatgaaaatagggacttttgatatctctttaaatattccctgactcacggaaaagatgtcctcttttggtgtatacattgtgaaaatctacccatttatctctctctctctcttttcttttaaataaattatctgataaggccggcaaggtggctcacgcctgtaatcccagcactttgggaggccgaggcgagcggatcacgaggtcaggagatcgagaccgcggtgaaaccccgtctctact

SEQ ID NO: 166486 - DNA, 5582 bp, Homo sapiens
  Payload ID: 12783
  Gene Symbol: PLEKHA2
  Gene Name: pleckstrin homology domain containing, family A (phosphoinositide binding specific) member 2
  ENST ID: ENST00000617275
  CDS Start-End: 179-1456
ggcactgggggagaccagagcgaggggagcgagaggcgcggagagtttggcaggcagacccagaaatccctggagcgcggcggacccggcggccggaggggcgaccccgcccgatgtaacgcgccccgcccgagccccggcccctgcacggggggggtgatgtgagcagagcccaggaatgccttatgtggatcggcagaaccgaatctgtgggtttctggacatcgaggagcatgagaacagcggcaagtttctgcggaggtacttcattctggacacccaggctaactgcctcctctggtatatggacaacccccagaatctggcaatgggggcaggagctgttggagctttgcagctgacctacatctcgaaggtgagcatagctaccccaaaacagaaaccaaaaactccattttgctttgttatcaatgccctgtctcagagatatttccttcaagccaatgatcagaaagatatgaaggactgggttgaagccctgaaccaagccagcaagatcaccgttcccaaaggtgggggcctacccatgaccactgaagttctcaagagcttagcagctcctccagccctggagaagaagccacaggtggcctacaagacggagatcattggaggggtggtggtccacacacccatcagccagaacggtggggatgggcaggaagggagtgagcccgggtcccacaccatccttcgaaggtctcagagttacatccccacgtcaggctgccgtgcttccactgggcctcccctcattaagagtggttactgcgtgaagcaagggaatgtgcggaagagctggaaacgtcgcttctttgcacttgatgactttaccatctgctacttcaagtgtgagcaggaccgagaaccactgcgcaccatatttcttaaggatgttctgaagacccatgaatgtctggtcaagtctggtgatctcttaatgagggacaacctgtttgaaataataacaagctccaggaccttctacgtacaggcagacagtccagaagacatgcacagctggattaaggagattggcgcagctgtccaggccctcaagtgccaccccagagaaacgtccttttctagatccatttctttgacccgacctggaagctccagcctttcaagtgggcccaactctatcctgtgcagggggcggccacctttggaggaaaagaaagccctctgcaaagccccctctgtggcctcctcctggcagccctggacacctgtcccccaggctggggagaagctgcttccacctggagacacttcagaggactccttgttcacgcctcgtcctggggagggcagcgctcctggggtgctgcccagctcccggataaggcacagatcggagccccagcaccccaaggagaagccgtttatgttcaaccttgatgatgaaaacatacggacctctgatgtgtgatggagcacagtgccatgggagggagggagggagggaggacttgagagaaggaggctgtgactcagtttctctaccttgttggagggtagtcagaggcctttatgtcactcatattcctgtggatgctctttgggagggaggggcccatccagctgggctgtgtgtgtgtgtgtgtgtgtgtgtgtgtgtgtgtgtaatatcaacgcagtgtatttaatttggggaagtcactaggttagaactgtaggcatactcagtggagaggaagctacctattctattctaactattctgaggtcttcctggagagggattgttttagcagctcctctccagagggggctggaagtccagtttcaccaatgaccaagttttatttccttgtccttgttttagttttttcattttgttttcagtccaggtgcctcgcagctcttttggaatgggccagcattagtctaattttaagcgctatgtgttttgtacccttgcaaacttgctttctctttcttcttgctgttgccctttgaatgaagccttgtgtgcttgcatgatcagaccctgtaataggatgaatttccatgcacttaacatgaagagatacaaaaagaatctagagagagatatatatttttaatgaaatagaagcttggcatagaaacattgatttagatgttatgagttgctggccagagattcctcagataaaagagcctagaaaattgagttttgagcgggcatggtggctcacgcctgtaatgccagtagtttgggaggctgaggcgggtggatcacctgaggtcaggagttcgagatcagcctggccaacatggtgaaaccccgcctctactaaaaaatatgcaaaattagccgggcgtggtggtgcaggcctgtaatcccagctactcagaggctgaggcaggagattcacttgaacccaggaggtggaggttgcagtgagccaagatcgcgccattgcactccagtcagggcaacaagagtgaaactccgtctcaaaatataaaagaaaattgagtgtcccacccaaattttagggcgtacctccttccatttgataagaagatgctatttccagtgtccctgggagaattcttccatccagtttatatggtgaattgccaccagcgttccctaaaggaagagagaacttagcttatttctgtctgtgacttttatcagctagatcagttaattgtatttttaaattaaaaattagtaactagaggaagagactaagagaactatttttacctgagtaaatgctctcctcttcttgtgtccaaatctaatgcagaggtgaaaacacttgatgagaaaatcctttgtggcttgaggggaatcatgtttctttcaggacgtgttgtttccctgaagtctatgtcacactgagaactttttctgactgcactgctttggagctattcatttaaattgagtttggcctagttttcctggtataaaacaggaaatctacattgttccctctttctctcccttccatcccttcccctgcctttcctatacacgctggtgtgcttttgccctcagaaattcttggtttgggagttatgtatttttgagtgatcgaggttatgacatacttggagcggcatgatttcaagaagccattccaaattcttatagctccttagctctggttttactctcgtattttccccaagaaaattttttggctattcaaagaaagcacaaaatatgtgatgtggaactcatgaaaatagggacttttgatatctctttaaatattccctgactcacggaaaagatgtcctcttttggtgtatacattgtgaaaatctacccatttatctctctctctctcttttcttttaaataaattatctgataaggccggcaaggtggctcacgcctgtaatcccagcactttgggaggccgaggcgagcggatcacgaggtcaggagatcgagaccgcggtgaaaccccgtctctactaaaaatacgaaaaaaaaattagccgggcgcagtggcaggcgcctgtagtcccagctacttgggaggctgcggcaggagaatggtgtgaacctgggaggcggagcttgcagtgagccaagatcgcgccactgcactccagcctgggcgacagagcaagactccatctcaaaaaaaaaattatctgataggttactattgctaaattaattggccattataataagctgatttgtttcttattcagcaagatctcttttgagaatgtgacaaattaaacatacatagaatccatatggtattatcctgataaagggaaacgaggacactaagactgtcaaatggaaatcttcttgtcaattggcaaacacttgggaattccacattagagcattgcttgtttttaattttttttttttaatttttaaaagacagggtctcactctcttacccaggctagagtgcagtggtgtgatcatagttcatcataactttgaatctctgggcttaagcaatcctcccatgttagcttcccaagtagctaggactacagggttgtgctaccacgcctggctaatttttaatttttttttatctacagagcctggctatgttgcccaggctctctcaaactcctggcccaagtgatcctcctgccttggcctcctaaagtgttgggattacaggtgtgagccactgcacctagccagaacatcgttaatgtagttcaatatgagataaattattatcttcaatgaaacaagctctaaaagcattccattcctaaattgtatttcaaacttcctattttgttgatatttcttaacttctggccagttttggaccataatcttttaatgtgaaccaaagatggtacgtatttgaccaaagcagttagttttaaatgtataaaattgaaccaaatggaaaaaataggttggggatgcagtatagattagtgactaagtgcataggctctggagtaaatctgagtttttttttttttaaaggaactaaaaaatgtactgcattttctttgtggaataaaagccttgcctgagttgtgctattttcataaggcttttgaagtggtcttgacccactgtgtgtaacagtatttcaggtggtcctccccatggctgaataatgccatccattattctttaatttttatttttagaaacagtgtttcactctgtcacccaggctggagtgcagtggcctgatcatggctcactgcagcctggacctcctgggctcaagtgatcttcctgcctcacagcctcccaaagtactcagattataggtgtgagccaccacgcctggccaccatctattacttttgaaatcttcaaaagacttgcttactcaatgtcagctgatggttggtaaaaataatttggcctttagtgttaagtgagacatcataagggtattgaggtatacattatggagattgatgtcaggtcagaatattggagttatacatctatttctgagttgaatactcagctcccacgagaaagaaagtagttttaaggtccagcttcttagtctacttgaagcaaattttttttcttttatatttctgaatataaatatactcttatatgggctaaaaagaccccatgaataaatagcaggttcagtagttgaggagtggagtttagtaggtttgttttcagtataaattagataacatgtggaggtcacagcattttggaaattgagtgtccccaagtgagctttgtttataaactttcaaaatgtcggaagtggacaggtttgttaaatcttgtctgccagcacccttttcttcctttgttccttttcctctctgtgttattgcctgcggcagccagtccttcatactagatagagttcagataaagcaaacgtttggcaaaaacatactgtttgacctcctccccctctgcttatgaaggggtagcatgattctgtgttttaaagcagtgatgtttcagctgtgaaatgcactcgctgtaagctctaggctgagtgcatggaaactgttacgcttctcattttatgtgatctcctaattggtatgtagcaaaaattttctaaaactgttttgtggcttgttttgtaataaaaccatgtgaaatactg

SEQ ID NO: 166487 - DNA, 1748 bp, Homo sapiens
  Payload ID: 12783
  Gene Symbol: PLEKHA2
  Gene Name: pleckstrin homology domain containing, family A (phosphoinositide binding specific) member 2
  ENST ID: ENST00000616927
  CDS Start-End: 177-1304
agagaaggagggggcactgggggagaccagagcgaggggagcgagaggcgcggagagtttggcaggcagacccagaaatccctggagcgcggcggacccggcggccggaggggcgaccccgcccgatgtaacgcgccccgcccgagccccggcccctgcacggggggaatctggcaatgggggcaggagctgttggagctttgcagctgacctacatctcgaaggtgagcatagctaccccaaaacagaaaccaaaaactccattttgctttgttatcaatgccctgtctcagagatatttccttcaagccaatgatcagaaagatatgaaggactgggttgaagccctgaaccaagccagcaagatcaccgttcccaaaggtgggggcctacccatgaccactgaagttctcaagagcttagcagctcctccagccctggagaagaagccacaggtggcctacaagacggagatcattggaggggtggtggtccacacacccatcagccagaacggtggggatgggcaggaagggagtgagcccgggtcccacaccatccttcgaaggtctcagagttacatccccacgtcaggctgccgtgcttccactgggcctcccctcattaagagtggttactgcgtgaagcaagggaatgtgcggaagagctggaaacgtcgcttctttgcacttgatgactttaccatctgctacttcaagtgtgagcaggaccgagaaccactgcgcaccatatttcttaaggatgttctgaagacccatgaatgtctggtcaagtctggtgatctcttaatgagggacaacctgtttgaaataataacaagctccaggaccttctacgtacaggcagacagtccagaagacatgcacagctggattaaggagattggcgcagctgtccaggccctcaagtgccaccccagagaaacgtccttttctagatccatttctttgacccgacctggaagctccagcctttcaagtgggcccaactctatcctgtgcagggggcggccacctttggaggaaaagaaagccctctgcaaagccccctctgtggcctcctcctggcagccctggacacctgtcccccaggctggggagaagctgcttccacctggagacacttcagaggactccttgttcacgcctcgtcctggggagggcagcgctcctggggtgctgcccagctcccggataaggcacagatcggagccccagcaccccaaggagaagccgtttatgttcaaccttgatgatgaaaacatacggacctctgatgtgtgatggagcacagtgccatgggagggagggagggagggaggacttgagagaaggaggctgtgactcagtttctctaccttgttggagggtagtcagaggcctttatgtcactcatattcctgtggatgctctttgggagggaggggcccatccagctgggctgtgtgtgtgtgtgtgtgtgtgtgtgtgtgtgtgtgtaatatcaacgcagtgtatttaatttggggaagtcactaggttagaactgtaggcatactcagtggagaggaagctacctattctattctaactattctgaggtcttcctggagagggattgttttagcagctcctctccagagggggctggaagtccagtttcaccaatgaccaagttttatttccttgtccttgttttagttttttcattttgttttcagtccaggtgcctcgcagctcttttggaat

SEQ ID NO: 166488 - DNA, 3594 bp, Homo sapiens
  Payload ID: 12783
  Gene Symbol: PLEKHA2
  Gene Name: pleckstrin homology domain containing, family A (phosphoinositide binding specific) member 2
  ENST ID: ENST00000616834
  CDS Start-End: 291-1421
aaacttctctgcgggttctggcgctggggcaccgaccccgcaacgactgcccgggctgcgggaggggaggagagcagagaacgtccccaggcaagtcccttgggtacggattgggccatggagactcctctttcactcccccgactaccttattaaatgacaggcctagaaggctcccctagggactcctgtcctttcctctgggtgcagcctggacttcgggcttctggaactccagacagtgaaaaggactgccctaaaatgcagggtgatgtgagcagagcccaggaatgccttatgtggatcggcagaaccgaatctgtgggtttctggacatcgaggagcatgagaacagcggcaagtttctgcggaggtacttcattctggacacccaggctaactgcctcctctggtatatggacaacccccagaatctggcaatgggggcaggagctgttggagctttgcagctgacctacatctcgaaggttcccaaaggtgggggcctacccatgaccactgaagttctcaagagcttagcagctcctccagccctggagaagaagccacaggtggcctacaagacggagatcattggaggggtggtggtccacacacccatcagccagaacggtggggatgggcaggaagggagtgagcccgggtcccacaccatccttcgaaggtctcagagttacatccccacgtcaggctgccgtgcttccactgggcctcccctcattaagagtggttactgcgtgaagcaagggaatgtgcggaagagctggaaacgtcgcttctttgcacttgatgactttaccatctgctacttcaagtgtgagcaggaccgagaaccactgcgcaccatatttcttaaggatgttctgaagacccatgaatgtctggtcaagtctggtgatctcttaatgagggacaacctgtttgaaataataacaagctccaggaccttctacgtacaggcagacagtccagaagacatgcacagctggattaaggagattggcgcagctgtccaggccctcaagtgccaccccagagaaacgtccttttctagatccatttctttgacccgacctggaagctccagcctttcaagtgggcccaactctatcctgtgcagggggcggccacctttggaggaaaagaaagccctctgcaaagccccctctgtggcctcctcctggcagccctggacacctgtcccccaggctggggagaagctgcttccacctggagacacttcagaggactccttgttcacgcctcgtcctggggagggcagcgctcctggggtgctgcccagctcccggataaggcacagatcggagccccagcaccccaaggagaagccgtttatgttcaaccttgatgatgaaaacatacggacctctgatgtgtgatggagcacagtgccatgggagggagggagggagggaggacttgagagaaggaggctgtgactcagtttctctaccttgttggagggtagtcagaggcctttatgtcactcatattcctgtggatgctctttgggagggaggggcccatccagctgggctgtgtgtgtgtgtgtgtgtgtgtgtgtgtgtgtgtgtaatatcaacgcagtgtatttaatttggggaagtcactaggttagaactgtaggcatactcagtggagaggaagctacctattctattctaactattctgaggtcttcctggagagggattgttttagcagctcctctccagagggggctggaagtccagtttcaccaatgaccaagttttatttccttgtccttgttttagttttttcattttgttttcagtccaggtgcctcgcagctcttttggaatgggccagcattagtctaattttaagcgctatgtgttttgtacccttgcaaacttgctttctctttcttcttgctgttgccctttgaatgaagccttgtgtgcttgcatgatcagaccctgtaataggatgaatttccatgcacttaacatgaagagatacaaaaagaatctagagagagatatatatttttaatgaaatagaagcttggcatagaaacattgatttagatgttatgagttgctggccagagattcctcagataaaagagcctagaaaattgagttttgagcgggcatggtggctcacgcctgtaatgccagtagtttgggaggctgaggcgggtggatcacctgaggtcaggagttcgagatcagcctggccaacatggtgaaaccccgcctctactaaaaaatatgcaaaattagccgggcgtggtggtgcaggcctgtaatcccagctactcagaggctgaggcaggagattcacttgaacccaggaggtggaggttgcagtgagccaagatcgcgccattgcactccagtcagggcaacaagagtgaaactccgtctcaaaatataaaagaaaattgagtgtcccacccaaattttagggcgtacctccttccatttgataagaagatgctatttccagtgtccctgggagaattcttccatccagtttatatggtgaattgccaccagcgttccctaaaggaagagagaacttagcttatttctgtctgtgacttttatcagctagatcagttaattgtatttttaaattaaaaattagtaactagaggaagagactaagagaactatttttacctgagtaaatgctctcctcttcttgtgtccaaatctaatgcagaggtgaaaacacttgatgagaaaatcctttgtggcttgaggggaatcatgtttctttcaggacgtgttgtttccctgaagtctatgtcacactgagaactttttctgactgcactgctttggagctattcatttaaattgagtttggcctagttttcctggtataaaacaggaaatctacattgttccctctttctctcccttccatcccttcccctgcctttcctatacacgctggtgtgcttttgccctcagaaattcttggtttgggagttatgtatttttgagtgatcgaggttatgacatacttggagcggcatgatttcaagaagccattccaaattcttatagctccttagctctggttttactctcgtattttccccaagaaaattttttggctattcaaagaaagcacaaaatatgtgatgtggaactcatgaaaatagggacttttgatatctctttaaatattccctgactcacggaaaagatgtcctcttttggtgtatacattgtgaaaatctacccatttatctctctctctctcttttcttttaaataaattatctgataaggccggcaaggtggctcacgcctgtaatcccagcactttgggaggccgaggcgagcggatcacgaggtcaggagatcgagaccgcggtgaaaccccgtctctactaaaaatacgaaaaaaaaattagccgggcgcagtggcaggcgcctgtagtcccagctacttgggaggctgcggcaggagaatggtgtgaacctgggaggcggagcttgcagtgagccaagatcgcgccactgcactccagcctgggcgacagagcaagactccatctcaaaaaaaaaa

SEQ ID NO: 166489 - DNA, 13880 bp, Homo sapiens
  Payload ID: 12784
  Gene Symbol: PLEKHA3
  Gene Name: pleckstrin homology domain containing, family A (phosphoinositide binding specific) member 3
  Uniprot ID: Q9HB20
  ENST ID: ENST00000234453
  CDS Start-End: 403-1305
gaaatcgacgtcggggtcaatgaaaacaaacggggagcccagggggaaggaaggcaggcgaggaagaggcagcgccggggcgccggagggagcagccgggctgcggaagcgcgagcaggaggccggtcgcgggcgcatttttgccgttgtcgcggccgccgccgccgaggcttacccgggaatgtctgggcccgcgcctcgcggcccccaagctccacgctgcgcccgctgtcccggcctctaaaggccgccacgtccctgcggcgcgcgcaggcagaaagcggcttcgtgccggcggagggggcccgggcgggccgggaggggctgccccaggccctgcgcctaccccatcaccgcggccggcgccgggccgggaggatgcgcggtgtggggctctgaagcatggagggggtgttgtacaagtggaccaactatctcacaggctggcagcctcgttggtttgttttagataatggaatcttatcctactatgattcacaagatgatgtttgcaaagggagcaaaggaagcataaagatggcagtttgtgaaattaaagttcattcagcagacaacacaagaatggaattaatcattcctggagagcagcatttctacatgaaggcagtgaatgcagctgaaagacagaggtggctggtcgctctggggagctccaaagcatgtttgactgatacaaggactaaaaaagaaaaagaaataagtgaaaccagtgaatcgctgaaaaccaaaatgtctgaacttcgcctctactgtgacctcttaatgcagcaagttcatacaatacaggaatttgttcaccatgatgagaatcattcatctcctagtgcagagaacatgaatgaagcctcttctctgcttagtgccacgtgtaacacattcatcacaacgcttgaggaatgtgtgaagatagccaatgccaagtttaaacctgagatgtttcaactgcaccatccggatcccttagtttctcctgtgtcaccttctcctgttcaaatgatgaagcgttctgtcagccaccctggttcttgcagttcagagaggagtagccactctataaaagaaccagtatctacacttcaccgactctcccagcgacgccgaagaacctactcagatacagattcttgtagtgatattcctcttgaagacccagatagacctgttcactgttcaaaaaatacacttaatggagatttggcatcagcaaccattcctgaagaaagcagacttatggccaaaaaacaatctgaatcagaagatactcttccatccttctcttcctgaagaaactgaagtgtccaacttcctctaagtattgctatgcaaaagctgctgtaattaaactattgttatagggagtagttttttcccttaggactctgcactttatagaatgttgtaaaacagacaaacaagaaaacaaaccacatacttttgaagtgtattttatctttatatagtttgtttgcaagagtattttcctaataacttcacagtatgaatgtgcatcttttttttttgaacaaatgatggtgtaacattttgacatccataaggacaaatgtagatatttttcttaaaaactctgaggggactgacagcatggtcagggtgtattgtagcttataaacatgaaatcttataaggtttcagtttgacagaagtgtgatatatgtaacttgtgccatggaccaaatggtcactttaccacagctaaaaatgagttacgatagcagcttgatggtgattgtattgtattcctttaatcaaaaaggaaacacaatattctaagtatctttagcccaaataccatgacatattgagcatctttaaataaccagactgtattgtccttcatatgtgaagttgacactactgatttgtcaataccaaattttgggttaaagtgtttaatttttatgtatttattttcttgttgcctcaaaagatgattgcattctaacttttgtgacctaccaaatttaagatgtgtatacgttgttctttacgttgttctagaaaagagattttaatgctgtagtgactttgctcacttacactagagaaataaacaactttcaatggaagagaattttagtgctttttttttcctaaaatagatattaagctgctgttgtaaagtattgtttgcagctctttccaatatctagagacatttttatttatgaatatttatacaaaaaggaattctgtcaagatgactgctctatatcacttgagaatggcattatttaattaaagaacaaatagcattttttggtagtgcctgtccatacctattgtcattgtttgccttgtaatctgtttttttgaattcattttgggctgatagttttgtttaaggttttggataaggagcactttaaaacaaactggtgtgttgtttttaagttaatcatatgtttaataaatgcgtggtttttgcattcaaacacatcatataatacattgtattttttacattcattgatattctgtctaatctttattaggcactaatataattctaatggatttgagtttgtttgtatatttaggcctgctggtgaagacacaaatgaagcataatttttgttgcctgtgagcttagaatggtgtgacctatttcattttatttcaatttatcttgtaagtttatgtgggatattttaaaataattaatatttggtatttgtttaaaaaactgtaattataggccttccatcttaagtttaagatggacataaacagtctatacattaatatgtgtttgggtaaactgtatgctacttgaagtgtttgtaattttaaataacacacaggtcatcagactactctatattcagtggagtctttgcctgctcataagttgtacttcatatgtctaatttgaaaaaaaaagtttgataatgtagtaagttatgacgttgagcaggtaatcaggtttttcttgttttttttttttttttaaattttgtagtaagaacttgcacagtattaagaccatgaaggtcagggtgctattgattgggagttttttctggtagtgagtttttttgcagtaataggtttataaggaaaacaccgtaacaagcttttgaacttatagaaaataatcacatccattttctattgctttacccaaatagatgggttcgtgaagagttttctgtgaatattttaaaaatacaatgcaattatttctggtttgtatcattttttcccccttaaaacaggtccttgaacaggtttgcggtatccctaagtatgtcttttgttatgacttggagccactttttgttgttattgttaggaaccaaacacatctgtgaaatcattttttttgtgggagtataaatatatcttgaattatatccaggttttgatcagtgaattagtagcatgaagaaacctataaagcttaagggaaccttgcattttgaggagtcctttattttcaagtgtgcctgacttttttgaattttaagaaaaagatgaaccatataacaattctgtaagaattttagcttgtcaagttgttctatactttatagaaaaattattggttattattagttattagtagtcccttttttttgctttgtctaggtcatggggttattgagaaacatgaaaagttattgagaaatttggaggttctcttggcagcctatcagtgatcttctaagcaaaagcagtgcttgtttttcatttcaagtgcttgctcactattctttgggaatcgcaggcctccatgactaaagggattttgatacaattcttttataaatgagctgaatttgaattttcttacatcatatgggattattgcatgatcttcagtcaggaaaaatccagaaatggatgctattgcttaaacttaaattccaaggcagaagatagagtatcttcatttccacagatgccctagaacctttgaccttgaattgtagtttttcagtatgtattatcacatttagaaatgtaaaaatcacaagatctcaggaaatgcgcccttgtgatatgttaataccagattgctgtttacactaattccatatacatgataataccactaatttggactctgctagttcttttatttaataaggcacctctaggtctgtactttgagccttgatctgggtacttggtacagagggagtgtcctggcctgaaagaaagccagattaggctgcaggagttcctttgaggaggtctgtcttttaataaccctggcgggtaaatgaatggtaggtagctggtaggtaggccttcttgttcatgtctttctgtctccccaatccactctttgaattcatgttgaattcttaacttgaaattctgttgttttttttttaattttagctttctttttattaaactagttaatgtacatagtttgaaaaaatcaaatagaactaaaaggtttatagtgaaaaagtgtagttccctcttccccagtttagcattccaaagacaaacacttggaactcttagtggtttgtgttagtatttaccttcctgtttgaaaatgttatactactttttgttgacttatcaatttcagaaacagtttctcgaataccttttatggtagacaggatttactttacttaaactctccacctcccacatttttcttcccccacccctcccaaaatagatttatattcacacaacttttagttagaacaaactttttgtgaaatagatagacataaatgtagttcactgatgtaccacatggttaactatcattatttcctttttactagaatgttattttttctggggttggtattgcctgattttcaaatttgcttagtttttaatgtacctgtcacaatgactatccaaaggcttaaatgctgaaaaacatcagataatcgtatcaattctcttaaaaaagtttttaaaaatattttgtcatcctttagggacatttcttccacagtccttcatcttctgccatttgtactgttgccctccaggcctgttctatggttcagcagtcattctgaaactccctttagtttttagtctcacattaggttttttttttttttttttttttttttttttttttttggcaaagctcctccaccagtaacttcctaagaaaaggtgcatagaaagtaaagattttaaggctttacaggtctgaaaatgtctctactcttgattggtagtttggagtctggaaaataacatgccttcagaattttaagggcaacatttcattgtcttaaggcatttagtttttctgtgagaattctgataccgttcctttacctgggatctgtttttacactctgtaagcttttaggaacttctcattacttctgatgtttcataataatatgtgggtctttattcattcatcttgatggctacttgacttggtggaatctttcaatttagagatttgtctgcttcagttctgggtgtgtgtgtgtgtgtgtgtgtgtgtgtgtgtgtgtgtgatctttttgacagttttctctcttccattttctttgttctatctttctagaatttctgttatttgaatgttggacctcccagagttggaccgcctctaaatttaaaaagctttttctctctagttgttccttaagttatattatctttgttctttttgttatcctccagctcttctgttgaattttctttatatatatattttaatttctaagaggtcttttttttctgtttcatttcataaaaacctatttttattttatagattaactgtttccccatatctccctgaggataaaattaagatttttttcttacatctttcctgtttcttgaatggttctccccctcccccaccatgtttctgctttctatttatttgttttgggctctttcattctgaagcctttcttagaaatcatctattcatattagtcatgtattaaaaagctaatgtcataggtctttatatgtgggcagggtttataagttgtctaaagggccatcaggtagagttggccttttctgttgaggtcccctaaatttcagtggaggtcttctctttggggccagtttctctagaaaactgggtcctgatagtagggtaagaaaagacagctgaggaccccaagatttgtatgatgacttttacttaatccctctatcttcatcctctctcatgcccatccggccccaccccccaaatcctcctctggctgctgaccctcaggttcagtttttcctgtcagtggaggttgagggtggggcgtaggctggctgtggagagtaggggagaggacctgggttccagttgctctttatacagacttctagtcctgatttcagccctatacctcactctcatcttctacaatacctagtgcttccaagtcctgaacttagtagaggtttggtggggtgtgtttttgggcttctcccttttgggtacttaggctttaacttcctccactctgctaggttaggtattgcacttcctcctggtttttatctgtataaactttgttaaaatctcatggctttgtcgtctgtgcttttttgtggattaatactatttatattcctttaatatcttttggtggtttggaggtagaggaaataaattcatgtggttggtttgtatgtttcactgaaagtctagatttaaattctaatagtgtataaaaaataaaaattctttagtattaatttgtaattcattctagtgatttttaattcatatggttttactgtactacctacctcatagggttgtgaggattagaagaatcaattcataaaaagcagttagaaaagtgctgggcacgtagtgtgttgaataagtgttagttattaatattgtttactatcattattattattactactatcagtttttttttttttttctgagacagggtctcactctttcacccagtcttgagtatagtggagtgatctcagctcactgcagtctcgacctcccaggctcaaatgatccttttacctcagcctcccgaataactaggactacaggcatgcaccactactcctggctaatttttgtatttttttgtagcagcagggttttgccatgctgttcagactgatctcaaactcctgggctcaagggatctgcctgccttgactttccaaaattctcggattacaggcatgagccacactgcactctcctatctctctcaattcagtaacctgtttattcttgagtgaaaatgtttcaccataggaagaattactaatatatgggaaaatctagtgtttgataatgttgaccctacattttttttggacagtctctgtcgcccaggccggagtgcagtggcgcgatcttggctcactgcaacttccacttcctgggttcaagcaattctcttgtctcagcctcctaggctacaggctaggactacaggtgctcgccaccatgcccagctaatttttgtatttttaatagagatggggtttcatcatattagtcaggctggtcttgaactcctgacctcaggtcatctacctgccttggcctcccaaagtgtcgggattacagatgtgagccaccgtgcccagccgaccctgcatttaactagacttcatatgaaatgttcaggtgttaggtgttatctttctaagaaacattcaagccttaagaaatccaatcagttatagttactttaaaagttttaaaaagagtataacaattttgatgtgcttttaagctttattggtattatattttgtttttatcatataaatatgaagtataggagataagataatgcagatgatgtttgttatgccttacctaccgccagtagatgtaatactcttaatacatggagtacagaaatagtagattcccttcattcccagtgcaacagtgttgggaggtggggcctaccaggaggtgtttaggtcatgtgggtaccaccctcatgaatagattaatgccgccgtgtaaagggcttgtgggcgtgggtgaacactctcctgctcttctgccaaatgtctctcccttccaaaggacgtagtgctctacatagtgttggaagcgagagactgagccctaacatgccagtgccttatcttggatttctcagcctccaaaactgtgaaaaaataaattttcattctttatggtaaattcccatcactgtatccataacctcttgtaaatagttgtacacctttcagaaaatgttgtggacttacataagcaaaatgcctgcatttatttcataggtaaaattttaatctattttctaatcaaagtgttttggggaacatttaatttaaatactatgttcaatttttttaatggtctgcttcagattttttttataagttaatgttttaaaacaaaataattgtgttctaggtagaagctactctgagtttaggtttttaaatctctttcagatattttaagtatcttttttgtgtctggattcagagaggtatgataatgagattctcttctagaggggaagtgggagtaggtaaccatactactctttctacggctacagagccgcatactcgaaggagggagatttttatttgtaaggacatttgtattatctttcattaaagtagagtcccatgggcgtggcaaatggctgtaaataaagtaaaagtggctaaagaaaacagtgcctgctattagcttgatgctggcattttcttctttccctggatgtgactgttattgtctttattgggtccccttattatctgctttgatatccatctctggaactttgatctctaattttttttttttttttttgagacagagtctcactctgtagcccaagttagagtgcagtgacacgatcttggctcactgcaacctccacctccggggctcaagcaattctcgtgactcaacatcccaaatagctgggactgtaggcacgcaccaccatgcccagctgatgttttgtatttttacaaaaatttttcaccatgttggccagggtggtctcaaactcctaagctcaggagatccgcctgcctcagcctttgaaagtgctgggattacaggcgggagccaccgtgcccgacctgacctctccatctttggcgtccttatgctgcctcttctccaaatacatgttggccagggtggtctcaaactcctaagctcaggagatccgcctgcctcagcctctgaaagtgctgggattacaggcgggagccaccgtgcctgacctgacctctccatctttggcgtccttatgctgcctcttctccaaatacagtaactaatctagtatattttcataggatagaatttgccctttctgtcccataatatgttcctcttccccaaaaagttttttgttggtctctttggtaataaaacatttagagcatttactgtgggccaggtgctttacctcatgttagccttataacagagatgcggaagtacaggactaccagtgcagccaagatgcacagcaccaggattaactcatgagactgattagaatgatgaatatcttattgtatcctgaaacattaagcctttaagttatccctttatttagtatttaaattcacatgcttcttgatttttttggactagcattagttgttgaataaataaataattcagaatgtatccacaaaacctagaatatatgacagggtggattcagttttgcttagttactgtagataaaccaaataaattaatgtaaagggatattaatgcattaagcaattttttttgacataaatgaagggttgtttccatgggtaatatattcagaatattaaagatgagtaaaatgtatgactataatgaattccttcttcacttttactctggcaaggtgggaggagggtgctgttgataatctctgtgcttttgcaagtttggcacaaagacttttactcacttaaatctcaatataaagtatattgccagatctggcagcatggggacaattaggaacaaaggagagagaatagaatcagccatcaggagctataaccacactcttctttctcaaccttttctggtattagtaggcagaactccttttggatgcggtgaagcattttatgagtgaacaatggtgagtcatgtaatgaaaggagatgttctaggaaaacttttcagtcccgctcagtgctgccatctttttctcccagcactctggacttaaaattctgagagaacagggtatttcccacccttcctcttactttttgaaagcaatacctgagttattaagcaatcatttagacagtatgaataaaccaaaattcaccttgacactccatcccctagaggtaaccattcttttctagtatatattcttccagacctttttcctgtgtattgacttttaaatagatgtacattgcaatagtttggattagctcatccatagcagggtggttaaataaacagtggcacttttttttttttgagacagagtctcaccctgtcgcccaggctggagtgcaatggcgcgatctcggctcactgcaacctttgctttccaggttcaagcgattctcctgcctcagcctcccaagtagctggaattacaggcgagcaccaccatgcctggctaatttttgtatttttggtagagacggggttttaccgtgttggtcaggctggtctcgaatgcctgaccttgtgatctgcctgccttggcctcccagtgtcaggatcctggccccagtggcacatttttatgatgcatctggtactaaagaaggagctggctttatgacctttacttgagtatttttttgtgtgtgacagttgaacaattctgacccctattattgttggctggacaggcattttctttttaattcctctatgcaaggaactgtggattgcttttttctggatagctagaacgaggccattttctttcaaaagacagtcctagagtttccagtggttttctttaattgtgtatgcgtgagtgtgacagtgtgtgtgcctgtgtctctatctgtgcatgcatctgtatgcacagtttcttagttgtggacaatgcaacttggaatcattttagttttccaattgattttaaaagtttatctatagaagatgagacaaatttgctgtagaagttaccactacttggtcaaaatagagagttgtgggtttttttttttgtttgacaacaatcaaaagtatggcctacagatagtaagggttaaccacccagatttttgtcagataatatatacatgtccatgtaattaaaagtcttcatttgacaaatttatatggtaaatgagcataaaatgaatatcttttcagtattagaacatttctgtttatgccctattccagtggtatttgtggtcgctaggggttgctgggttatccaagtgattcagcatgccttcagaattggcatcctcgggtgattgtccatagcctcttgcaatggtgcctcatcttggggaggctttagaacacagctctcatttagcttattattgatttttttttcttgttttgcagttgttggctagagaaaagtgtgtagcaataagtacgcacacttactgtggtttaccatcatgaccatggatagcaaactgcctttttttttttttttaactcctgtgtcatctctgatgttgtggctaattttaagactttgatttttcagctaggattagcggagaatgacctacctacttgattaatgatgtctgcatgggcttactaagagggtgtggggaatggtggcaggggtaactatcatcgagaatatagggcaatgggtatattctaactttgcataactttgctagattatatatatctttactcacaataagcaaagttgaacaacttaaaattgattccctgttttctgttttcactatccaactaggatgaactcttaagttcatacatatactttaaaatgggaacaaacatagcctgtcatgtctttatttaggctaagtgcatatgtatgtataagtaatgtgtatatccttcacttattaatagtgccttcatgaattcaaagacccttgtcacatggtgctcaggaaaaaaaaagtgccaatattctttttttttttttctctaagaagtactagtttaggtaagtgaaattcaatagcatatcagtgctttaccttagtcactttttgtgttttgatcacccttagtcatcactggagagaagagtttgaattcatttgtggttttgctttagtggcaaacctccttacagggatgagttgccctccattctccttgccatatttggttaatctaggccatgacctttgaggggaaaaggcacagattgcaacttttctttcctgcttttgtgaatcaggccatgttcacgcagggtccttgaaggtgacttgagtgaggaagctatataccgatgacttaccaatttttggtcttataacattctctctctttttttttttttttttttgtagcatatggcttcctctactgtatgttggcatttgccacttttggggatttgactcctgcaggtatttttttttttttcttttgggggagtgtgacggcagtggatatagtcttagatgatgtttttaatagttcaagtccattagtgtcttactctagagaaaacgaaagactcactgtgtgagttttcttgccctctggttttcagaattctgtgtagtttctcaacatttcctttctacctgtcctgaagagctcttatggaaatcatggttgaatgttagtaaatttctaagagctttccaatgttgtctataattagccaaaaaaagacatatgaacttttctcattctgtctacctttttaaaattttattcactttatctttttctccagttttgatagatgattatagagttccccaaaatggccttcttactatttctatattaggtatattatttcagaaaagaaaataatcacttgggaatggcggtgagttcagggggtctgttaaccatttaatttaggattgtttatacatttatttacctcttttaaaaaatttcttcagttaatattcattgaccactcactaagtgttatgttgctagtatttatctttgctttctaattatttttttgtaatttttttgctttctaattcttgagtgaatttaaaactcactgctttattatttaatatcttagatacaatgactatcttaattataattggctttccaaaattttcactttttttcagttaactagttgaatagtatttatcattcacatttgcaccctaactattgttttaacctaaacataaataagcaagcattagaaagtagcataattgctgttaaaatagtcttttctttgcgtgtttaaatattgttagaaacataagcacatgaatttttttggccttttaaatgtctttattgtagctagttataagatgtatatatagcttatatatgtgtatatacacatacatatatatatatacatacatatatatacataaaatgattcttgcaaaagtagttatgggtatttaagtgaaaaatttgtaagtttagaagttaagaaattggaaataatggaattggtttaaaaagctagtctctaaattaacttagaaacctaatagcaaatacagattttgattgctataactaaacactttaattttgaaaaagtttcagaatagaatttctattcccaggggaaaataaacttcatttaaaaatatatgtatacttattttgtgagtatttttttcttttccaaattccaaaaggtgtatactctatatttttgtcataaaaattctgcttgtcgaaaatattgtagtaattttataaattcaataaaacctgagtgatgtga

SEQ ID NO: 166490 - DNA, 552 bp, Homo sapiens
  Payload ID: 12784
  Gene Symbol: PLEKHA3
  Gene Name: pleckstrin homology domain containing, family A (phosphoinositide binding specific) member 3
  ENST ID: ENST00000421187
  CDS Start-End: 1-345
gatcccttagtttctcctgtgtcaccttctcctgttcaaatgatgaagcgttctgtcagccaccctggttcttgcagttcagagaggagtagccactctataaaagaaccagtatctacacttcaccgactctcccagcgacgccgaagaacctactcagatacagattcttgtagtgatattcctcttgaagacccagataatgtgggtggagaaatgaaggaaagaaaccgggaaggggaagggagaaagaaactttcttgggccaatcaagcaagacctggaagagaagaggaggagaggaggagggttaaagaggttgagtatgtgaaaaaagttatctgaggcaggacctgttcactgttcaaaaaatacacttaatggagatttggcatcagcaaccattcctgaagaaagcagacttatggccaaaaaacaatctgaatcagaagatactcttccatccttctcttcctgaagaaactgaagtgtccaacttcctctaagtattgctatgcaaaagctgctgtaattaaactattgttataggga

SEQ ID NO: 166491 - DNA, 749 bp, Homo sapiens
  Payload ID: 12784
  Gene Symbol: PLEKHA3
  Gene Name: pleckstrin homology domain containing, family A (phosphoinositide binding specific) member 3
  ENST ID: ENST00000453653
  CDS Start-End: 138-323
gcgcgcaggcagaaagcggcttcgtgccggcggagggggcccgggcgggccgggaggggctgccccaggccctgcgcctaccccatcaccgcggccggcgccgggccgggaggatgcgcggtgtggggctctgaagcatggagggggtgttgtacaagtggaccaactatctcacaggctggcagcctcgttggtttgttttagataatggaatcttatcctactatgattcacaagatgatgtttgcaaagggagcaaaggaagcataaagatggcagtttgtgaaattaaaggtgacaactttggaggggaccacccttgattggatgcataaattctgttcattcagcagacaacacaagaatggaattaatcattcctggagagcagcatttctacatgaaggcagtgaatgcagctgaaagacagaggtggctggtcgctctggggagctccaaagcatgtttgactgatacaaggactaaaaaagaaaaagaaataagtgaaaccagtgaatcgctgaaaaccaaaatgtctgaacttcgcctctactgtgacctcttaatgcagcaagttcatacaatacaggaatttgttcaccatgatgagaatcattcatctcctagtgcagagaacatgaatgaagcctcttctctgcttagtgccacgtgtaacacattcatcacaacgcttgaggaatgtgtgaagatagccaatgccaagtttaaacctgagatgtttcaactgc

SEQ ID NO: 166492 - DNA, 3088 bp, Homo sapiens
  Payload ID: 12785
  Gene Symbol: PLEKHA4
  Gene Name: pleckstrin homology domain containing, family A (phosphoinositide binding specific) member 4
  Uniprot ID: Q9H4M7
  ENST ID: ENST00000263265
  CDS Start-End: 557-2896
aggcagggaaagaccagcagagaggaaagagaaactgggagagggaggaagggagaaagtgagaagggaaatcggaaagagaaaagggaggaaacggcagagccagagagaaagaggaagagactgagtgtgaaggagagaggacacaggggatgactgagagacagagagagagagagagagagaatgagacagagacttaaggaagagaccctgtgagtctgacaataaaagatttggacagaaacagaaagattggagagagagagagagggagagaatgagtgagagagagactggaagagacagagatcagagggagacacagaaagtgagagtggggagagaggtagtgtaaaaggaagagagagagagagagaccgtaagagacaggagacaaagagacaaaaagtgtgagtgagcaggtgaggagagagattgagaactatgagagacagcagctaagagacaaaggaggcgggagactgcctaggtgccgcagcacccacaccgtcctcttgcccccccgtcactgggaccccagagctggcccttgatggaggggagccgacctcgcagcagcctgagcctggccagcagcgcctccaccatctcctcgctcagcagcctgagccccaagaagcccacccgggcagtaaacaagatccacgcctttgggaagagaggcaatgcgctcaggagggatcccaaccttcccgtgcacatccgaggctggcttcataagcaggacagctcggggctccgtctctggaaacgccgctggttcgtcctctccggccattgcctcttttattacaaggacagccgcgaggagagtgtcctaggcagcgtcctgctccccagctacaatattagaccagatgggccgggagccccccgagggcggcgcttcaccttcaccgcagagcacccgggcatgaggacctacgttttggccgctgacaccttagaagacctgcggggctggctacgggcgctgggccgggcctcccgtgcggagggggacgactatgggcaacccaggtcacctgcacgaccccagcccggggagggccccggcggccccggtggtcccccggaggtgagcagaggggaagaggggcgcatctcagaatcaccggaagtgactcgactctccagaggtcgtggtagacccaggctgctcactcccagccccacaaccgacctccactctggactccagatgcggagggcgaggagccccgacctgttcacccccctctctcgccctccctcgcctctgagcctcccccgtccccgttctgcccctgcgcggcgaccccctgccccctcaggagacacagcaccccctgcccgacctcacaccccgttgagtcgcattgatgtccgacctcctctggattggggcccccaacgccagaccctctcccgaccccctactccccgccgaggacctccctctgaggctgggggaggaaagccccccaggagtccccagcactggagtcaggagcccagaacacaggcacactctggctcccccacttatctccagctccccccgcggccccctgggacccgggcctccatggttttattgccgggtcctcccctggagtcaactttccaccaaagcttggagacagatacgctgctgaccaagttgtgcgggcaggaccggcttctgcggaggctgcaggaggagatagaccagaagcaggaggagaaggagcaactagaagcagctctggagttgacccggcaacagctgggccaagccaccagggaggctggggctcccgggagggcctggggtcgccagcgcctcttgcaggaccggctggtcagtgtgagggccaccctctgtcacttgactcaggagcgagagagggtttgggacacgtacagtggcctggagcaggagctgggcaccttaagagagacgctggagtacctgctgcaccttggttctccccaggacagagtgtctgctcagcagcagctgtggatggtggaagacacgctggcaggtctgggtggcccccagaaaccgcccccacacactgagcctgactccccatctcccgtgctccagggcgaggagtcctcagagagggagagcctgccagagtccttggaactgagctcccctaggtcccccgagactgactgggggcggcctcctggaggcgacaaagacctcgccagccctcacttaggtcttgggtctccgagggtctcccgggcttccagccctgagggtcgccacctcccttccccacagctaggaaccaaggccccggtggcccggccccggatgagtgcccaggagcagctggagcggatgcgcagaaaccaggaatgtggacggcccttccctcgcccgacctccccccggcttctcaccctgggaaggacactgtccccagccagacgccagcctgacgtggagcaaaggcctgtcgtaggacactcgggagcccagaaatggctcagaagctctgggtcctggagtagtccaaggaacaccaccccttacttgccgacttccgaaggtcaccgggagcgggttctcagcctctcccaagccctggctactgaggcgtcgcagtggcacagaatgatgacaggtggaaatttggactcccagggagaccctcttcccggtgtgccgctgcctccttcggaccccacgcgccaggagacccctccccccagatctcccccggtggctaattcgggttccacggggttctctcgccgagggagtgggcgtggaggaggtcccaccccctgggggcccgcgtgggatgccgggatcgcccctccggtcctgccacaagacgagggggcatggcctctgcgagtcactctgctacaatccagcttctaatccgcccaaaagcggcagccaatcggagcgcgaggacgtggtctggaggtaccgccggagatctgggaccactcagggcatcagggggcgtggtctggtccccattgcgggcccgggaggggaatggtttctatggccaaagtttggttttctcaacactgtctaaatttggattaaaactttgaactttta

SEQ ID NO: 166493 - DNA, 2614 bp, Homo sapiens
  Payload ID: 12785
  Gene Symbol: PLEKHA4
  Gene Name: pleckstrin homology domain containing, family A (phosphoinositide binding specific) member 4
  Uniprot ID: Q9H4M7
  ENST ID: ENST00000355496
  CDS Start-End: 379-2130
gagagagaatgagacagagacttaaggaagagaccctgtgagtctgacaataaaagatttggacagaaacagaaagattggagagagagagagagggagagaatgagtgagagagagactggaagagacagagatcagagggagacacagaaagtgagagtggggagagaggtagtgtaaaaggaagagagagagagagagaccgtaagagacaggagacaaagagacaaaaagtgtgagtgagcaggtgaggagagagattgagaactatgagagacagcagctaagagacaaaggaggcgggagactgcctaggtgccgcagcacccacaccgtcctcttgcccccccgtcactgggaccccagagctggcccttgatggaggggagccgacctcgcagcagcctgagcctggccagcagcgcctccaccatctcctcgctcagcagcctgagccccaagaagcccacccgggcagtaaacaagatccacgcctttgggaagagaggcaatgcgctcaggagggatcccaaccttcccgtgcacatccgaggctggcttcataagcaggacagctcggggctccgtctctggaaacgccgctggttcgtcctctccggccattgcctcttttattacaaggacagccgcgaggagagtgtcctaggcagcgtcctgctccccagctacaatattagaccagatgggccgggagccccccgagggcggcgcttcaccttcaccgcagagcacccgggcatgaggacctacgttttggccgctgacaccttagaagacctgcggggctggctacgggcgctgggccgggcctcccgtgcggagggggacgactatgggcaacccaggtcacctgcacgaccccagcccggggagggccccggcggccccggtggtcccccggaggtgagcagaggggaagaggggcgcatctcagaatcaccggaagtgactcgactctccagaggtcgtggtagacccaggctgctcactcccagccccacaaccgacctccactctggactccagatgcggagggcgaggagccccgacctgttcacccccctctctcgccctccctcgcctctgagcctcccccgtccccgttctgcccctgcgcggcgaccccctgccccctcaggagacacagcaccccctgcccgacctcacaccccgttgagtcgcattgatgtccgacctcctctggattggggcccccaacgccagaccctctcccgaccccctactccccgccgaggacctccctctgaggctgggggaggaaagccccccaggagtccccagcactggagtcaggagcccagaacacagccgggtcctcccctggagtcaactttccaccaaagcttggagacagatacgctgctgaccaagttgtgcgggcaggaccggcttctgcggaggctgcaggaggagatagaccagaagcaggaggagaaggagcaactagaagcagctctggagttgacccggcaacagctgggccaagccaccagggaggctggggctcccgggagggcctggggtcgccagcgcctcttgcaggaccggctggtcagtgtgagggccaccctctgtcacttgactcaggagcgagagagggtttgggacacgtacagtggcctggagcaggagctgggcaccttaagagagacgctggagtacctgctgcaccttggttctccccaggacagagtgtctgctcagcagcagctgtggatggtggaagacacgctggcaggtctgggtggcccccagaaaccgcccccacacactgagcctgactccccatctcccgtgctccagggcgaggagtcctcagagagggagagcctgccagagtccttggaactgagctcccctaggtcccccgagactgactgggggcggcctcctggaggcgacaaagacctcgccagccctcacttaggtcttgggtctccgagggtctcccgggcttccagccctgagggtcgccacctcccttccccacagctaggaaccaagtccaaggaacaccaccccttacttgccgacttccgaaggtcaccgggagcgggttctcagcctctcccaagccctggctactgaggcgtcgcagtggcacagaatgatgacaggtggaaatttggactcccagggagaccctcttcccggtgtgccgctgcctccttcggaccccacgcgccaggagacccctccccccagatctcccccggtggctaattcgggttccacggggttctctcgccgagggagtgggcgtggaggaggtcccaccccctgggggcccgcgtgggatgccgggatcgcccctccggtcctgccacaagacgagggggcatggcctctgcgagtcactctgctacaatccagcttctaatccgcccaaaagcggcagccaatcggagcgcgaggacgtggtctggaggtaccgccggagatctgggaccactcagggcatcagggggcgtggtctggtccccattgcgggcccgggaggggaatggtttctatggccaaagtttggttttctcaacactgtctaaatttggattaaaactttgaactttta

SEQ ID NO: 166494 - DNA, 525 bp, Homo sapiens
  Payload ID: 12785
  Gene Symbol: PLEKHA4
  Gene Name: pleckstrin homology domain containing, family A (phosphoinositide binding specific) member 4
  ENST ID: ENST00000596982
  CDS Start-End: 1-79
gctcaggagggatcccaaccttcccgtgcacatccgaggctggcttcataagcagacagccgcgaggagagtgtcctaggcagcgtcctgctccccagctacaatattagaccagatgggccgggagccccccgagggcggcgcttcaccttcaccgcagagcacccgggcatgaggacctacgttttggccgctgacaccttagaagacctgcggggctggctacgggcgctgggccgggcctcccgtgcggagggggacgactatgggcaacccaggtcacctgcacgaccccagcccggggagggccccggcggccccggtggtcccccggaggtgagcagaggggaagaggggcgcatctcagaatcaccggaagtgactcgactctccagaggtcgtggtagacccaggctgctcactcccagccccacaaccgacctccactctggactccagatgcggagggcgaggagccccgacctgttcacccccctctctcgccctccctcgcctctgagcctc

SEQ ID NO: 166495 - DNA, 766 bp, Homo sapiens
  Payload ID: 12785
  Gene Symbol: PLEKHA4
  Gene Name: pleckstrin homology domain containing, family A (phosphoinositide binding specific) member 4
  ENST ID: ENST00000595867
  CDS Start-End: 590-766
cttgagtgtgtgtgacttgctggggctcccgtgggggtcacagcctgtcggggagaagactggaggggaagatgccacaaagcggacattactgaggatttggacagtagaggaggattctaacccagtgggacagtaagacacagtgaagtgagacatgtccttgaggctgacttgatggccgggtcctcccctggagtcaactttccaccaaagcttggagacagatacgctgctgaccaagttgtgcgggcaggaccggcttctgcggaggctgcaggaggagatagaccagaagcaggaggagaaggagcaactagaagcagctctggagttgacccggcaacagctgggccaagccaccagggaggctggggctcccgggagggcctggggtcgccagcgcctcttgcaggaccggctggtcagtgtgagggccaccctctgtcacttgactcaggagcgagagagggtttgggacacgtacagtggcctggagcaggagctgggcaccttaagagagacgctggagtacctgctgcaccttggttctccccaggacagagtgtctgctcagcagcagctgtggatggtggaagacacgctggcaggtctgggtggcccccagaaaccgcccccacacactgagcctgactccccatctcccgtgctccagggcgaggagtcctcagagagggagagcctgccagagtccttggaactgagctcccctaggtcccccgagactgactgggggcggcctcct

SEQ ID NO: 166496 - DNA, 602 bp, Homo sapiens
  Payload ID: 12785
  Gene Symbol: PLEKHA4
  Gene Name: pleckstrin homology domain containing, family A (phosphoinositide binding specific) member 4
  ENST ID: ENST00000594100
  CDS Start-End: 1-602
gcctgagcctggccagcagcgcctccaccatctcctcgctcagcagcctgagccccaaggacagctcggggctccgtctctggaaacgccgctggttcgtcctctccggccattgcctcttttattacaaggacagccgcgaggagagtgtcctaggcagcgtcctgctccccagctacaatattagaccagatgggccgggagccccccgagggcggcgcttcaccttcaccgcagagcacccgggcatgaggacctacgttttggccgctgacaccttagaagacctgcggggctggctacgggcgctgggccgggcctcccgtgcggagggggacgactatgggcaacccaggtcacctgcacgaccccagcccggggagggccccggcggccccggtggtcccccggaggtgagcagaggggaagaggggcgcatctcagaatcaccggaagtgactcgactctccagaggtcgtggtagacccaggctgctcactcccagccccacaaccgacctccactctggactccagatgcggagggcgaggagccccgacctgttcacccccctctctcgccctccctcgcctctgagcctc

SEQ ID NO: 166497 - DNA, 829 bp, Homo sapiens
  Payload ID: 12785
  Gene Symbol: PLEKHA4
  Gene Name: pleckstrin homology domain containing, family A (phosphoinositide binding specific) member 4
  ENST ID: ENST00000597129
  CDS Start-End: 1-358
tggaggcgacaaagacctcgccagccctcacttaggtcttgggtctccgagggtctcccgggcttccagccctgagggtcgccacctcccttccccacagctaggaaccaaggccccggtggcccggccccggatgagtgcccaggagcagctggagcggatgcgcagaaaccaggaatgtggacggcccttccctcgcccgacctccccccggcttctcaccctgggaaggacactgtccccagccagacgccagcctgacgtggagcaaaggtccaaggaacaccaccccttacttgccgacttccgaaggtcaccgggagcgggttctcagcctctcccaagccctggctactgaggcgtcgcagtggcacagaatgatgacaggtggaaatttggactcccagggagaccctcttcccggtgtgccgctgcctccttcggaccccacgcgccaggagacccctccccccagatctcccccggtggctaattcgggttccacggggttctctcgccgagggagtgggcgtggaggaggtcccaccccctgggggcccgcgtgggatgccgggatcgcccctccggtcctgccacaagacgagggggcatggcctctgcgagtcactctgctacaatccagcttctaatccgcccaaaagcggcagccaatcggagcgcgaggacgtggtctggaggtaccgccggagatctgggaccactcagggcatcagggggcgtggtctggtccccattgcgggcccgggaggggaatggtttctatggccaaagtttggttttctcaacactgtctaaatttggattaaaa

SEQ ID NO: 166498 - DNA, 616 bp, Homo sapiens
  Payload ID: 12785
  Gene Symbol: PLEKHA4
  Gene Name: pleckstrin homology domain containing, family A (phosphoinositide binding specific) member 4
  ENST ID: ENST00000594195
  CDS Start-End: 237-616
tgtgtgacttgctggggctcccgtgggggtcacagcctgtcggggagaagactggaggggaagatgccacaaagcggacattactgaggatttggacagtagaggaggattctaacccagtgggacagtaagacacagtgaagtgagacatgtccttgaggctgacttgatgggcacactctggctcccccacttatctccagctccccccgcggccccctgggacccgggcctccatggttttattgccgggtcctcccctggagtcaactttccaccaaagcttggagacagatacgctgctgaccaagttgtgcgggcaggaccggcttctgcggaggctgcaggaggagatagaccagaagcaggaggagaaggagcaactagaagcagctctggagttgacccggcaacagctgggccaagccaccagggaggctggggctcccgggagggcctggggtcgccagcgcctcttgcaggaccggctggtcagtgtgagggccaccctctgtcacttgactcaggagcgagagagggtttgggacacgtacagtggcctggagcaggagctgggcaccttaagagagacgctggagtacctgctgcaccttgg

SEQ ID NO: 166499 - DNA, 2293 bp, Homo sapiens
  Payload ID: 12786
  Gene Symbol: PLEKHA8
  Gene Name: pleckstrin homology domain containing, family A (phosphoinositide binding specific) member 8
  Uniprot ID: Q96JA3
  ENST ID: ENST00000258679
  CDS Start-End: 402-1724
cctgggcatgcgcgagcgcgtcccgggcccggcgagtcgagggttcaggtggtgcgccgtggcgccgcctgcgaccggcagctcgttcgccgcactttggaggcttcggctgcccctccgacccacgtagggcccggacccgggcctccttgtgaacagcgtgccggcttcgccccacgggttcaccggctggctgggcttcaagcgccgaggccgccgcagtgaccccgcccccgggccgaggatgtgaggcgggccgggcgtccccacaccgggcccgggcgccgggagtgggcgtctgggcagcgccaggcgatggccctgctgctggtgctcctcgcctcttggggcctggggcagtgagggggccggcgggcgtgggccgagtggccgcgggcgccatggagggggtgctgtacaagtggaccaactatctgagcggttggcagcctcgatggttccttctctgtgggggaatattgtcctattatgattctcctgaagatgcctggaaaggttgcaaagggagcatacaaatggcagtctgtgaaattcaagttcattctgtagataatacacgcatggacctgataatccctggggaacagtatttctacctgaaggccagaagtgtggctgaaagacagcggtggctggtggccctgggatcagccaaggcttgcctgactgacagtaggacccagaaggagaaagagtttgctgaaaacactgaaaacttgaaaaccaaaatgtcagaactaagactctactgtgacctccttgttcagcaagtagataaaacaaaagaagtgaccacaactggtgtgtccaattctgaggagggaattgatgtgggaactttgctgaaatcaacctgtaatacttttctgaagaccttggaagaatgcatgcagatcgcaaatgcagccttcacctctgagctgctctaccgcactccaccaggatcacctcagctggccatgctcaagtccagcaagatgaaacatcctattataccaattcataattcattggaaaggcaaatggagttgagcacttgtgaaaatggatctttaaatatggaaataaatggtgaggaagaaatcctaatgaaaaataagaattccttatatttgaaatctgcagagatagactgcagcatatcaagtgaggaaaatacagatgataatataacagtccaaggtgaaataaggaaggaagatggaatggaaaacctgaaaaatcatgacaataacttgactcagtctggatcagactcaagttgctctccggaatgcctctgggaggaaggcaaagaagttatcccaactttctttagtaccatgaacacaagctttagtgacattgaacttctggaagacagtggcattcccacagaagcattcttggcatcatgttatgctgtggttccagtattagacaaacttggccctacagtgtttgctcctgttaagatggatcttgttggaaatattaagaaagtaaatcagaagtatataaccaacaaagaagagtttaccactctccagaagatagtgctgcacgaagtggaggcggatgtagcccaggttaggaactcagcgactgaagccctcttgtggctgaagagaggtctcaaatttttgaagggatttttgacagaagtgaaaaatggggagaaggatatccagacagccctaagaaatccaacagaaaacacttgacaccaaaacataccctgatgaagatcctgaacttcaagaatgaagaaagaattcctcaccattcaggcagaaaaagcaagtcaccaagggacctcaaacttcctttccacaagattctgtgacgggaaacaatgggggagtatttccgaagttctgagtaggaaaaaagaatgactcaaatgtattattgccaaccaagtcgtcaaatctaatgtcaagttctcttaagcaggtaagaactcagaacataatacctgagtgccttcttaaggaaaccatttgataggaaagatgaaccaaataactcaatgatggatgagctggtagaaaaaaagctggtggtgaaccaaggtcaaactggaaattatagtcacagtatagatatagattataaatattacaaaccctaagatagctaataaattgggaatgggagaagggaggatataagagcactaatgccctcttattttcatagcagagacttgatactgtctcaacttttttcaaaaacacaatttcttaaattttttggtaatcttttaaataaacagatttctaaaaagaaa

SEQ ID NO: 166500 - DNA, 1907 bp, Homo sapiens
  Payload ID: 12786
  Gene Symbol: PLEKHA8
  Gene Name: pleckstrin homology domain containing, family A (phosphoinositide binding specific) member 8
  Uniprot ID: Q96JA3
  ENST ID: ENST00000396257
  CDS Start-End: 339-1706
gccgcctgcgaccggcagctcgttcgccgcactttggaggcttcggctgcccctccgacccacgtagggcccggacccgggcctccttgtgaacagcgtgccggcttcgccccacgggttcaccggctggctgggcttcaagcgccgaggccgccgcagtgaccccgcccccgggccgaggatgtgaggcgggccgggcgtccccacaccgggcccgggcgccgggagtgggcgtctgggcagcgccaggcgatggccctgctgctggtgctcctcgcctcttggggcctggggcagtgagggggccggcgggcgtgggccgagtggccgcgggcgccatggagggggtgctgtacaagtggaccaactatctgagcggttggcagcctcgatggttccttctctgtgggggaatattgtcctattatgattctcctgaagatgcctggaaaggttgcaaagggagcatacaaatggcagtctgtgaaattcaagttcattctgtagataatacacgcatggacctgataatccctggggaacagtatttctacctgaaggccagaagtgtggctgaaagacagcggtggctggtggccctgggatcagccaaggcttgcctgactgacagtaggacccagaaggagaaagagtttgctgaaaacactgaaaacttgaaaaccaaaatgtcagaactaagactctactgtgacctccttgttcagcaagtagataaaacaaaagaagtgaccacaactggtgtgtccaattctgaggagggaattgatgtgggaactttgctgaaatcaacctgtaatacttttctgaagaccttggaagaatgcatgcagatcgcaaatgcagccttcacctctgagctgctctaccgcactccaccaggatcacctcagctggccatgctcaagtccagcaagatgaaacatcctattataccaattcataattcattggaaaggcaaatggagttgagcacttgtgaaaatggatctttaaatatggaaataaatggtgaggaagaaatcctaatgaaaaataagaattccttatatttgaaatctgcagagatagactgcagcatatcaagtgaggaaaatacagatgataatataacagtccaaggtgaaataaggaaggaagatggaatggaaaacctgaaaaatcatgacaataacttgactcagtctggatcagactcaagttgctctccggaatgcctctgggaggaaggcaaagaagttatcccaactttctttagtaccatgaacacaagctttagtgacattgaacttctggaagacagtggcattcccacagaagcattcttggcatcatgttatgctgtggttccagtattagacaaacttggccctacagtgtttgctcctgttaagatggatcttgttggaaatattaagaaagtaaatcagaagtatataaccaacaaagaagagtttaccactctccagaagatagtgctgcacgaagtggaggcggatgtagcccaggttaggaactcagcgactgaagccctcttgtggctgaagagaggtctcaaatttttgaagggatttttgacagaagtgaaaaatggggagaaggatatccagacagccctaaataatgcatatggtaaaacattgcggcaacaccatggctgggtagttcgaggggtttttgcggtgtaggaatgtgggtgtagacggaactccagaaaccatcatggaccatgaggcaactctgaggatggaagccacacactaaggacggtaaagcagaaagaagagctgaaaccctgatgataaagaagcagccaattccgtcctgcactgcccacctccagatctcattcatgtgaaacaaagagaaactttatcttgttcaagtca

SEQ ID NO: 166501 - DNA, 2840 bp, Homo sapiens
  Payload ID: 12786
  Gene Symbol: PLEKHA8
  Gene Name: pleckstrin homology domain containing, family A (phosphoinositide binding specific) member 8
  ENST ID: ENST00000396259
  CDS Start-End: 323-1642
agctcgttcgccgcactttggaggcttcggctgcccctccgacccacgtagggcccggacccgggcctccttgtgaacagcgtgccggcttcgccccacgggttcaccggctggctgggcttcaagcgccgaggccgccgcagtgaccccgcccccgggccgaggatgtgaggcgggccgggcgtccccacaccgggcccgggcgccgggagtgggcgtctgggcagcgccaggcgatggccctgctgctggtgctcctcgcctcttggggcctggggcagtgagggggccggcgggcgtgggccgagtggccgcgggcgccatggagggggtgctgtacaagtggaccaactatctgagcggttggcagcctcgatggttccttctctgtgggggaatattgtcctattatgattctcctgaagatgcctggaaaggttgcaaagggagcatacaaatggcagtctgtgaaattcaagttcattctgtagataatacacgcatggacctgataatccctggggaacagtatttctacctgaaggccagaagtgtggctgaaagacagcggtggctggtggccctgggatcagccaaggcttgcctgactgacagtaggacccagaaggagaaagagtttgctgaaaacactgaaaacttgaaaaccaaaatgtcagaactaagactctactgtgacctccttgttcagcaagtagataaaacaaaagaagtgaccacaactggtgtgtccaattctgaggagggaattgatgtgggaactttgctgaaatcaacctgtaatacttttctgaagaccttggaagaatgcatgcagatcgcaaatgcagccttcacctctgagctgctctaccgcactccaccaggatcacctcagctggccatgctcaagtccagcaagatgaaacatcctattataccaattcataattcattggaaaggcaaatggagttgagcacttgtgaaaatggatctttaaatatggaaataaatggtgaggaagaaatcctaatgaaaaataagaattccttatatttgaaatctgcagagatagactgcagcatatcaagtgaggaaaatacagatgataatataacagtccaaggtgaaataaggaaggaagatggaatggaaaacctgaaaaatcatgacaataacttgactcagtctggatcagactcaagttgctctccggaatgcctctgggaggaaggcaaagaagttatcccaactttctttagtaccatgaacacaagctttagtgacattgaacttctggaagacagtggcattcccacagaagcattcttggcatcatgttatgctgtggttccagtattagacaaacttggccctacagtgtttgctcctgttaagatggatcttgttggaaatattaagaaagtaaatcagaagtatataaccaacaaagaagagtttaccactctccagaagatagtgctgcacgaagtggaggcggatgtagcccaggttaggaactcagcgactgaagccctcttgtggctgaagagaggtctcaaatttttgaagggatttttgacagaagtgaaaaatggggagaaggatatccagacagccctaagtgtaggaatgtgggtgtagacggaactccagaaaccatcatggaccatgaggcaactctgaggatggaagccacacactaaggacggtaaagcagaaagaagagctgaaaccctgatgataaagaagcagccaattccgtcctgcactgcccacctccagatctcattcatgtgaaacaaagagaaactttatcttgttcaagtcactttagtcaagatttttattatcagatgaatgcaatttctaattgatacaccttaaaattttcaacatgtacacctgatttaacaaaatctagaattaagtcaatacttctacatgcattatagaccaaaggtcactgctataagaactttgggtatatagtcaaattcctcacatttttagaaacttgtttattcattgcatccctcccccatctcactctctcacacactcacatatttattttctcagatccttataagttcataagacatatgtccttattccatttttacagatgagaaaactggggtttgcaggggttaagtaacttatccaagatcacacaattaattagtggcgaagtcataatttgaagtctttctaatgcccaaatgtttccattgtgtcacatatcggagctgtgctctttccatcagccagtttcccattatcatagctgatgacatgcacacccaccatctggggcaggctttagtacagcactctgtgccatcatccagatcaccaaatcttagtaaatggacgtgtcataagagataaggctgccatagaatcacagcagcttctggcttagtaaattacctggatacacaccttttcctagaggaaatcccacatcttcgtaggagatctggtgtaatgctcttgggacctctctctagaggatgagctagtatcactgggtcctagtaagtttcagcaaatataatagagacagaactgtcatcattatcagaaaagaaacagagaaaaatgttaaaacaatggttttgtgaccttaaagtctgtgttagtcccttagcaccaccgctgagattttgctgaaagggacgttttgtgtgttgggcttcactgaaggaagcccctgaaagtgttcagaaatagggaaaatgagaaactgttccagctgaaaatacgggcaagggggaatcattgaagaagacagaatattgaagtgttcaaatgaataaagaagctaaaaactaaa

SEQ ID NO: 166502 - DNA, 7835 bp, Homo sapiens
  Payload ID: 12786
  Gene Symbol: PLEKHA8
  Gene Name: pleckstrin homology domain containing, family A (phosphoinositide binding specific) member 8
  Uniprot ID: Q96JA3
  ENST ID: ENST00000449726
  CDS Start-End: 403-1962
ccctgggcatgcgcgagcgcgtcccgggcccggcgagtcgagggttcaggtggtgcgccgtggcgccgcctgcgaccggcagctcgttcgccgcactttggaggcttcggctgcccctccgacccacgtagggcccggacccgggcctccttgtgaacagcgtgccggcttcgccccacgggttcaccggctggctgggcttcaagcgccgaggccgccgcagtgaccccgcccccgggccgaggatgtgaggcgggccgggcgtccccacaccgggcccgggcgccgggagtgggcgtctgggcagcgccaggcgatggccctgctgctggtgctcctcgcctcttggggcctggggcagtgagggggccggcgggcgtgggccgagtggccgcgggcgccatggagggggtgctgtacaagtggaccaactatctgagcggttggcagcctcgatggttccttctctgtgggggaatattgtcctattatgattctcctgaagatgcctggaaaggttgcaaagggagcatacaaatggcagtctgtgaaattcaagttcattctgtagataatacacgcatggacctgataatccctggggaacagtatttctacctgaaggccagaagtgtggctgaaagacagcggtggctggtggccctgggatcagccaaggcttgcctgactgacagtaggacccagaaggagaaagagtttgctgaaaacactgaaaacttgaaaaccaaaatgtcagaactaagactctactgtgacctccttgttcagcaagtagataaaacaaaagaagtgaccacaactggtgtgtccaattctgaggagggaattgatgtgggaactttgctgaaatcaacctgtaatacttttctgaagaccttggaagaatgcatgcagatcgcaaatgcagccttcacctctgagctgctctaccgcactccaccaggatcacctcagctggccatgctcaagtccagcaagatgaaacatcctattataccaattcataattcattggaaaggcaaatggagttgagcacttgtgaaaatggatctttaaatatggaaataaatggtgaggaagaaatcctaatgaaaaataagaattccttatatttgaaatctgcagagatagactgcagcatatcaagtgaggaaaatacagatgataatataacagtccaaggtgaaataaggaaggaagatggaatggaaaacctgaaaaatcatgacaataacttgactcagtctggatcagactcaagttgctctccggaatgcctctgggaggaaggcaaagaagttatcccaactttctttagtaccatgaacacaagctttagtgacattgaacttctggaagacagtggcattcccacagaagcattcttggcatcatgttatgctgtggttccagtattagacaaacttggccctacagtgtttgctcctgttaagatggatcttgttggaaatattaagaaagtaaatcagaagtatataaccaacaaagaagagtttaccactctccagaagatagtgctgcacgaagtggaggcggatgtagcccaggttaggaactcagcgactgaagccctcttgtggctgaagagaggtctcaaatttttgaagggatttttgacagaagtgaaaaatggggagaaggatatccagacagccctaaataatgcatatggtaaaacattgcggcaacaccatggctgggtagttcgaggggtttttgcgttagctttaagggcagctccatcctatgaagattttgtggccgcgttaaccgtaaaggaaggtgaccaccagaaagaagctttcagtattgggatgcagagggacctcagcctttacctccctgccatggagaagcagctggccatactggacactttatatgaggtccacgggctggaatctgatgaggtggtatgatggctgctgggcagcacctcctaacttcagggaataagtgctaaagtgttttgttgccctacttaatttccagcaacagcctcaaccctctccaaccccttcacctggggggatggacaggaggtggcaaaacccagtgcttttataatttttaaaatgcatatgtgttttgtttaaagatcaaggtgctatatatttcagttcagcaggcctactggaaaccaaatgataagctgctgtagacttgaacagcaagttataagagcagatttaacaaacaaatttgctgttattgtgtattgtattgtttttatattttagtctaatgggccacccaaacccaagctgaaaatcagcaaattccatattaagtaccataattcatagccagtgtttcagccaacttagactagacatttggaggtagtataagctgctttgttgaagctgtgtagagtttgctgttcctagatgttcttcagtggaccctcttcactgcaactctgtcagtgataagggcctgtgtagtaaagatgttcagggcattcacatgaccatgcaattgtgggaggcgaagaagacgtggacaggagtcccatccttgctgacaggcatgaaaccgttgctctgagaagattaatggtgtgccctagccccaagttggaggggagaatatgagagaggtgggacaggtcatttgagatgacacctcccaactgcctaccatttaccagcatgttccccatgcattatctcaattggacatcacaagtaatgatacccagagggattattactccacttcaaaagcaaggtttagaagttgagggatctgttcacagtcacatagtttttaagcagaggagccagataatttccaagtgtgacctggactgcctctgcatcaaagtcatatggagtgcttgttcaaacagcagattcccaggccttattttggcctaaagaaccagagtctaggtggtgggacataggaatctgcatttcagtaaactttacacgtgattcttctgcacacagtattgaagagcaactagattaaattctagtttacaaaattaccagttttcttcaagaactaaatgatatgtcctttttttttttttcaaagaggataaggctgctatttaaataaaatagctaaatggagagtgagaagtggagcaggttcattcagcagcattcttaattgagccagcattgacacccagccagcaggcctttgcattgcattcggggaccatgactctgaatctgcttaccaatcaatctcggtttaatcaccaaaagtgcagagcaggcaaaatgcagctgtttatcaatctcaaaagctttgggacagtgtcatagttgaaagatgagacttaagaaaacagtttcttaaacttcttaaaacttaagaaacattgtttcataaaacaatattgagtgggcattcttctgcacagtgtgatgctccaaccctggccctagtctcagtagaccatgctgcctcgagtgtgcatcggagagaagccatgggtaccttccccattagaggctacttccttctagtaacaggaagggaagttccagcatgaggtagttatccagggtagaaggtcctttgaggggcttggttgaattgagagcatcatctctagatgatgctgttcctgctgcagatctctaggatggagagaattctctctttagtcagagaagtttatgtagggaggggtattggttttgcctttgtgtgtctttaaacaaatgaacatttatttagctcagattaattaggtattttgcccacataaagacttctggaaaatacttaaacttgaaaaatcaacatcacatgttttaaagctagggagaaagaaggggggtattaaaatgatgttgattattttgtattttgccaaggtgtgtgtgtgttatttccctcccactctcatgagcagtgagtatagatctccttctctgattagtatgaatatgatggcaggactcggggatagtccctgcccttgacatagccccctaaaacggaaaaagaaaaagccagtttttgcttgtactttgaatgaagatgttttaggcattgtaccatttagcggggatgataccaggtggttgttagaattgtgcagtgtgatcattctaaacagctgctggtgctccctgtcacctcaggtgaactctgtggtctcttggagaggtagcactctgaaaatacctcaggtttgccaccgcaactctgaatacacacaaaaggaaagctgctcagcatggccattttgcatttgtataggtagtgactagatgtacacaacttaatttgctgggaatgaggggcttaatattatctgagatcattgagaacccagatcagacagaatagcttgaataagttacattttccaattaccctttttccacatctgtagaaagagggtaatattttttaataggtattttccccactggagcatattacgtttgcctaagatgtataaaagtttgtttaagatgtgtaaaagtttgcttaaggaactgaggatccttaaataaaaatattagaaattagaaattgaacctaatactaaacagtaaattcagcttaacctgaaccttggcatagtcagagcttcctcctacatctaaagtatttgctctctgttttagttaaagtcataatttgcgctgatgtgtaatcactttccaagaagagggcaatgagaaaagatatttaaagctttctctccatagccctccaagacttctgggacaactaaatttactttcaccattactgtgagaggaggtgagaaaactctagtattttgttggcagagtaatcactttgttctcatcgctcaaagcatttttaggattatttttctagcgtaacctttagagagaactggaagaaaaaggaaattggtctactaggtattgtagacacaaataagtaacattaggctaaccccttatgagacatttccacacaatttcatcgtgcctgtacttttctctatggtaaaagccagtgtttacactttgtagggatcagggtgtatttgttgaattaaacaaaatattttcaatgatggcaagtctcttgacttttgaaagcaagtcagattccttatagctaatgctggtgaaaaatgttaaattggagagatcccttttgggagtgaaaccaaattgtaactatgaggagaagatggtcttctcattggctcttgatgtagctctgaagggagttccagaagaggagctctcacagaatgttgagcctgtgggcccaagacattgacttcgaagggtagttctcattaggatgtataagtagtggcttgaggcaccttcttatcattttttgcatgttattctgattattaaacttcccccaatgtcatattccatgatgagggatttctgaactccatagtccagcgttgttgcttttctctcttctttgctactgaaaattgccagcagtaccgccatcagcacaccaaatctacccccacttatgtttgttctgccccatttcccaggagcagcttctagcacatatgtagagtatctggcaccaccttagcccagggctgcgtgcctgatcagtggggattctgttcccccaccccccagactgcaagagcttcttaagaaggagcccatattcccatttgtagctggaaagcgggtgaatgacatgacatggggcacctaggaaagatgattattagaggagtgcagcggaaaaaaatttgcactcttctccttttggttattactttccaaatatattaacaaaaagttgatgcttttaactttatattttcagaaaagtgtttttaattaaaaatatgtgatagggaccaaataagtaaagtacatttttctccactaaatttgaagtgagggaaagaggagccaaagtaagagatttttttttaaggaaacttaatctgattgtgaaaatcatacatatggagaaacatcagatcaggcaatagagtcagagggtcatgagcaatagacgatgatgcgaggcatttggggagcttcctggaggaaaattaagtttttttcctagcaaactaccatgtcctacaagaacttggttatataatggtgcgtctctgaatcactgattaaaaccagttgcttctgattttagtcacaggttttacaagtattcagctctccctcatgtttcatttctttttttaagataatctatcaaccttttttaaattttaaaatttttagatgtagagtttataagtaaaatatatttttagccattgttctgttagctgagctgatgtgtttggtcttagagggcctgacttcagatactctttgtgatcttgtaagggctctacacaaacttcattatgtatggtaaatttgtattcttatggattgtatatagaatgctttcgttagaagtacattctacttctgtatgtccctttgtaatccgcagttgcttactcaggggtttcatagtcatttcataaaaaataattcactagctgtctaatggtattttaagactgtttatctgtatcacaacgtcattaggagttctttcaacaattccataaatatactgtttactagaccttccctgtaaatgttcccaattcccatcctgtctcagacagtcaatagtcctgtgtacagtgactatttgcatgatttctcattgcactgctgcattcaggcactccagggcatgattaaacagtcattaacagtgcctctctggtacagttgatgcatgcattgatctttcttctctgctgtttttatatagcctttaattaaaaggaaaaaaataccactactctgcaatgcaaaagtcttcaaaattctttgtttcctgtattaatcacttctgttccagagtgaacaaatgttttcagctaagctatgtgagaatgtaagaataatatcctgcttgttctaaatagttcatatatttaaagtgtggtcagtatttcctccctgtaccttacaaacagaaaccaccctgggatggttgataccccttacaaagtcgatcttacccacacagactcctgtgtatgcgtgtctgtttataggtgtatatggagtcagtgttgataggaaggatgctctagaagtacttctgttgtttcctagaaggctatgagccagttccatggcatgtttaatgtataattcccatgtatcatgagaatttcactagaatgtcattaaacagcccaactacctcatgtgaaattggctgtggacaatctgtgtcagatgagaaatgtgttcagataaatttaatctggttaatagacttaacaaattaatgtctacataaagaagaaacatgatagaccagatgccaaaggctaaaatgtacatagatttccttggattaatttttaagtcactgtttaattccatgcctagtattcttatgaatgtttgtggtttcatagatttatgcactttgaatatctgtcacgtgcagtgttaatgttacctgttcttgtctctcagcattttgaatgagcatcataatcagagtagaaggcaagttaaactataaaagtgtcaagtggcttgttaacttcttaatttaatggacctttacttagaatataatatgttggagcctcttgggaccaaccgatgagcgacagtttcatgtttagatttgtattgtttctctgtccaagtccttattctctatcttgtggggaggggtgacaggggagggttttactttttttgcaaaaatgtttgaaaatatctgtcagattttatattcgttagttataataaacttatttttaaagtattaagttctt

SEQ ID NO: 166503 - DNA, 7514 bp, Homo sapiens
  Payload ID: 12786
  Gene Symbol: PLEKHA8
  Gene Name: pleckstrin homology domain containing, family A (phosphoinositide binding specific) member 8
  ENST ID: ENST00000440706
  CDS Start-End: 1-1638
gctgctggtgctcctcgcctcttggggcctggggcagtgagggggccggcgggcgtgggccgagtggccgcgggcgccatggagggggtgctgtacaagtggaccaactatctgagcggttggcagcctcgatggttccttctctgtgggggaatattgtcctattatgattctcctgaagatgcctggaaaggttgcaaagggagcatacaaatggcagtctgtgaaattcaagttcattctgtagataatacacgcatggacctgataatccctggggaacagtatttctacctgaaggccagaagtgtggctgaaagacagcggtggctggtggccctgggatcagccaaggcttgcctgactgacagtaggacccagaaggagaaagagtttgctgaaaacactgaaaacttgaaaaccaaaatgtcagaactaagactctactgtgacctccttgttcagcaagtagataaaacaaaagaagtgaccacaactggtgtgtccaattctgaggagggaattgatgtgggaactttgctgaaatcaacctgtaatacttttctgaagaccttggaagaatgcatgcagatcgcaaatgcagccttcacctctgagctgctctaccgcactccaccaggatcacctcagctggccatgctcaagtccagcaagatgaaacatcctattataccaattcataattcattggaaaggcaaatggagttgagcacttgtgaaaatggatctttaaatatggaaataaatggtgaggaagaaatcctaatgaaaaataagaattccttatatttgaaatctgcagagatagactgcagcatatcaagtgaggaaaatacagatgataatataacagtccaaggtgaaataaggaaggaagatggaatggaaaacctgaaaaatcatgacaataacttgactcagtctggatcagactcaagttgctctccggaatgcctctgggaggaaggcaaagaagttatcccaactttctttagtaccatgaacacaagctttagtgacattgaacttctggaagacagtggcattcccacagaagcattcttggcatcatgttatgctgtggttccagtattagacaaacttggccctacagtgtttgctcctgttaagatggatcttgttggaaatattaagaaagtaaatcagaagtatataaccaacaaagaagagtttaccactctccagaagatagtgctgcacgaagtggaggcggatgtagcccaggttaggaactcagcgactgaagccctcttgtggctgaagagaggtctcaaatttttgaagggatttttgacagaagtgaaaaatggggagaaggatatccagacagccctaaataatgcatatggtaaaacattgcggcaacaccatggctgggtagttcgaggggtttttgcgttagctttaagggcagctccatcctatgaagattttgtggccgcgttaaccgtaaaggaaggtgaccaccagaaagaagctttcagtattgggatgcagagggacctcagcctttacctccctgccatggagaagcagctggccatactggacactttatatgaggtccacgggctggaatctgatgaggtggtatgatggctgctgggcagcacctcctaacttcagggaataagtgctaaagtgttttgttgccctacttaatttccagcaacagcctcaaccctctccaaccccttcacctggggggatggacaggaggtggcaaaacccagtgcttttataatttttaaaatgcatatgtgttttgtttaaagatcaaggtgctatatatttcagttcagcaggcctactggaaaccaaatgataagctgctgtagacttgaacagcaagttataagagcagatttaacaaacaaatttgctgttattgtgtattgtattgtttttatattttagtctaatgggccacccaaacccaagctgaaaatcagcaaattccatattaagtaccataattcatagccagtgtttcagccaacttagactagacatttggaggtagtataagctgctttgttgaagctgtgtagagtttgctgttcctagatgttcttcagtggaccctcttcactgcaactctgtcagtgataagggcctgtgtagtaaagatgttcagggcattcacatgaccatgcaattgtgggaggcgaagaagacgtggacaggagtcccatccttgctgacaggcatgaaaccgttgctctgagaagattaatggtgtgccctagccccaagttggaggggagaatatgagagaggtgggacaggtcatttgagatgacacctcccaactgcctaccatttaccagcatgttccccatgcattatctcaattggacatcacaagtaatgatacccagagggattattactccacttcaaaagcaaggtttagaagttgagggatctgttcacagtcacatagtttttaagcagaggagccagataatttccaagtgtgacctggactgcctctgcatcaaagtcatatggagtgcttgttcaaacagcagattcccaggccttattttggcctaaagaaccagagtctaggtggtgggacataggaatctgcatttcagtaaactttacacgtgattcttctgcacacagtattgaagagcaactagattaaattctagtttacaaaattaccagttttcttcaagaactaaatgatatgtcctttttttttttttcaaagaggataaggctgctatttaaataaaatagctaaatggagagtgagaagtggagcaggttcattcagcagcattcttaattgagccagcattgacacccagccagcaggcctttgcattgcattcggggaccatgactctgaatctgcttaccaatcaatctcggtttaatcaccaaaagtgcagagcaggcaaaatgcagctgtttatcaatctcaaaagctttgggacagtgtcatagttgaaagatgagacttaagaaaacagtttcttaaacttcttaaaacttaagaaacattgtttcataaaacaatattgagtgggcattcttctgcacagtgtgatgctccaaccctggccctagtctcagtagaccatgctgcctcgagtgtgcatcggagagaagccatgggtaccttccccattagaggctacttccttctagtaacaggaagggaagttccagcatgaggtagttatccagggtagaaggtcctttgaggggcttggttgaattgagagcatcatctctagatgatgctgttcctgctgcagatctctaggatggagagaattctctctttagtcagagaagtttatgtagggaggggtattggttttgcctttgtgtgtctttaaacaaatgaacatttatttagctcagattaattaggtattttgcccacataaagacttctggaaaatacttaaacttgaaaaatcaacatcacatgttttaaagctagggagaaagaaggggggtattaaaatgatgttgattattttgtattttgccaaggtgtgtgtgtgttatttccctcccactctcatgagcagtgagtatagatctccttctctgattagtatgaatatgatggcaggactcggggatagtccctgcccttgacatagccccctaaaacggaaaaagaaaaagccagtttttgcttgtactttgaatgaagatgttttaggcattgtaccatttagcggggatgataccaggtggttgttagaattgtgcagtgtgatcattctaaacagctgctggtgctccctgtcacctcaggtgaactctgtggtctcttggagaggtagcactctgaaaatacctcaggtttgccaccgcaactctgaatacacacaaaaggaaagctgctcagcatggccattttgcatttgtataggtagtgactagatgtacacaacttaatttgctgggaatgaggggcttaatattatctgagatcattgagaacccagatcagacagaatagcttgaataagttacattttccaattaccctttttccacatctgtagaaagagggtaatattttttaataggtattttccccactggagcatattacgtttgcctaagatgtataaaagtttgtttaagatgtgtaaaagtttgcttaaggaactgaggatccttaaataaaaatattagaaattagaaattgaacctaatactaaacagtaaattcagcttaacctgaaccttggcatagtcagagcttcctcctacatctaaagtatttgctctctgttttagttaaagtcataatttgcgctgatgtgtaatcactttccaagaagagggcaatgagaaaagatatttaaagctttctctccatagccctccaagacttctgggacaactaaatttactttcaccattactgtgagaggaggtgagaaaactctagtattttgttggcagagtaatcactttgttctcatcgctcaaagcatttttaggattatttttctagcgtaacctttagagagaactggaagaaaaaggaaattggtctactaggtattgtagacacaaataagtaacattaggctaaccccttatgagacatttccacacaatttcatcgtgcctgtacttttctctatggtaaaagccagtgtttacactttgtagggatcagggtgtatttgttgaattaaacaaaatattttcaatgatggcaagtctcttgacttttgaaagcaagtcagattccttatagctaatgctggtgaaaaatgttaaattggagagatcccttttgggagtgaaaccaaattgtaactatgaggagaagatggtcttctcattggctcttgatgtagctctgaagggagttccagaagaggagctctcacagaatgttgagcctgtgggcccaagacattgacttcgaagggtagttctcattaggatgtataagtagtggcttgaggcaccttcttatcattttttgcatgttattctgattattaaacttcccccaatgtcatattccatgatgagggatttctgaactccatagtccagcgttgttgcttttctctcttctttgctactgaaaattgccagcagtaccgccatcagcacaccaaatctacccccacttatgtttgttctgccccatttcccaggagcagcttctagcacatatgtagagtatctggcaccaccttagcccagggctgcgtgcctgatcagtggggattctgttcccccaccccccagactgcaagagcttcttaagaaggagcccatattcccatttgtagctggaaagcgggtgaatgacatgacatggggcacctaggaaagatgattattagaggagtgcagcggaaaaaaatttgcactcttctccttttggttattactttccaaatatattaacaaaaagttgatgcttttaactttatattttcagaaaagtgtttttaattaaaaatatgtgatagggaccaaataagtaaagtacatttttctccactaaatttgaagtgagggaaagaggagccaaagtaagagatttttttttaaggaaacttaatctgattgtgaaaatcatacatatggagaaacatcagatcaggcaatagagtcagagggtcatgagcaatagacgatgatgcgaggcatttggggagcttcctggaggaaaattaagtttttttcctagcaaactaccatgtcctacaagaacttggttatataatggtgcgtctctgaatcactgattaaaaccagttgcttctgattttagtcacaggttttacaagtattcagctctccctcatgtttcatttctttttttaagataatctatcaaccttttttaaattttaaaatttttagatgtagagtttataagtaaaatatatttttagccattgttctgttagctgagctgatgtgtttggtcttagagggcctgacttcagatactctttgtgatcttgtaagggctctacacaaacttcattatgtatggtaaatttgtattcttatggattgtatatagaatgctttcgttagaagtacattctacttctgtatgtccctttgtaatccgcagttgcttactcaggggtttcatagtcatttcataaaaaataattcactagctgtctaatggtattttaagactgtttatctgtatcacaacgtcattaggagttctttcaacaattccataaatatactgtttactagaccttccctgtaaatgttcccaattcccatcctgtctcagacagtcaatagtcctgtgtacagtgactatttgcatgatttctcattgcactgctgcattcaggcactccagggcatgattaaacagtcattaacagtgcctctctggtacagttgatgcatgcattgatctttcttctctgctgtttttatatagcctttaattaaaaggaaaaaaataccactactctgcaatgcaaaagtcttcaaaattctttgtttcctgtattaatcacttctgttccagagtgaacaaatgttttcagctaagctatgtgagaatgtaagaataatatcctgcttgttctaaatagttcatatatttaaagtgtggtcagtatttcctccctgtaccttacaaacagaaaccaccctgggatggttgataccccttacaaagtcgatcttacccacacagactcctgtgtatgcgtgtctgtttataggtgtatatggagtcagtgttgataggaaggatgctctagaagtacttctgttgtttcctagaaggctatgagccagttccatggcatgtttaatgtataattcccatgtatcatgagaatttcactagaatgtcattaaacagcccaactacctcatgtgaaattggctgtggacaatctgtgtcagatgagaaatgtgttcagataaatttaatctggttaatagacttaacaaattaatgtctacataaagaagaaacatgatagaccagatgccaaaggctaaaatgtacatagatttccttggattaatttttaagtcactgtttaattccatgcctagtattcttatgaatgtttgtggtttcatagatttatgcactttgaatatctgtcacgtgcagtgttaatgttacctgttcttgtctctcagcattttgaatgagcatcataatcagagtagaaggcaagttaaactataaaagtgtcaagtggcttgttaacttcttaatttaatggacctttacttagaatataatatgttggagcctcttgggaccaaccgatgagcgacagtttcatgtttagatttgtattgtttctctgtccaagtccttattctctatcttgtggggaggggtgacaggggagggttttactttttttgcaaaaatgtttgaaaatatctgtcagattttatattcgttagttataataaacttatttttaaagtattaagttcttaaa

SEQ ID NO: 166504 - DNA, 2140 bp, Homo sapiens
  Payload ID: 12786
  Gene Symbol: PLEKHA8
  Gene Name: pleckstrin homology domain containing, family A (phosphoinositide binding specific) member 8
  ENST ID: ENST00000622102
  CDS Start-End: 403-1782
ccctgggcatgcgcgagcgcgtcccgggcccggcgagtcgagggttcaggtggtgcgccgtggcgccgcctgcgaccggcagctcgttcgccgcactttggaggcttcggctgcccctccgacccacgtagggcccggacccgggcctccttgtgaacagcgtgccggcttcgccccacgggttcaccggctggctgggcttcaagcgccgaggccgccgcagtgaccccgcccccgggccgaggatgtgaggcgggccgggcgtccccacaccgggcccgggcgccgggagtgggcgtctgggcagcgccaggcgatggccctgctgctggtgctcctcgcctcttggggcctggggcagtgagggggccggcgggcgtgggccgagtggccgcgggcgccatggagggggtgctgtacaagtggaccaactatctgagcggttggcagcctcgatggttccttctctgtgggggaatattgtcctattatgattctcctgaagatgcctggaaaggttgcaaagggagcatacaaatggcagtctgtgaaattcaagttcattctgtagataatacacgcatggacctgataatccctggggaacagtatttctacctgaaggccagaagtgtggctgaaagacagcggtggctggtggccctgggatcagccaaggcttgcctgactgacagtaggacccagaaggagaaagagtttgctgaaaacactgaaaacttgaaaaccaaaatgtcagaactaagactctactgtgacctccttgttcagcaagtagataaaacaaaagaagtgaccacaactggtgtgtccaattctgaggagggaattgatgtgggaactttgctgaaatcaacctgtaatacttttctgaagaccttggaagaatgcatgcagatcgcaaatgcagccttcacctctgagctgctctaccgcactccaccaggatcacctcagctggccatgctcaagtccagcaagatgaaacatcctattataccaattcataattcattggaaaggcaaatggagttgagcacttgtgaaaatggatctttaaatatggaaataaatggtgaggaagaaatcctaatgaaaaataagaattccttatatttgaaatctgcagagatagactgcagcatatcaagtgaggaaaatacagatgataatataacagtccaaggtgaaataaggaaggaagatggaatggaaaacctgaaaaatcatgacaataacttgactcagtctggatcagactcaagttgctctccggaatgcctctgggaggaaggcaaagaagttatcccaactttctttagtaccatgaacacaagctttagtgacattgaacttctggaagacagtggcattcccacagaagcattcttggcatcatgttatgctgtggttccagtattagacaaacttggccctacagtgtttgctcctgttaagatggatcttgttggaaatattaagaaagtaaatcagaagtatataaccaacaaagaagagtttaccactctccagaagatagtgctgcacgaagtggaggcggatgtagcccaggttaggaactcagcgactgaagccctcttgtggctgaagagaggtctcaaatttttgaagggatttttgacagaagtgaaaaatggggagaaggatatccagacagccctaaataatgcatatggtaaaacattgcggcaacaccatggctgggtagttcgaggggtttttgcgggacacacaaatgtctgatggtggcccaggagggctgtcactcagaatcaggcgggtgcagagtggcctgcaggacatgatgacccagcatgagacaggatgcatcacatctgggtgacgcctctctccaggggatcagcctggactaaatgcctctcctgggccaggatgcccagcaagccccgagatgcctcctggagagaaggaagtatgtgagagtatcctgagttaagtgagatctaaaatgcctgagaaaaccctgaaatgactgagtctatctggaacttatttgattgtttttctgccatcagatagaatgaggtctcaaaagagaaattaaattatattacaagaaaataaagctcaattgcttgcc

SEQ ID NO: 166505 - DNA, 4238 bp, Homo sapiens
  Payload ID: 12787
  Gene Symbol: PLEKHA5
  Gene Name: pleckstrin homology domain containing, family A member 5
  Uniprot ID: Q9HAU0
  ENST ID: ENST00000299275
  CDS Start-End: 7-3357
tcagacatggcggcggatctgaacctggagtggatctccctgccccggtcctggacttacgggatcaccaggggcggccgagtcttcttcatcaacgaggaggccaagagcaccacctggctgcaccccgtcaccggcgaggcggtggtcaccggacaccggcggcagagcacagatttgcctactggctgggaagaagcatatacttttgaaggtgcaagatactatataaaccataatgaaaggaaagtgacctgcaaacatccagtcacaggacaaccatcacaggacaattgtatttttgtagtgaatgaacagactgttgcaaccatgacatctgaagaaaagaaggaacggccaataagtatgataaatgaagcttctaactataacgtgacttcagattatgcagtgcatccaatgagccctgtaggcagaacttcacgagcttcaaaaaaagttcataattttggaaagaggtcaaattcaattaaaaggaatcctaatgcaccggttgtcagacgaggttggctttataaacaggacagtactggcatgaaattgtggaagaaacgctggtttgtgctttctgacctttgcctcttttattatagagatgagaaagaagagggtatcctgggaagcatactgttacctagttttcagatagctttgcttacctctgaagatcacattaatcgcaaatatgcttttaaggcagcccatccaaacatgcggacctattatttctgcactgatacaggaaaggaaatggagttgtggatgaaagccatgttagatgctgccctagtacagacagaacctgtgaaaagagtggacaagattacatctgaaaatgcaccaactaaagaaaccaataacattcccaaccatagagtgctaattaaaccagagatccaaaacaatcaaaaaaacaaggaaatgagcaaaattgaagaaaaaaaggcattagaagctgaaaaatatggatttcagaaggatggtcaagatagacccttaacaaaaattaatagtgtaaagctgaattctctgccatctgaatatgagagtgggtcagcatgccctgctcagactgtgcactacagaccaatcaacttgagcagttcagagaacaaaatagtcaatgttagcctggcagatcttagaggtggaaatcgccccaatacagggcccttatacacagaggccgatcgagtcatacagagaacaaattcaatgcagcagttggaacagtggattaaaatccagaaggggaggggtcatgaagaagaaaccaggggagtaatttcttaccaaacattaccaagaaatatgccaagtcacagagcccagattatggcccgctaccctgaaggttatagaacactcccaagaaacagcaagacaaggcctgaaagtatctgcagtgtaaccccttccactcatgacaagacattaggacccggagcggaggagaaacggaggtccatgagagatgacacaatgtggcagctctacgaatggcagcagcgtcagttttataacaaacagagcaccctccctcgacacagtactttgagtagtcccaaaaccatggtaaatatttctgaccagacaatgcactctattcccacatcaccttcccacgggtcaatagctgcttatcagggatactcccctcaacgaacttacagatcggaagtgtcttcaccaattcagagaggagatgtgacaatagaccgcagacacagggcccatcaccctaagcatgtctatgtgcctgacagaaggtcagtgccagctggcctgactttacagtctgttagtccccagagcctccaagggaaaacgctgtcacaagatgaaggtagaggcacattatacaaatacagacctgaagaagtagatattgatgccaagttaagccgattatgtgaacaagataaagtggtgcatgctctggaagagaaacttcagcaactccacaaggagaaatacacgcttgagcaagctttgctatcagccagccaagagatagaaatgcatgcagataacccagcagccattcagacagtggtgttacaaagggatgatttacaaaatggactgcttagtacgtgtcgagaactttctcgagccactgccgaattggaacgagcatggagagaatatgataagttagaatacgatgtaactgttaccaggaaccagatgcaagagcagctggatcaccttggtgaagttcagacggaatcagcaggaattcagcgtgcacagattcagaaagaactttggcgaattcaggatgtcatggaagggctgagtaaacataagcagcaaagaggtactacagaaataggtatgataggatcaaagcctttctcaacagttaagtacaaaaatgagggtccagattatagactctacaagagtgaaccagagttaacaacagtggcagaagttgatgaatctaatggagaagaaaaatcagaacctgtttcagagatagaaacttcagttgttaaaggttcccactttcctgttggagtagtccctccaagagcaaaatcaccaacacccgaatcttcgacaatagcttcctatgtaaccttgaggaaaactaagaagatgatggatctaagaacggaaagaccaagaagtgcagtggaacagctctgtttggctgaaagtactcgaccaaggatgactgtggaagagcaaatggaaagaataagaagacatcaacaagcgtgcctgagggagaagaaaaaagggttaaatgttatcggtgcttcagaccagtcacccttacaaagcccttcaaatttaagggataatccatttaggactactcagactcgaaggagggatgataaggaactggacactgccattagagaaaatgatgtaaagccagaccatgaaactcctgcaacagaaattgttcaactaaaagaaaccgaaccccaaaatgtggacttcagcaaagagttaaaaaaaactgaaaacatttcatatgaaatgctttttgaacctgagccaaatggagtaaattctgtggaaatgatggataaagaaagaaacaaagacaaaatgcctgaggatgttacattcagccctcaagatgaaacacagaccgcaaatcataaaccagaagagcatcctgaagaaaatacaaagaacagtgttgacgaacaggaagaaactgttatttcttacgaatcaactcctgaggtttctagaggaaatcaaacaatggcagtgaaaagtctgtccccatctcctgagtcctcggcatcgccagttccatccactcagccgcagctcacagaaggatcacatttcatgtgtgtgtagtcttagaagaactatactgacttctgttgaaaccattcaaagctaaagacatggaccttcagcagtgtaagaagatattgtacagtatattttaaatctatgaaattcatagttctgatgcttttggtcacagagcatcattttatcacttctggaaaatgtttattccaaaacagctttaatggcccatatgtacacttcgtaatctcaaggttattattctgacaccagcttgctgctatgatttcagagcacataagtaaaggtgctttttaatgtgcagtctatttccagagcttacttagttgctgatttccagatttcgatgtttcttaagtctaggtgaatttatatatatatttttttgcttttcattttctaaagttagttattatttccattgaagcttgttttcttttttttcttcccattttagctactgcagtgcttttgtttcacacttgatttgtaaaaattttatatatatgtatttaaaatgtgccattttattgctaagtgaagtatgtcctgttttctgctataattctttctcggtcagattgcaatgtcagcagttactgccacactcctgtcagcttaaacacaaatgttactgcttatcttttcttaaaaaaaaaaaaaacaaagtgtaggtattttgaagtactgggcttatatttcattggaatacatgtgtacagcaataagcaggtttccaaatccggtacttagtttgtgtacaaatgtaattatgttcattgtgtatatattatacaatgagcacatgtaatgtattaaaggctacttactattgtttaaatgcaaatgttcatatctcatttctttttttatcatgttaaataaatgttgatgttcttaaa

SEQ ID NO: 166506 - DNA, 4391 bp, Homo sapiens
  Payload ID: 12787
  Gene Symbol: PLEKHA5
  Gene Name: pleckstrin homology domain containing, family A member 5
  Uniprot ID: Q9HAU0
  ENST ID: ENST00000424268
  CDS Start-End: 217-3513
aaaagagatcacggtgtgcccctttgtcatcgttctgtcaggaagcatgtaatttgtctttagaaaccagaagcctgagacaaagaaaagaacacagatttttagcaaaaggctatttgccataatgaaaggaaagtgacctgcaaacatccagtcacaggacaaccatcacaggacaattgtatttttgtagtgaatgaacagactgttgcaaccatgacatctgaagaaaagaaggaacggccaataagtatgataaatgaagcttctaactataacgtgacttcagattatgcagtgcatccaatgagccctgtaggcagaacttcacgagcttcaaaaaaagttcataattttggaaagaggtcaaattcaattaaaaggaatcctaatgcaccggttgtcagacgaggttggctttataaacaggacagtactggcatgaaattgtggaagaaacgctggtttgtgctttctgacctttgcctcttttattatagagatgagaaagaagagggtatcctgggaagcatactgttacctagttttcagatagctttgcttacctctgaagatcacattaatcgcaaatatgcttttaaggcagcccatccaaacatgcggacctattatttctgcactgatacaggaaaggaaatggagttgtggatgaaagccatgttagatgctgccctagtacagacagaacctgtgaaaagagtggacaagattacatctgaaaatgcaccaactaaagaaaccaataacattcccaaccatagagtgctaattaaaccagagatccaaaacaatcaaaaaaacaaggaaatgagcaaaattgaagaaaaaaaggcattagaagctgaaaaatatggatttcagaaggatggtcaagatagacccttaacaaaaattaatagtgtaaagctgaattctctgccatctgaatatgagagtgggtcagcatgccctgctcagactgtgcactacagaccaatcaacttgagcagttcagagaacaaaatagtcaatgttagcctggcagatcttagaggtggaaatcgccccaatacagggcccttatacacagaggccgatcgagtcatacagagaacaaattcaatgcagcagttggaacagtggattaaaatccagaaggggaggggtcatgaagaagaaaccaggggagtaatttcttaccaaacattaccaagaaatatgccaagtcacagagcccagattatggcccgctaccctgaaggttatagaacactcccaagaaacagcaagacaaggcctgaaagtatctgcagtgtaaccccttccactcatgacaagacattaggacccggagcggaggagaaacggaggtccatgagagatgacacaatgtggcagctctacgaatggcagcagcgtcagttttataacaaacagagcaccctccctcgacacagtactttgagtagtcccaaaaccatggtaaatatttctgaccagacaatgcactctattcccacatcaccttcccacgggtcaatagctgcttatcagggatactcccctcaacgaacttacagatcggaagtgtcttcaccaattcagagaggagatgtgacaatagaccgcagacacagggcccatcaccctaagcatgtctatgtgcctgacagaaggtcagtgccagctggcctgactttacagtctgttagtccccagagcctccaagggaaaacgatgaaagaaaatgaacctattatcaccatggttcacacaatgattgagaactcggcgctaagaccccaactgtaccagcaactgtcacaagatgaaggtagaggcacattatacaaatacagacctgaagaagtagatattgatgccaagttaagccgattatgtgaacaagataaagtggtgcatgctctggaagagaaacttcagcaactccacaaggagaaatacacgcttgagcaagctttgctatcagccagccaagagatagaaatgcatgcagataacccagcagccattcagacagtggtgttacaaagggatgatttacaaaatggactgcttagtacgtgtcgagaactttctcgagccactgccgaattggaacgagcatggagagaatatgataagttagaatacgatgtaactgttaccaggaaccagatgcaagagcagctggatcaccttggtgaagttcagacggaatcagcaggaattcagcgtgcacagattcagaaagaactttggcgaattcaggatgtcatggaagggctgagtaaacataagcagcaaagaggtactacagaaataggtatgataggatcaaagcctttctcaacagttaagtacaaaaatgaggaagaggaagtagtcccacctcgtcctccacttcctcggtcctatgactttacagagcagcctcccataatcccccctctgcccagtgatagcagctccttgctctgttatagcaggggcccagttcatctgcctgaagaaaagaagatgtatcaagttcaaggatatccaagaaatggatctcactgtggtccagattatagactctacaagagtgaaccagagttaacaacagtggcagaagttgatgaatctaatggagaagaaaaatcagaacctgtttcagagatagaaacttcagttgttaaaggttcccactttcctgttggagtagtccctccaagagcaaaatcaccaacacccgaatcttcgacaatagcttcctatgtaaccttgaggaaaactaagaagatgatggatctaagaacggaaagaccaagaagtgcagtggaacagctctgtttggctgaaagtactcgaccaaggatgactgtggaagagcaaatggaaagaataagaagacatcaacaagcgtgcctgagggagaagaaaaaagggttaaatgttatcggtgcttcagaccagtcacccttacaaagcccttcaaatttaagggataatccatttaggactactcagactcgaaggagggatgataaggaactggacactgccattagagaaaatgatgtaaagccagaccatgaaactcctgcaacagaaattgttcaactaaaagaaaccgaaccccaaaatgtggacttcagcaaagagttaaaaaaaactgaaaacatttcatatgaaatgctttttgaacctgagccaaatggagtaaattctgtggaaatgatggataaagaaagaaacaaagacaaaatgcctgaggatgttacattcagccctcaagatgaaacacagaccgcaaatcataaaccagaagagcatcctgaagaaaatacaaagaacagtgttgacgaacaggaagaaactgttatttcttacgaatcaactcctgaggtttctagaggaaatcaaacaatggcagtgaaaagtctgtccccatctcctgagtcctcggcatcgccagttccatccactcagccgcagctcacagaaggatcacatttcatgtgtgtgtagtcttagaagaactatactgacttctgttgaaaccattcaaagctaaagacatggaccttcagcagtgtaagaagatattgtacagtatattttaaatctatgaaattcatagttctgatgcttttggtcacagagcatcattttatcacttctggaaaatgtttattccaaaacagctttaatggcccatatgtacacttcgtaatctcaaggttattattctgacaccagcttgctgctatgatttcagagcacataagtaaaggtgctttttaatgtgcagtctatttccagagcttacttagttgctgatttccagatttcgatgtttcttaagtctaggtgaatttatatatatatttttttgcttttcattttctaaagttagttattatttccattgaagcttgttttcttttttttcttcccattttagctactgcagtgcttttgtttcacacttgatttgtaaaaattttatatatatgtatttaaaatgtgccattttattgctaagtgaagtatgtcctgttttctgctataattctttctcggtcagattgcaatgtcagcagttactgccacactcctgtcagcttaaacacaaatgttactgcttatcttttcttaaaaaaaaaaaaaacaaagtgtaggtattttgaagtactgggcttatatttcattggaatacatgtgtacagcaataagcaggtttccaaatccggtacttagtttgtgtacaaatgtaattatgttcattgtgtatatattatacaatgagcacatgtaatgtattaaaggctacttactattgtttaaatgcaaatgttcatatctcatttctttttttatcatgttaaataaatgttgatgttctt

SEQ ID NO: 166507 - DNA, 4762 bp, Homo sapiens
  Payload ID: 12787
  Gene Symbol: PLEKHA5
  Gene Name: pleckstrin homology domain containing, family A member 5
  Uniprot ID: Q9HAU0
  ENST ID: ENST00000429027
  CDS Start-End: 33-3881
gagaaggcggcggcggcggctagggatcagacatggcggcggatctgaacctggagtggatctccctgccccggtcctggacttacgggatcaccaggggcggccgagtcttcttcatcaacgaggaggccaagagcaccacctggctgcaccccgtcaccggcgaggcggtggtcaccggacaccggcggcagagcacagatttgcctactggctgggaagaagcatatacttttgaaggtgcaagatactatataaaccataatgaaaggaaagtgacctgcaaacatccagtcacaggacaaccatcacaggacaattgtatttttgtagtgaatgaacagactgttgcaaccatgacatctgaagaaaagaaggaacggccaataagtatgataaatgaagcttctaactataacgtgacttcagattatgcagtgcatccaatgagccctgtaggcagaacttcacgagcttcaaaaaaagttcataattttggaaagaggtcaaattcaattaaaaggaatcctaatgcaccggttgtcagacgaggttggctttataaacaggacagtactggcatgaaattgtggaagaaacgctggtttgtgctttctgacctttgcctcttttattatagagatgagaaagaagagggtatcctgggaagcatactgttacctagttttcagatagctttgcttacctctgaagatcacattaatcgcaaatatgcttttaaggcagcccatccaaacatgcggacctattatttctgcactgatacaggaaaggaaatggagttgtggatgaaagccatgttagatgctgccctagtacagacagaacctgtgaaaagaattacctttaatttccgagtggacaagattacatctgaaaatgcaccaactaaagaaaccaataacattcccaaccatagagtgctaattaaaccagagatccaaaacaatcaaaaaaacaaggaaatgagcaaaattgaagaaaaaaaggcattagaagctgaaaaatatggatttcagaaggatggtcaagatagacccttaacaaaaattaatagtgtaaagctgaattctctgccatctgaatatgagagtgggtcagcatgccctgctcagactgtgcactacagaccaatcaacttgagcagttcagagaacaaaatagtcaatgttagcctggcagatcttagaggtggaaatcgccccaatacagggcccttatacacagaggccgatcgagtcatacagagaacaaattcaatgcagcagttggaacagtggattaaaatccagaaggggaggggtcatgaagaagaaaccaggggagtaatttcttaccaaacattaccaagaaatatgccaagtcacagagcccagattatggcccgctaccctgaaggttatagaacactcccaagaaacagcaagacaaggcctgaaagtatctgcagtgtaaccccttccactcatgacaagacattaggacccggagcggaggagaaacggaggtccatgagagatgacacaatgtggcagctctacgaatggcagcagcgtcagttttataacaaacagagcaccctccctcgacacagtactttgagtagtcccaaaaccatggtaaatatttctgaccagacaatgcactctattcccacatcaccttcccacgggtcaatagctgcttatcagggatactcccctcaacgaacttacagatcggaagtgtcttcaccaattcagagaggagatgtgacaatagaccgcagacacagggcccatcaccctaagcatgtctatgtgcctgacagaaggtcagtgccagctggcctgactttacagtctgttagtccccagagcctccaagggaaaacgccagaggagcttacgctgctgctaataaagctgagacggcagcaagccgaactgagtagtatccgggagcatacgttagcacagctcatgcagctaaagcttgaggcccacagcccaaagaatgaaattctttcacatcatctccaaaggaacaccatatatttggatcatcagatgaaagaaaatgaacctattatcaccatggttcacacaatgattgagaactcggcgctaagaccccaactgtaccagcaattcttaagacagaagagcaagataagtctatattgtctgtcacaagatgaaggtagaggcacattatacaaatacagacctgaagaagtagatattgatgccaagttaagccgattatgtgaacaagataaagtggtgcatgctctggaagagaaacttcagcaactccacaaggagaaatacacgcttgagcaagctttgctatcagccagccaagagatagaaatgcatgcagataacccagcagccattcagacagtggtgttacaaagggatgatttacaaaatggactgcttagtacgtgtcgagaactttctcgagccactgccgaattggaacgagcatggagagaatatgataagttagaatacgatgtaactgttaccaggaaccagatgcaagagcagctggatcaccttggtgaagttcagacggaatcagcaggaattcagcgtgcacagattcagaaagaactttggcgaattcaggatgtcatggaagggctgagtaaacataagcagcaaagaggtactacagaaataggtatgataggatcaaagcctttctcaacagttaagtacaaaaatgaggaagaggaagtagtcccacctcgtcctccacttcctcggtcctatgactttacagagcagcctcccataatcccccctctgcccagtgatagcagctccttgctctgttatagcaggggcccagttcatctgcctgaagaaaagaagatgtatcaagttcaaggatatccaagaaatggatctcactgtggtccagattatagactctacaagagtgaaccagagttaacaacagtggcagaagttgatgaatctaatggagaagaaaaatcagaacctgtttcagagatagaaacttcagttgttaaaggttcccactttcctgttggagtagtccctccaagagcaaaatcaccaacacccgaatcttcgacaatagcttcctatgtaaccttgaggaaaactaagaagatgatggatctaagaacggaaagaccaagaagtgcagtggaacagctctgtttggctgaaagtactcgaccaaggatgactgtggaagagcaaatggaaagaataagaagacatcaacaagcgtgcctgagggagaagaaaaaagggttaaatgttatcggtgcttcagaccagtcacccttacaaagcccttcaaatttaagggataatccatttaggactactcagactcgaaggagggatgataaggaactggacactgccattagagaaaatgatgtaaagccagaccatgaaactcctgcaacagaaattgttcaactaaaagaaaccgaaccccaaaatgtggacttcagcaaagagttaaaaaaaactgaaaacatttcatatgaaatgctttttgaacctgagccaaatggagtaaattctgtggaaatgatggataaagaaagaaacaaagacaaaatgcctgaggatgttacattcagccctcaagatgaaacacagaccgcaaatcataaaccagaagagcatcctgaagaaaatacaaagaacagtgttgacgaacaggaagaaactgttatttcttacgaatcaactcctgaggtttctagaggaaatcaaacaatggcagtgaaaagtctgtccccatctcctgagtcctcggcatcgccagttccatccactcagccgcagctcacagaaggatcacatttcatgtgtgtgtagtcttagaagaactatactgacttctgttgaaaccattcaaagctaaagacatggaccttcagcagtgtaagaagatattgtacagtatattttaaatctatgaaattcatagttctgatgcttttggtcacagagcatcattttatcacttctggaaaatgtttattccaaaacagctttaatggcccatatgtacacttcgtaatctcaaggttattattctgacaccagcttgctgctatgatttcagagcacataagtaaaggtgctttttaatgtgcagtctatttccagagcttacttagttgctgatttccagatttcgatgtttcttaagtctaggtgaatttatatatatatttttttgcttttcattttctaaagttagttattatttccattgaagcttgttttcttttttttcttcccattttagctactgcagtgcttttgtttcacacttgatttgtaaaaattttatatatatgtatttaaaatgtgccattttattgctaagtgaagtatgtcctgttttctgctataattctttctcggtcagattgcaatgtcagcagttactgccacactcctgtcagcttaaacacaaatgttactgcttatcttttcttaaaaaaaaaaaaaacaaagtgtaggtattttgaagtactgggcttatatttcattggaatacatgtgtacagcaataagcaggtttccaaatccggtacttagtttgtgtacaaatgtaattatgttcattgtgtatatattatacaatgagcacatgtaatgtattaaaggctacttactattgtttaaatgcaaatgttcatatctcatttctttttttatcatgttaaataaatgttgatgttcttaaa

SEQ ID NO: 166508 - DNA, 1954 bp, Homo sapiens
  Payload ID: 12787
  Gene Symbol: PLEKHA5
  Gene Name: pleckstrin homology domain containing, family A member 5
  Uniprot ID: Q9HAU0
  ENST ID: ENST00000540972
  CDS Start-End: 49-279
gccgcggcggcagcaggagaaggcggcggcggcggctagggatcagacatggcggcggatctgaacctggagtggatctccctgccccggtcctggacttacgggatcaccaggggcggccgagtcttcttcatcaacgaggaggccaagagcaccacctggctgcaccccgtcaccggcgaggcggtggtcaccggacaccggcggcagagcacagatttgcctactggctgggaagaagcatatacttttgaaggtgcaagatactatataaactgaatagatttccttttcattcttcctgggaatagaagatgtaatggaagttccagtatctgtatgcaggcctatgactagcttcacttcttggtgactaatactagttgacaaaacagcatattctaaactgattgtcttcgttatccagtagctttcctattctccataacaaatgttccaaatctttgattactcacctcagaatgcttgtctcactcctcttttcctcattcctagtagatcataccttggagaagaaagtagaaactatcaggcctgaacttcattagctttttcttcctcttcaatccaaatctgtctgtatcttcattcatttttcttaaccctttccttgcttgctatttctgctttccaaaaccaaggaaggaattttgacagaggtacccaaggaattcactgggggaaaatgaatgattcaataaatgatgttatgataattagatagatagctatatgtaagcataaaaaatttttaaaaccttaggcccttattatcatatcatgcacaaaaattaagtggattattgatttaaatgtaaaaacaaaaagtataaaacttttagaaaaaagagattatttgtgacattgggtctggcaaagatttcttagatgcgattaaagatttacaaaagaaaaaattgataaattagacttcatcaaaatttagaaattttgctttatctgtgtaggatactgaagagaatgaaaagacaagtcacagactgggagaaagtacaggcaaatcacatatttgtcaaataactcatatccagaatttttaaagaacttttacaactcaataataacaagacaaacagctcaattttttaaatgagggaaaaatttaaatatatttcacatgagaatatactcaaatagccagtgagcacatgaaaagatgttcagcatcattagacattagcaaattgcaaattaaaaccacactgaggaacccactaggaatggctataatcaaagacgatcagtatcaagtattgcggagaatgtggagaaactcaaactctgttacactagtaatagaaatataaaatgttagaaccactttggaaagagattggcagtttctggaaaaaattaattgtaaatttgaccaagcaattttactacgtaagtatgttaagaatgaaaacgtgtgcacacaaagatctgtactaaaatgttgatagcattattcataacagcctaacagtgcaaatgtctgtcaactactgtgaatggagagacaaaatgtgtttattaatacaataaaactacccagcaataaaaagaaataattgactgataaatggtatacgatgactgaactttaaaaccttgatgctgcctaaaagagccagacacagactacacattgtataattccatttttatgaatttcccagaaaggcaaattatagagacaaaacaaatcagtggttgcctagggctggtggtggacgtggagattgactgtaaatgggacatgagggaatttttttgtggtgatagaaatgttataaaactagatgtggtaatagttgcacaactctgtaaattcactaaaagtcactgaactgtacacttaaccataggtgggtttaatgaaatgtgaattacactgcaataaaactaaataaaagctgagttagtacca

SEQ ID NO: 166509 - DNA, 6487 bp, Homo sapiens
  Payload ID: 12787
  Gene Symbol: PLEKHA5
  Gene Name: pleckstrin homology domain containing, family A member 5
  Uniprot ID: Q9HAU0
  ENST ID: ENST00000538714
  CDS Start-End: 5-3529
agacatggcggcggatctgaacctggagtggatctccctgccccggtcctggacttacgggatcaccaggggcggccgagtcttcttcatcaacgaggaggccaagagcaccacctggctgcaccccgtcaccggcgaggcggtggtcaccggacaccggcggcagagcacagatttgcctactggctgggaagaagcatatacttttgaaggtgcaagatactatataaaccataatgaaaggaaagtgacctgcaaacatccagtcacaggacaaccatcacaggacaattgtatttttgtagtgaatgaacagactgttgcaaccatgacatctgaagaaaagaaggaacggccaataagtatgataaatgaagcttctaactataacgtgacttcagattatgcagtgcatccaatgagccctgtaggcagaacttcacgagcttcaaaaaaagttcataattttggaaagaggtcaaattcaattaaaaggaatcctaatgcaccggttgtcagacgaggttggctttataaacaggacagtactggcatgaaattgtggaagaaacgctggtttgtgctttctgacctttgcctcttttattatagagatgagaaagaagagggtatcctgggaagcatactgttacctagttttcagatagctttgcttacctctgaagatcacattaatcgcaaatatgcttttaaggcagcccatccaaacatgcggacctattatttctgcactgatacaggaaaggaaatggagttgtggatgaaagccatgttagatgctgccctagtacagacagaacctgtgaaaagagtggacaagattacatctgaaaatgcaccaactaaagaaaccaataacattcccaaccatagagtgctaattaaaccagagatccaaaacaatcaaaaaaacaaggaaatgagcaaaattgaagaaaaaaaggcattagaagctgaaaaatatggatttcagaaggatggtcaagatagacccttaacaaaaattaatagtgtaaagctgaattctctgccatctgaatatgagagtgggtcagcatgccctgctcagactgtgcactacagaccaatcaacttgagcagttcagagaacaaaatagtcaatgttagcctggcagatcttagaggtggaaatcgccccaatacagggcccttatacacagaggccgatcgagtcatacagagaacaaattcaatgcagcagttggaacagtggattaaaatccagaaggggaggggtcatgaagaagaaaccaggggagtaatttcttaccaaacattaccaagaaatatgccaagtcacagagcccagattatggcccgctaccctgaaggttatagaacactcccaagaaacagcaagacaaggcctgaaagtatctgcagtgtaaccccttccactcatgacaagacattaggacccggagcggaggagaaacggaggtccatgagagatgacacaatgtggcagctctacgaatggcagcagcgtcagttttataacaaacagagcaccctccctcgacacagtactttgagtagtcccaaaaccatggtaaatatttctgaccagacaatgcactctattcccacatcaccttcccacgggtcaatagctgcttatcagggatactcccctcaacgaacttacagatcggaagtgtcttcaccaattcagagaggagatgtgacaatagaccgcagacacagggcccatcaccctaagcatgtctatgtgcctgacagaaggtcagtgccagctggcctgactttacagtctgttagtccccagagcctccaagggaaaacgccagaggagcttacgctgctgctaataaagctgagacggcagcaagccgaactgagtagtatccgggagcatacgttagcacagctcatgcagctaaagcttgaggcccacagcccaaagaatgaaattctttcacatcatctccaaaggaacaccatatatttggatcatcagctgtcacaagatgaaggtagaggcacattatacaaatacagacctgaagaagtagatattgatgccaagttaagccgattatgtgaacaagataaagtggtgcatgctctggaagagaaacttcagcaactccacaaggagaaatacacgcttgagcaagctttgctatcagccagccaagagatagaaatgcatgcagataacccagcagccattcagacagtggtgttacaaagggatgatttacaaaatggactgcttagtacgtgtcgagaactttctcgagccactgccgaattggaacgagcatggagagaatatgataagttagaatacgatgtaactgttaccaggaaccagatgcaagagcagctggatcaccttggtgaagttcagacggaatcagcaggaattcagcgtgcacagattcagaaagaactttggcgaattcaggatgtcatggaagggctgagtaaacataagcagcaaagaggtactacagaaataggtatgataggatcaaagcctttctcaacagttaagtacaaaaatgagggtccagattatagactctacaagagtgaaccagagttaacaacagtggcagaagttgatgaatctaatggagaagaaaaatcagaacctgtttcagagatagaaacttcagttgttaaaggttcccactttcctgttggagtagtccctccaagagcaaaatcaccaacacccgaatcttcgacaatagcttcctatgtaaccttgaggaaaactaagaagatgatggatctaagaacggaaagaccaagaagtgcagtggaacagctctgtttggctgaaagtactcgaccaaggatgactgtggaagagcaaatggaaagaataagaagacatcaacaagcgtgcctgagggagaagaaaaaagggttaaatgttatcggtgcttcagaccagtcacccttacaaagcccttcaaatttaagggataatccatttaggactactcagactcgaaggagggatgataaggaactggacactgccattagagaaaatgatgtaaagccagaccatgaaactcctgcaacagaaattgttcaactaaaagaaaccgaaccccaaaatgtggacttcagcaaagagttaaaaaaaactgaaaacatttcatatgaaatgctttttgaacctgagccaaatggagtaaattctgtggaaatgatggataaagaaagaaacaaagacaaaatgcctgaggatgttacattcagccctcaagatgaaacacagaccgcaaatcataaaccagaagagcatcctgaagaaaatacaaagaacagtgttgacgaacaggaagaaactgttatttcttacgaatcaactcctgaggtttctagaggaaatcaaacaatggcagtgaaaagtctgtccccatctcctgagtcctcggcatcgccagttccatccactcagccgcagctcacagaaggatcacatttcatgtgtgtgtagtcttagaagaaagatgtcccccatgctggagtgtagtggcataatcacagctcactgcagccttgacctcctgggctcaagcagtcgtcctgcctcagcctcacaagtagctgggatcacaagtgcacgccaccacactcggctgatatttcgattttcttatagagacagtcttactaagttgtccacgctggtctcaaactcctgaattcaagctaccctcccactgcatgagccactgtgcctagcctctttgattttcacattctcaaaatatttcttttattttctctcctttttttttttttttcgaggcaaggtcttactctgtcacccaggctggagtgcagtggtgcaagatcatggctcaatggctcactgaaggctgacctcccaggctcaagcaatcctcccacctcagccccctgagtagctgggactacaggtgtatgccaccatgccaggctaattgttttgcagagatggagttttcaccatgttgcccaggctgatctcaagctcctgagctcaagtgatctgtccgcctcagcctcccaaagtgctgagattacaggtgtgagccaccacacccagccttttttcttccttttcaagcattttttaaatttcactagctttgggtacaagtggttttgggttacatggaagaattgtatagtggtgaagtctgagattttagtgcacccattacccgagtagtgtatgttgtacccaatccttcaccgaccttccaccctctcccttctgagtctccaaagtccattataccacactgtatgcctttgcatacccatagtgtagctccaacttataagtgagaacatatgatatttggttttcctttcctgagttactttacttagaataatggcctccagctccatccaagttgctgcaaaatacattattttgttcctttttattgctgagtagtattccatggtgtatataaaccacattttctttatccactccttggttggtggactcttaggttggttccatacccttggagttgcaaattgtgctgctataaacatgcatgtgcatgtatcttttttatgtaatgacttgttttcttttgggtcgatactcagtagtgggattgctggatcaaatgctggatctacttttagttctttaaggaatctccacactgttttccgtagtggttgtactagtttacattcccaccagcagtgtaaaagtgttttcttctcaccacatccataccaacatctgttgttttttgacttttaaattatggccattctttttttttgtttttgagatggagtctcgctctgtcagcaggctggagtgcagtggcgtgatcttggctcactgcaacctcctcctccagggttcaagtgattctcctgcctcagcctcccccgtagctgggactacaggcgtgtgccaccacacccagctaatttttgaatttttagtagagatggggtttcaccatgttggccagtatggtctcgatctcttgacctcatgatccgcccacctcggcctcccaaagtgctggcgtgacccactgcacccggccaattatggccattcttgcaggaataaggaggcatctcattgttgtgtaccttcttttgagaaatgcctattcgcgtcatttgcccactttttgatgggattatttgtttttgttttttttttcttgctgatttgttttgagttccttccagattctggatattagtcctttgttggatgcatagtttgcaaatatttcctcccatcctgttttctggaatctacttcctttcacaccttattgtaggaactataatctgtgccctttttttcagcccaaagtattttgttgtcttttcatatttgtaacttttatttgagattatgtctacctggaacctcaaagaggcttctgtttttgtcagttggtatctgtgcaggactgaagtgcttgctggagagttacaaataacctaactgtgatagtcttacctgtgttctgcctttgtcacttgtgtttaagccttttttcttttttcttttttcttttttttttttttgttgagaccaggtctcaccctgtcacccacactggagtgcaatggtgagatcttggagccttgccctcctgggcttaagtgatcctcccacgacagcctcccaagtagctgggaccacacgcctgtgccaccaagcctggctgatttttttgtattttttgtagagtaggggtttcaccgtgttgcccaggctggtctcaaactcctgagctcaagcgctctgcccgcctcaatctcccaaagtgctgagattacaagattgagccatcacgcctggctatgtttaaacttttaatttaatatgtttagaaatgactgttgaggccaggtgcggtaatgccagcactttgggaggccagggctggtggatcacttgaggtcgggagttcaggaccagcctggccaacatggtaaaaccccatctctacttaaaaatacaaaaattagctgggcatggtgtcaggcgcctgtaatcccagctacctgggaggctgagacaggagaatcgcttgaacctgggaggcagaggttgcagtgagccgagatcacaccatcgcactccggcctgggtgacagaacaagactttgtctcaaaaaaaaaaaaaaaaatctgggtgtggtggcccacacctgtaatcccagcactttgggaggccgaggcaggcagatcacctggctcctgaccagcgtgaccaacatggagaaacccagtctctactaaaattacaaaattagctgggcgtggtggcacatgcctgtaatcccagctacttgggaggctgaggcaggagaatcgcttgaacccagaggcagtggttgcagtgagccgaggtcgtgccattgcactccagcctgggcaacaagaacgaaactctgtctc

SEQ ID NO: 166510 - DNA, 3139 bp, Homo sapiens
  Payload ID: 12787
  Gene Symbol: PLEKHA5
  Gene Name: pleckstrin homology domain containing, family A member 5
  ENST ID: ENST00000536974
  CDS Start-End: 209-3139
gtgctcactgagaacagctcaaagacaaagcagttgagtcttatttttactccagtgttctttttgcctgtaattgaatatccttttaagaattgattttgatgaaggctgccataatgaaaggaaagtgacctgcaaacatccagtcacaggacaaccatcacaggacaattgtatttttgtagtgaatgaacagactgttgcaaccatgacatctgaagaaaagaaggaacggccaataagtatgataaatgaagcttctaactataacgtgacttcagattatgcagtgcatccaatgagccctgtaggcagaacttcacgagcttcaaaaaaagttcataattttggaaagaggtcaaattcaattaaaaggaatcctaatgcaccggttgtcagacgaggttggctttataaacaggacagtactggcatgaaattgtggaagaaacgctggtttgtgctttctgacctttgcctcttttattatagagatgagaaagaagagggtatcctgggaagcatactgttacctagttttcagatagctttgcttacctctgaagatcacattaatcgcaaatatgcttttaaggcagcccatccaaacatgcggacctattatttctgcactgatacaggaaaggaaatggagttgtggatgaaagccatgttagatgctgccctagtacagacagaacctgtgaaaagagtggacaagattacatctgaaaatgcaccaactaaagaaaccaataacattcccaaccatagagtgctaattaaaccagagatccaaaacaatcaaaaaaacaaggaaatgagcaaaattgaagaaaaaaaggcattagaagctgaaaaatatggatttcagaaggatggtcaagatagacccttaacaaaaattaatagtgtaaagctgaattctctgccatctgaatatgagagtgggtcagcatgccctgctcagactgtgcactacagaccaatcaacttgagcagttcagagaacaaaatagtcaatgttagcctggcagatcttagaggtggaaatcgccccaatacagggcccttatacacagaggccgatcgagtcatacagagaacaaattcaatgcagcagttggaacagtggattaaaatccagaaggggaggggtcatgaagaagaaaccaggggagtaatttcttaccaaacattaccaagaaatatgccaagtcacagagcccagattatggcccgctaccctgaaggttatagaacactcccaagaaacagcaagacaaggcctgaaagtatctgcagtgtaaccccttccactcatgacaagacattaggacccggagcggaggagaaacggaggtccatgagagatgacacaatgtggcagctctacgaatggcagcagcgtcagttttataacaaacagagcaccctccctcgacacagtactttgagtagtcccaaaaccatggtaaatatttctgaccagacaatgcactctattcccacatcaccttcccacgggtcaatagctgcttatcagggatactcccctcaacgaacttacagatcggaagtgtcttcaccaattcagagaggagatgtgacaatagaccgcagacacagggcccatcaccctaagcatgtctatgtgcctgacagaaggtcagtgccagctggcctgactttacagtctgttagtccccagagcctccaagggaaaacgctgtcacaagatgaaggtagaggcacattatacaaatacagacctgaagaagtagatattgatgccaagttaagccgattatgtgaacaagataaagtggtgcatgctctggaagagaaacttcagcaactccacaaggagaaatacacgcttgagcaagctttgctatcagccagccaagagatagaaatgcatgcagataacccagcagccattcagacagtggtgttacaaagggatgatttacaaaatggactgcttagtacgtgtcgagaactttctcgagccactgccgaattggaacgagcatggagagaatatgataagttagaatacgatgtaactgttaccaggaaccagatgcaagagcagctggatcaccttggtgaagttcagacggaatcagcaggaattcagcgtgcacagattcagaaagaactttggcgaattcaggatgtcatggaagggctgagtaaacataagcagcaaagaggtactacagaaataggtatgataggatcaaagcctttctcaacagttaagtacaaaaatgaggaagaggaagtagtcccacctcgtcctccacttcctcggtcctatgactttacagagcagcctcccataatcccccctctgcccagtgatagcagctccttgctctgttatagcaggggcccagttcatctgcctgaagaaaagaagatgtatcaagttcaaggatatccaagaaatggatctcactgtggtccagattatagactctacaagagtgaaccagagttaacaacagtggcagaagttgatgaatctaatggagaagaaaaatcagaacctgtttcagagatagaaacttcagttgttaaaggttcccactttcctgttggagtagtccctccaagagcaaaatcaccaacacccgaatcttcgacaatagcttcctatgtaaccttgaggaaaactaagaagatgatggatctaagaacggaaagaccaagaagtgcagtggaacagctctgtttggctgaaagtactcgaccaaggatgactgtggaagagcaaatggaaagaataagaagacatcaacaagcgtgcctgagggagaagaaaaaagggttaaatgttatcggtgcttcagaccagtcacccttacaaagcccttcaaatttaagggataatccatttaggactactcagactcgaaggagggatgataaggaactggacactgccattagagaaaatgatgtaaagccagaccatgaaactcctgcaacagaaattgttcaactaaaagaaaccgaaccccaaaatgtggacttcagcaaagagttaaaaaaaactgaaaacatttcatatgaaatgctttttgaacctgagccaaatggagtaaattctgtggaaatgatggat

SEQ ID NO: 166511 - DNA, 3357 bp, Homo sapiens
  Payload ID: 12787
  Gene Symbol: PLEKHA5
  Gene Name: pleckstrin homology domain containing, family A member 5
  ENST ID: ENST00000539256
  CDS Start-End: 660-3284
tcagacatggcggcggatctgaacctggagtggatctccctgccccggtcctggacttacgggatcaccaggggcggccgagtcttcttcatcaacgaggaggccaagagcaccacctggctgcaccccgtcaccggcgaggcggtggtcaccggacaccggcggcagagcacagatttgcctactggctgggaagaagcatatacttttgaaggtgcaagatactatataaaccataatgaaaggaaagtgacctgcaaacatccagtcacaggacaaccatcacaggacaattgtatttttgtagtgaatgaacagactgttgcaaccatgacatctgaagaaaagaaggaacggccaataagtatgataaatgaagcttctaactataacgtgacttcagattatgcagtgcatccaatgagccctgtaggcagaacttcacgagcttcaaaaaaagttcataattttggaaagaggtcaaattcaattaaaaggaatcctaatgcaccggttgtcagacgaggttggctttataaacagatgagaaagaagagggtatcctgggaagcatactgttacctagttttcagatagctttgcttacctctgaagatcacattaatcgcaaatatgcttttaaggcagcccatccaaacatgcggacctattatttctgcactgatacaggaaaggaaatggagttgtggatgaaagccatgttagatgctgccctagtacagacagaacctgtgaaaagagtggacaagattacatctgaaaatgcaccaactaaagaaaccaataacattcccaaccatagagtgctaattaaaccagagatccaaaacaatcaaaaaaacaaggaaatgagcaaaattgaagaaaaaaaggcattagaagctgaaaaatatggatttcagaaggatggtcaagatagacccttaacaaaaattaatagtgtaaagctgaattctctgccatctgaatatgagagtgggtcagcatgccctgctcagactgtgcactacagaccaatcaacttgagcagttcagagaacaaaatagtcaatgttagcctggcagatcttagaggtggaaatcgccccaatacagggcccttatacacagaggccgatcgagtcatacagagaacaaattcaatgcagcagttggaacagtggattaaaatccagaaggggaggggtcatgaagaagaaaccaggggagtaatttcttaccaaacattaccaagaaatatgccaagtcacagagcccagattatggcccgctaccctgaaggttatagaacactcccaagaaacagcaagacaaggcctgaaagtatctgcagtgtaaccccttccactcatgacaagacattaggacccggagcggaggagaaacggaggtccatgagagatgacacaatgtggcagctctacgaatggcagcagcgtcagttttataacaaacagagcaccctccctcgacacagtactttgagtagtcccaaaaccatggtaaatatttctgaccagacaatgcactctattcccacatcaccttcccacgggtcaatagctgcttatcagggatactcccctcaacgaacttacagatcggaagtgtcttcaccaattcagagaggagatgtgacaatagaccgcagacacagggcccatcaccctaagcatgtctatgtgcctgacagaaggtcagtgccagctggcctgactttacagtctgttagtccccagagcctccaagggaaaacgctgtcacaagatgaaggtagaggcacattatacaaatacagacctgaagaagtagatattgatgccaagttaagccgattatgtgaacaagataaagtggtgcatgctctggaagagaaacttcagcaactccacaaggagaaatacacgcttgagcaagctttgctatcagccagccaagagatagaaatgcatgcagataacccagcagccattcagacagtggtgttacaaagggatgatttacaaaatggactgcttagtacgtgtcgagaactttctcgagccactgccgaattggaacgagcatggagagaatatgataagttagaatacgatgtaactgttaccaggaaccagatgcaagagcagctggatcaccttggtgaagttcagacggaatcagcaggaattcagcgtgcacagattcagaaagaactttggcgaattcaggatgtcatggaagggctgagtaaacataagcagcaaagaggtactacagaaataggtatgataggatcaaagcctttctcaacagttaagtacaaaaatgagggtccagattatagactctacaagagtgaaccagagttaacaacagtggcagaagttgatgaatctaatggagaagaaaaatcagaacctgtttcagagatagaaacttcagttgttaaaggttcccactttcctgttggagtagtccctccaagagcaaaatcaccaacacccgaatcttcgacaatagcttcctatgtaaccttgaggaaaactaagaagatgatggatctaagaacggaaagaccaagaagtgcagtggaacagctctgtttggctgaaagtactcgaccaaggatgactgtggaagagcaaatggaaagaataagaagacatcaacaagcgtgcctgagggagaagaaaaaagggttaaatgttatcggtgcttcagaccagtcacccttacaaagcccttcaaatttaagggataatccatttaggactactcagactcgaaggagggatgataaggaactggacactgccattagagaaaatgatgtaaagccagaccatgaaactcctgcaacagaaattgttcaactaaaagaaaccgaaccccaaaatgtggacttcagcaaagagttaaaaaaaactgaaaacatttcatatgaaatgctttttgaacctgagccaaatggagtaaattctgtggaaatgatggataaagaaagaaacaaagacaaaatgcctgaggatgttacattcagccctcaagatgaaacacagaccgcaaatcataaaccagaagagcatcctgaagaaaatacaaagaacagtgttgacgaacaggaagaaactgttatttcttacgaatcaactcctgaggtttctagaggaaatcaaacaatggcagtgaaaagtctgtccccatctcctgagtcctcggcatcgccagttccatccactcagccgcagctcacagaaggatcacatttcatgtgtgtgtagtcttagaagaactatactgacttctgttgaaaccattcaaagctaaagacatggaccttcagcagtgtaagaa

SEQ ID NO: 166512 - DNA, 557 bp, Homo sapiens
  Payload ID: 12787
  Gene Symbol: PLEKHA5
  Gene Name: pleckstrin homology domain containing, family A member 5
  ENST ID: ENST00000538677
  CDS Start-End: 1-406
tgcttatcagggatactcccctcaacgaacttacagatcggaagtgtcttcaccaattcagagaggagatgtgacaatagaccgcagacacagggcccatcaccctaagcatgtctatgtgcctgacagaaggtcagtgccagctggcctgactttacagtctgttagtccccagagcctccaagggaaaacgccagaggagcttacgctgctgctaataaagctgagacggcagcaagccgaactgagtagtatccgggagcatacgttagcacagctcatgcagctaaagcttgaggcccacagcccaaagaatgaaattctttcacatcatctccaaaggaacaccatatatttggatcatcagctatgctgtaaactgatgtttgctgtatgctcctcctgatttgaaatagatgaaagaaaatgaacctattatcaccatggttcacacaatgattgagaactcggcgctaagaccccaactgtaccagcaattcttaagacagaagagcaagataagtctatattgtctgtcacaagatgaaggtagaggc

SEQ ID NO: 166513 - DNA, 2072 bp, Homo sapiens
  Payload ID: 12787
  Gene Symbol: PLEKHA5
  Gene Name: pleckstrin homology domain containing, family A member 5
  ENST ID: ENST00000538972
  CDS Start-End: 1-1194
tacacgcttgagcaagctttgctatcagccagccaagagatagaaatgcatgcagataacccagcagccattcagacagtggtgttacaaagggatgatttacaaaatggactgcttagtacgtgtcgagaactttctcgagccactgccgaattggaacgagcatggagagaatatgataagttagaatacgatgtaactgttaccaggaaccagatgcaagagcagctggatcaccttggtgaagttcagacggaatcagcaggaattcagcgtgcacagattcagaaagaactttggcgaattcaggatgtcatggaagggctgagtaaacataagcagcaaagaggtactacagaaataggttcccactttcctgttggagtagtccctccaagagcaaaatcaccaacacccgaatcttcgacaatagcttcctatgtaaccttgaggaaaactaagaagatgatggatctaagaacggaaagaccaagaagtgcagtggaacagctctgtttggctgaaagtactcgaccaaggatgactgtggaagagcaaatggaaagaataagaagacatcaacaagcgtgcctgagggagaagaaaaaagggttaaatgttatcggtgcttcagaccagtcacccttacaaagcccttcaaatttaagggataatccatttaggactactcagactcgaaggagggatgataaggaactggacactgccattagagaaaatgatgtaaagccagaccatgaaactcctgcaacagaaattgttcaactaaaagaaaccgaaccccaaaatgtggacttcagcaaagagttaaaaaaaactgaaaacatttcatatgaaatgctttttgaacctgagccaaatggagtaaattctgtggaaatgatggataaagaaagaaacaaagacaaaatgcctgaggatgttacattcagccctcaagatgaaacacagaccgcaaatcataaaccagaagagcatcctgaagaaaatacaaagaacagtgttgacgaacaggaagaaactgttatttcttacgaatcaactcctgaggtttctagaggaaatcaaacaatggcagtgaaaagtctgtccccatctcctgagtcctcggcatcgccagttccatccactcagccgcagctcacagaaggatcacatttcatgtgtgtgtagtcttagaagaactatactgacttctgttgaaaccattcaaagctaaagacatggaccttcagcagtgtaagaagatattgtacagtatattttaaatctatgaaattcatagttctgatgcttttggtcacagagcatcattttatcacttctggaaaatgtttattccaaaacagctttaatggcccatatgtacacttcgtaatctcaaggttattattctgacaccagcttgctgctatgatttcagagcacataagtaaaggtgctttttaatgtgcagtctatttccagagcttacttagttgctgatttccagatttcgatgtttcttaagtctaggtgaatttatatatatatttttttgcttttcattttctaaagttagttattatttccattgaagcttgttttcttttttttcttcccattttagctactgcagtgcttttgtttcacacttgatttgtaaaaattttatatatatgtatttaaaatgtgccattttattgctaagtgaagtatgtcctgttttctgctataattctttctcggtcagattgcaatgtcagcagttactgccacactcctgtcagcttaaacacaaatgttactgcttatcttttcttaaaaaaaaaaaaaacaaagtgtaggtattttgaagtactgggcttatatttcattggaatacatgtgtacagcaataagcaggtttccaaatccggtacttagtttgtgtacaaatgtaattatgttcattgtgtatatattatacaatgagcacatgtaatgtattaaaggctacttactattgtttaaatgcaaatgttcatatctcatttctttttttatcatgttaaataaatgttgatgttctt

SEQ ID NO: 166514 - DNA, 633 bp, Homo sapiens
  Payload ID: 12787
  Gene Symbol: PLEKHA5
  Gene Name: pleckstrin homology domain containing, family A member 5
  ENST ID: ENST00000538305
  CDS Start-End: 280-633
atatgaagtacttactcttggagactgcggtgtggttcagttttcttatagtggaaagagcagaaaagagatcacggtgtgcccctttgtcatcgttctgtcaggaagcatgtaatttgtctttagaaaccagaagcctgagacaaagaaaagaacacagatttttagcaaaaggctatttgccataatgaaaggaaagtgacctgcaaacatccagtcacaggacaaccatcacaggacaattgtatttttgtagtgaatgaacagactgttgcaaccatgacatctgaagaaaagaaggaacggccaataagtatgataaatgaagcttctaactataacgtgacttcagattatgcagtgcatccaatgagccctgtaggcagaacttcacgagcttcaaaaaaagttcataattttggaaagaggtcaaattcaattaaaaggaatcctaatgcaccggttgtcagacgaggttggctttataaacaggacagtactggcatgaaattgtggaagaaacgctggtttgtgctttctgacctttgcctcttttattatagagatgagaaagaagagggtatcctgggaagcatactgttacctagttttcagatagctttgcttacctct

SEQ ID NO: 166515 - DNA, 7401 bp, Homo sapiens
  Payload ID: 12788
  Gene Symbol: PLEKHA6
  Gene Name: pleckstrin homology domain containing, family A member 6
  Uniprot ID: Q9Y2H5
  ENST ID: ENST00000272203
  CDS Start-End: 318-3464
gctggatcctgcagtaaccacaacagcatcctctccctgcgccagggacctgccagccggagagatgactgattagatcagattagatccggagccccgctctgcagaagggggccccaggggcgggggaggaggaccccagctggcctgagctggggggaggggtgccttggggctcgcagagttagagctttccagcgcggggatcacacctcagaagccgccacaatgaaagacggaacacatttctacacccagtgactggccaggtcccagaggaaaacaaaaaatttgacttgaaaatatcgaccttggacatgtccaataaaacaggtgggaaacgcccggctaccaccaacagtgacatacccaaccacaacatggtgtccgaggtccctccagagcggcccagcgtccgggcaactcgcacagcccgcaaagccgtcgcctttggcaagcgctcacactccatgaagcggaaccccaatgcacctgtcaccaaggcgggctggctcttcaaacaggccagctccggggttaagcagtggaacaagcgctggttcgtcctggtggatcgctgcctcttctactataaagatgagaaggaagagagtatcctgggcagcatccccctcctgagcttccgggtagccgcagtgcagccctcagacaacatcagccggaaacacacgtttaaggctgagcatgccggggtccgcacctacttcttcagtgccgagagccccgaggagcaagaggcctggatccaggccatgggggaggctgctcgagtacagatccctccagcccagaagtcagtgccccaagctgtgcggcacagccatgagaagccagactcggagaacgtcccacccagcaagcaccaccagcagccaccccacaacagcctccctaagcctgagccagaggccaagactcgaggggagggtgatggccgaggctgtgagaaggcagagagaaggcctgagaggccagaagtcaagaaagagcctccggtgaaagccaatggcctcccagctggaccggagccagcctcagagccgggcagcccttaccccgagggcccaagagtgccagggggtggggaacagcctgcccagcccaatggctggcagtaccactccccaagccggccagggagcacagctttcccgtctcaggatggagagactgggggacaccggcggagtttcccaccacgcaccaaccctgacaaaattgcccagcgcaagagctccatgaaccagcttcagcagtgggtgaatctgcgccggggggtacccccgcctgaagaccttcggagtccctctaggttctatcctgtgtctcgcagggtccctgagtactatggcccctactcctcccagtaccccgatgattatcagtactacccgccaggagtgcggccggagagcatctgttccatgccggcctatgatcggatcagcccgccctgggccctggaggacaagcgccatgccttccgcaatgggggtggccctgcctaccagctgcgagagtggaaggagcccgccagctacgggcggcaggatgccaccgtctggatcccaagcccctcccggcagccagtctattatgatgagctggatgccgcctctagctccctgcgccgcctgtccctgcagccccgctcccactctgtgccccgctcacccagccagggctcctacagccgtgcccgcatttactcccctgtccgctcacccagtgcccgttttgagcggctgccacctcgcagtgaggacatctatgctgaccctgctgcctatgtgatgaggcgatccatcagctcccccaaggtccctccatacccagaagtgttccgggacagcctccacacctacaagttaaacgagcaagacacagataagctgctgggaaaattgtgtgagcagaacaaggtggtgagggagcaggaccggctggtgcagcagctccgagctgagaaggagagcctggaaagtgccttgatggggacccaccaggagctggagatgtttggaagccagcccgcctacccagaaaagctgcgacacaaaaaggattcactgcagaaccagctcatcaacatccgcgtggagctgtctcaggcgaccacggccctgacaaacagcaccatagagtatgagcacctcgagtctgaggtctctgccctgcacgatgacctctgggagcagctcaatttggacacccagaatgaggtgctgaaccggcaaatccaaaaggagatctggaggatccaggacgtgatggaggggctgaggaagaacaacccctcccggggcacggacaccgccaagcacagaggaggacttggcccctcagccacctacagctccaacagcccggccagccccctcagctctgccagcctcaccagccccctgagccccttttcactggtgtcgggctctcaggggtcccccaccaagcctggctccaacgagcccaaggcaaactatgaacaaagcaagaaagacccccaccagacattgcccctggacacccccagagacatcagccttgtgcccaccaggcaagaggtagaggcagagaagcaggcagctctcaacaaagttggcgttgtgccccctcggacaaaatcgcccactgatgatgaggtgaccccatcagcagtggtaagaaggaatgccagtgggctcaccaatggactctcctcccaggaacgccccaagagtgctgtgtttcctggcgaggggaaggtcaagatgagcgtggaggagcagattgaccgaatgcggcggcaccagagtggctccatgagggagaagcggaggagcctgcagctcccggccagcccggcccccgaccccagtccccggccagcctacaaagtggtgcgccgccaccgcagcatccatgaggtagacatctccaacctggaggcagccctgcgggcagaggagcctggcgggcatgcctacgagacaccccgggaggaaattgcccggcttcgcaaaatggagctagagccccagcattatgacgtggacatcaataaggagctctccactccagacaaagtcctcatccctgaacggtacattgacctggagcctgacactcccctgagccctgaggagttgaaggagaagcagaagaaggtggagaggatcaagacactcattgccaaatccagtatgcagaacgtggtgcccatcggcgagggggactctgtggacgtgccccaggactcagagagccagctgcaggagcaggagaagcggattgaaatctcctgcgccctggcgaccgaggcctcccgcaggggccgcatgctgtctgtgcaatgtgccaccccaagccctcccacctcccctgcttccccggctcctccagcaaaccccctgtcgtctgaatccccacggggcgccgacagcagctataccatgcgggtctgagctctgactgcaagccctggctgaggccaatgctgtgaagctccacagagccacattctgaagccgtcctctgcccacctgaggtcctggctccccaccctggccccctgcccctgcactcccatgggaatgccgcagggagccaggctggggccatgggctgctgccagaggaccgtggatacctcagtgtccacacacccaccatgcccagccctggagccatcactactcacaccgtggtcctgggccagggcctgagatgacagtggggagcaccatcctcattaatgtccaagtcacagggagcctcagccttgccctggctggggttgtggtgactccagtggaacattccctgatgggggacatgccgtggtggagaacacacctgtggctatcttatgtgaggactagaggtgaagaggagatggacactgcctctggagccagcctgacaccaaggacagcacttgtcatcatccctatcctcgtcagccccaccctactgcctcagctggacccagggctttgacacaaacccagtgctttgcttatgggtgctcgctggggtccggtggagactgaccaccctgcttgagccaaagacaaggtgatgagagatggggagaggccattggctcccagagggaacagtgctggctgtggctagagaacagcaggtctgtgcagtgtctgagggcaggttgggaagggtagcagagagagagagacagaaagagagagagagagagagagagagagagatcctcagagtggaaggagggggaagcagcaggacacattggcaagtcaagcaggaaggagggagatggaaaggggatatcagattggtttcccccggtggagccttaggttagtgcccagtgcagtgccagactgtctcctctgctcctcccacctcatccctaggaggacccaccagtggagcacatgcagcctcagtggagatgcttggtgtggggatctgggtgaagggggttgagtagcgactgcctgggagatggctgttagtaggtctgtgcctggtgtctgcctcgccatcctggggtaaggggcagagagaaggacttgtcttatgtagggtgtggtcagccttggggccttacctacccagttccatgatatttcttgccctgttccccctggaatgtgcagtgggccagctgagagtacgccttgaggaggggggatgaggccttaatctgggaggcctatccccctatcccaggcatcccagacgaggactggctgaggctaggcgctctcatgatccacctgccccgggagggcagcggggaagacagagaaaagcaaacgcattcctcctcagctccacccacctggagacgaatgtagccagagaggaggaaggagggaaactgaagacaccgtggcccctcggccttctctctgctagagttgccgctcagaggcttcagcctgacttccagcggtcccaagaacacctactaattcctctgcactccttcatggctgggacagttactggttcatatgcaagtaaagatgacaatttactcaacaaatatttatcgagcaccttttatgtaccaggcactgttgtaggtgcttaggatattctcatgtttctgagggattacagcctgggaggattccaccgatcttcacttctagcaggttttttaaacgtgacccttggctgtatttcccatcttcacagttcaagcaccccaaacctgccctttctcccctgcagactggcaggtgggattggctcccaggtcatttcctctctctctctttctcccaagcctttctccctccacaggaaacagatttttcagggccttccatgcctgccactttgtccgtctctttttttttttttaaagtaatattttttagaaatacatgtaaaataccaagaaataatgtctgcgcctctgccacctctctctcatctcttatttcataaagctggctctttatgttgctttacatgccttaatatatgttttatggagattatacatattatagatctatatatgtaatatatttgtttggatgtctgatcttttcctacagttcctgcccaggcctgtttttctctcccttattttccacatcattcctagcatatcaagaccataccccttgcctttttgatccaaagaaggggagaggaaagacttattttaagacatctattttatgcttttgtttaaaaaaagcaaatctattttcaaattgtgcaatgtctgaatggaattggcaaatgaggtgaggagatggggtaactgcctttaggtcccaaccctgtgcctgtccctctgccacagtggcttccttccatcctattccccagtcacgaaagggctggtccccagagctcacccagaaagcatcttgccgggggcagggcattccctcggaagtcctggcctaaggattttattacactgtctgctcctgatgaccctctgcggttgtcaggcgtgaatcctctggaaggaactgtttgcagttgtatgcacaaaggagacccatgcaggcatgcaccccagatgggctgctagactacccctcttcatcagcctgctggaaagagcagacagcgtaacagcagcctatgccaaacagcactaaggatgtcagtgtacgagacggtgcgaagcccagaggaggcggcttgggatcctctgggccatccctggccctgtagcacagacacatacaagttccttggacttgtcacactccttttcacttgatccctctctggcctgggtcacatttatgacatcccccctctgcaacctttctctctgggggctgtaccaaaggcatggtacctcagtctggtatccagactgtgaaatcagcctctgggccaaggagggtcctacagacaaggtggcatctcaacctcacccaagaaacccccgggactttaccccagcaggctgccactggggcaccgaactaagccagctcagccttccaagctgcttagcctttgtcaaccatcaaagtggggaaagggtctctggccttgcaaggatttgggcaggatggaagtctttgtctaggtctgaaatcaagggcttgggaatctagagcagagctcctggccagcgtttgaagcctggcctcccacctggggcatttactgacaccctgtcgccagcctagaacatcctgctctgaatgaacagagcccagatgggggtccagagctaagtgacccacctggggaagctctgattattcatccagggccttctcaatgagcacattacctccatgatcaataaccaagaggctgcagtcaaatactgctactgtcactttgaagattttctaagggcacaagtggcacacttgctctccggcctttgggagaggcatgttcttgggcagggctggctacggcaagagggaaccaattcctttcccctttaggcaccctctacctggcagctcttaaaactaagaaaaaatatgatatacacacacattatatatatatatatatatacacacacacacacacacacacgtatatctatttatgcacatattggggccaatttgatttgctagtattagacaataaactgtacaaggaaatttattatctcagtgtctttatttagcataaaagtggccttagaagaagggtgaaggttagatagatggaatctctgtcaggggacaaacagctgtagcatccccttagcatctttctagccaatgagccccctccccaggaggagggatggcctgactgaaacaggtgagagtttgcttccccctttcagcagcattctttttagatttaggtactgaagaatcccagtgagttctgcatttgtatcttgcaagtttgtataaacccaatacaggaaataaaatgaatggtttgtata

SEQ ID NO: 166516 - DNA, 5091 bp, Homo sapiens
  Payload ID: 12788
  Gene Symbol: PLEKHA6
  Gene Name: pleckstrin homology domain containing, family A member 6
  ENST ID: ENST00000414478
  CDS Start-End: 318-3524
gctggatcctgcagtaaccacaacagcatcctctccctgcgccagggacctgccagccggagagatgactgattagatcagattagatccggagccccgctctgcagaagggggccccaggggcgggggaggaggaccccagctggcctgagctggggggaggggtgccttggggctcgcagagttagagctttccagcgcggggatcacacctcagaagccgccacaatgaaagacggaacacatttctacacccagtgactggccaggtcccagaggaaaacaaaaaatttgacttgaaaatatcgaccttggacatgtccaataaaacaggtgggaaacgcccggctaccaccaacagtgacatacccaaccacaacatggtgtccgaggtccctccagagcggcccagcgtccgggcaactcgcacagcccgcaaagccgtcgcctttggcaagcgctcacactccatgaagcggaaccccaatgcacctgtcaccaaggcgggctggctcttcaaacaggccagctccggggttaagcagtggaacaagcgctggttcgtcctggtggatcgctgcctcttctactataaagatgagaaggaagagagtatcctgggcagcatccccctcctgagcttccgggtagccgcagtgcagccctcagacaacatcagccggaaacacacgtttaaggtgactgtgtgctgggtggatgaggccgaggccagctccacacgctgcctctccccacaggctgagcatgccggggtccgcacctacttcttcagtgccgagagccccgaggagcaagaggcctggatccaggccatgggggaggctgctcgagtacagatccctccagcccagaagtcagtgccccaagctgtgcggcacagccatgagaagccagactcggagaacgtcccacccagcaagcaccaccagcagccaccccacaacagcctccctaagcctgagccagaggccaagactcgaggggagggtgatggccgaggctgtgagaaggcagagagaaggcctgagaggccagaagtcaagaaagagcctccggtgaaagccaatggcctcccagctggaccggagccagcctcagagccgggcagcccttaccccgagggcccaagagtgccagggggtggggaacagcctgcccagcccaatggctggcagtaccactccccaagccggccagggagcacagctttcccgtctcaggatggagagactgggggacaccggcggagtttcccaccacgcaccaaccctgacaaaattgcccagcgcaagagctccatgaaccagcttcagcagtgggtgaatctgcgccggggggtacccccgcctgaagaccttcggagtccctctaggttctatcctgtgtctcgcagggtccctgagtactatggcccctactcctcccagtaccccgatgattatcagtactacccgccaggagtgcggccggagagcatctgttccatgccggcctatgatcggatcagcccgccctgggccctggaggacaagcgccatgccttccgcaatgggggtggccctgcctaccagctgcgagagtggaaggagcccgccagctacgggcggcaggatgccaccgtctggatcccaagcccctcccggcagccagtctattatgatgagctggatgccgcctctagctccctgcgccgcctgtccctgcagccccgctcccactctgtgccccgctcacccagccagggctcctacagccgtgcccgcatttactcccctgtccgctcacccagtgcccgttttgagcggctgccacctcgcagtgaggacatctatgctgaccctgctgcctatgtgatgaggcgatccatcagctcccccaaggtccctccatacccagaagtgttccgggacagcctccacacctacaagttaaacgagcaagacacagataagctgctgggaaaattgtgtgagcagaacaaggtggtgagggagcaggaccggctggtgcagcagctccgagctgagaaggagagcctggaaagtgccttgatggggacccaccaggagctggagatgtttggaagccagcccgcctacccagaaaagctgcgacacaaaaaggattcactgcagaaccagctcatcaacatccgcgtggagctgtctcaggcgaccacggccctgacaaacagcaccatagagtatgagcacctcgagtctgaggtctctgccctgcacgatgacctctgggagcagctcaatttggacacccagaatgaggtgctgaaccggcaaatccaaaaggagatctggaggatccaggacgtgatggaggggctgaggaagaacaacccctcccggggcacggacaccgccaagcacagaggaggacttggcccctcagccacctacagctccaacagcccggccagccccctcagctctgccagcctcaccagccccctgagccccttttcactggtgtcgggctctcaggggtcccccaccaagcctggctccaacgagcccaaggcaaactatgaacaaagcaagaaagacccccaccagacattgcccctggacacccccagagacatcagccttgtgcccaccaggcaagaggtagaggcagagaagcaggcagctctcaacaaagttggcgttgtgccccctcggacaaaatcgcccactgatgatgaggtgaccccatcagcagtggtaagaaggaatgccagtgggctcaccaatggactctcctcccaggaacgccccaagagtgctgtgtttcctggcgaggggaaggtcaagatgagcgtggaggagcagattgaccgaatgcggcggcaccagagtggctccatgagggagaagcggaggagcctgcagctcccggccagcccggcccccgaccccagtccccggccagcctacaaagtggtgcgccgccaccgcagcatccatgaggtagacatctccaacctggaggcagccctgcgggcagaggagcctggcgggcatgcctacgagacaccccgggaggaaattgcccggcttcgcaaaatggagctagagccccagcattatgacgtggacatcaataaggagctctccactccagacaaagtcctcatccctgaacggtacattgacctggagcctgacactcccctgagccctgaggagttgaaggagaagcagaagaaggtggagaggatcaagacactcattgccaaatccagtatgcagaacgtggtgcccatcggcgagggggactctgtggacgtgccccaggactcagagagccagctgcaggagcaggagaagcggattgaaatctcctgcgccctggcgaccgaggcctcccgcaggggccgcatgctgtctgtgcaatgtgccaccccaagccctcccacctcccctgcttccccggctcctccagcaaaccccctgtcgtctgaatccccacggggcgccgacagcagctataccatgcgggtctgagctctgactgcaagccctggctgaggccaatgctgtgaagctccacagagccacattctgaagccgtcctctgcccacctgaggtcctggctccccaccctggccccctgcccctgcactcccatgggaatgccgcagggagccaggctggggccatgggctgctgccagaggaccgtggatacctcagtgtccacacacccaccatgcccagccctggagccatcactactcacaccgtggtcctgggccagggcctgagatgacagtggggagcaccatcctcattaatgtccaagtcacagggagcctcagccttgccctggctggggttgtggtgactccagtggaacattccctgatgggggacatgccgtggtggagaacacacctgtggctatcttatgtgaggactagaggtgaagaggagatggacactgcctctggagccagcctgacaccaaggacagcacttgtcatcatccctatcctcgtcagccccaccctactgcctcagctggacccagggctttgacacaaacccagtgctttgcttatgggtgctcgctggggtccggtggagactgaccaccctgcttgagccaaagacaaggtgatgagagatggggagaggccattggctcccagagggaacagtgctggctgtggctagagaacagcaggtctgtgcagtgtctgagggcaggttgggaagggtagcagagagagagagacagaaagagagagagagagagagagagagagagatcctcagagtggaaggagggggaagcagcaggacacattggcaagtcaagcaggaaggagggagatggaaaggggatatcagattggtttcccccggtggagccttaggttagtgcccagtgcagtgccagactgtctcctctgctcctcccacctcatccctaggaggacccaccagtggagcacatgcagcctcagtggagatgcttggtgtggggatctgggtgaagggggttgagtagcgactgcctgggagatggctgttagtaggtctgtgcctggtgtctgcctcgccatcctggggtaaggggcagagagaaggacttgtcttatgtagggtgtggtcagccttggggccttacctacccagttccatgatatttcttgccctgttccccctggaatgtgcagtgggccagctgagagtacgccttgaggaggggggatgaggccttaatctgggaggcctatccccctatcccaggcatcccagacgaggactggctgaggctaggcgctctcatgatccacctgccccgggagggcagcggggaagacagagaaaagcaaacgcattcctcctcagctccacccacctggagacgaatgtagccagagaggaggaaggagggaaactgaagacaccgtggcccctcggccttctctctgctagagttgccgctcagaggcttcagcctgacttccagcggtcccaagaacacctactaattcctctgcactccttcatggctgggacagttactggttcatatgcaagtaaagatgacaatttactcaac

SEQ ID NO: 166517 - DNA, 4980 bp, Homo sapiens
  Payload ID: 12789
  Gene Symbol: PLEKHA7
  Gene Name: pleckstrin homology domain containing, family A member 7
  Uniprot ID: Q6IQ23
  ENST ID: ENST00000355661
  CDS Start-End: 12-3377
gctcggcgaacatggcggcggcgacggtcgggcgggacactttacctgagcattggtcctacggggtgtgccgggatggccgcgtcttcttcatcaatgaccagctccgctgcacgacctggctgcatccgcgcaccggggagcccgtcaactcgggccacatgatccgctcagacctgccccgcggctgggaggagggcttcacggaggagggcgccagctacttcatcgaccataaccagcagaccacagcattcaggcatcctgtgacgggacagttttctccagaaaatagtgaattcattcttcaagaagagccgaatccacatatgtcgaagcaagacagaaaccaaagaccgtccagcatggtcagtgaaacatccacggctgggaccgcctccaccctggaggccaagcctggacccaagatcataaagtccagcagtaaagtccacagctttgggaagagagaccaggccattcggaggaaccccaatgttcccgtggtggtgaggggctggctgcacaagcaggacagttctgggatgaggctgtggaaaaggaggtggtttgtgcttgctgattactgcttattttactataaagacagccgagaagaagcggtcctcgggagcatccccttgcccagctacgtgatctctcctgtggcccctgaggatcgcataagccgcaaatattcctttaaggctgtgcacacggggatgcgagcgctcatctataacagctccacagcgggctctcaggccgagcagtcaggcatgaggacctactacttcagtgccgacacccaggaggacatgaacgcttgggtcagggccatgaaccaggctgcacaggtgctgtctcgatcgtcactgaagagggatatggagaaggtggagcggcaggctgtcccccaggccaaccacacagagtcctgtcacgaatgtggccgggtgggacccggacatacgagagattgtcctcatcgtggccatgatgacattgtcaacttcgagaggcaggagcaggagggagagcagtaccgttcccagagggacccactggagggcaagcgggaccggagcaaggccaggtctccgtactcgccagccgaggaggatgccttgtttatggatttacccactggcccaagaggccagcaggcacagccccaacgggcagagaagaatggaatgctgcctgcctcatatggcccaggagaacagaatgggactggtgggtaccagcgggcctttcctcccaggaccaaccctgaaaaacacagccaaaggaagagcaatctggcccaggtggagcactgggcaagggcccagaaaggggatagcaggagtcttcccttggaccagacgcttcctcgccagggtcctggccaatccctgtccttcccagaaaactaccagactcttcccaagagcacccgacacccctcggggggctcctcgccacctccccgaaacctgccaagtgactacaagtatgcgcaggaccgagccagccacctgaagatgtcgagtgaagagcgccgggcgcaccgggatggcaccgtgtggcagctctacgagtggcagcagcgccagcagttccggcacggcagccccacagcgcccatctgccttggctccccagagttcaccgaccagggccggagcaggagcatgctagaggtgccccgctccatctctgtgcctccatctccctcggacatccctcccccaggacccccaagggtcttcccaccccggcggccacacacaccagcagagcgagtcacagtgaagccaccggaccagaggaggagtgtggacatctcgctgggggattctccaaggagggcacggggccacgctgtcaagaactcatctcatgtggaccgacgctccatgccctccatgggttacatgacccacaccgtcagcgctcccagtttacatggaaaatcggctgatgatacctacctccagctgaagaaagacctggagtacctggatctaaagatgacaggccgggaccttctcaaggatcgaagtctgaagcctgtgaagatcgctgagagcgacactgacgtcaaactgagcatcttctgtgaacaagacagggtcctccaggacttggaagacaagatacgagcccttaaagagaacaaagaccagctagaatctgtgctggaggtgttgcacagacagatggagcagtaccgagaccagccccagcacttggagaagattgcctaccagcagaagttgctgcaggaggaccttgtccatatccgagctgagctctccagagagtccactgagatggaaaatgcttggaacgaatacctgaagttggagaatgatgtggaacagctgaagcagaccctgcaggagcaacacagaagagccttttttttccaggagaaatcgcagatacagaaagatctatggagaattgaagatgtcactgcaggcctgagtgcaaataaagagaacttcagaattctagtggagtcagtaaaaaatccggagagaaaaacggtgcctttgtttcctcacccgcctgtgccttcactctcaacttctgagagcaagccgcccccacagcccagtcctcccaccagccctgtgcggacccctctggaggttcgactcttcccccagctgcaaacctacgtgccgtaccgacctcacccaccccagctgaggaaagtgacatccccccttcagtcaccaactaaggcgaagcccaaagttgaagatgaagcacctcccaggcccccactccccgaactctacagcccagaggaccagcccccggctgtgccgcctctgccaagagaggccaccatcatccggcacacatctgtgcggggcctcaagcggcagtcagacgagaggaagcgagaccgggagctggggcagtgtgtgaatggggattccagggtggagctgcggtcgtatgtcagtgagcctgagctggcgaccctcagcggggacatggcccagccctccctaggacttgtgggccctgagagcaggtaccagacgctgccaggcagagggctctcagggtccacgtcaaggctccagcagtcgtccaccattgctccctacgtcacactccggaggggtctcaatgccgaaagcagcaaggcgaccttccctagacctaagagtgccttggagcgcctgtactcaggggatcaccagcgaggcaagatgagtgcagaggagcagctggagcgcatgaagcgacaccagaaggccctggtccgagagcgcaagaggacactgggccaaggggagaggacgggcctgccctcatctcgctacctcagccggccgctccctggagatcttggctcagtatgttaggaggggccaggcagcggggcagggacagggagccgagtgcccctcagagtcccccaaacacaagcacatcacacctcccagtgagagagctgtccattgacctacatggttcagagaacaccccacggggctgtttgtccacgacccaggctggacgaatgcctggtcagagggtgacctgaaccagagctggagtgaggatcaaacaggcccaggagcctgaggaaatacccagtcagtcctcccagccgcgatggagaggggcctttgcaggcgttcggaatctcggctgaattcaggacctgggaatacagggttcagagaggagaggaggaagatggtgacatgatttggttagaagcacaagcaaactgatcagcctcccagacctgccagcagatgctgtgtgagggtgatggagcacggggtcacacccctgccccaagggccactggtctccctgggcttgcagtgcagaggcctcagggtgtctgggattgctggggaggcctgtgctgccccctggtggcgcttcctggcgctgcgccctgtccacagtcaccttaggtccctttggaaacattccatttgacttttccctgttgtttgaaatcccatgtttccctaaacctctagcctgattgttctttccctaattcattgcacaagctcctttgcttttagtgttaccgctcattgcctctctaatcctgcctgattgtgtttacagaagcttctgatttgcattgaacatgctctaactggcctgtgctacttattaccgggcttgtaatagcggttcttgtctccatagcctgttgagtgttcccagatgtgactcacctttctgctgccctcttcatgcaggcctactgactcataattcacttgtcccaaaagccaccccacaagcctgagccaacctgctgcctgacgccacagtcattggcagaggtctgggcattattaatttataaaaatccatgctttacacctggacagtagacagggacttcagagattgcacgtttgaatacattctcccaagactgaggttgttcggttttaattcctgtagtccaatcacacaatttcttatggaaaaccttttgtgtttctggtatttaataacttgaagggatagcaaaatatactgtgtattcagagggcctctctgcagctgctagctcagacaccaaaggggtaaggcccaggacattcatatctttaaaagctgcaaacctggtaacctttaaacttttaaaacaaatgtcatatggggtaacactgaccttttataatttgatgtctcaaatgtagagattatctaaaaatcgtaacttgaataccttgtaatttttctcttaaaaaagaagacttgtgtaagtctctgcatcaacgccaataaacatgttgcttaataataatggattggcgtggttcttccccaggataccttatagagtctagtgaacttttcctgtttgtggaaacaatcaggctgggtttaaatgaggacttgtctctatttggagcatttgtgagcgtgtaaggaaatgagtgttttctttgtgaatcattaaattgattttttcatctttgg

SEQ ID NO: 166518 - DNA, 539 bp, Homo sapiens
  Payload ID: 12789
  Gene Symbol: PLEKHA7
  Gene Name: pleckstrin homology domain containing, family A member 7
  ENST ID: ENST00000525581
  CDS Start-End: 82-539
actgtgaaaagcacttcttacgcctgagccatgaaatagactggaggaatgtgacctttagtcagctgtgggtctgaaaagatgacaggccgggaccttctcaaggatcgaagtctgaagcctgtgaagatcgctgagagcgacactgacgtcaaactgagcatcttctgtgaacaagacagggtcctccaggacttggaagacaagatacgagcccttaaagagaacaaagaccagctagaatctgtgctggaggtgttgcacagacagatggagcagtaccgagaccagccccagcacttggagaagattgcctaccagcagaagttgctgcaggaggaccttgtccatatccgagctgagctctccagagagtccactgagatggaaaatgcttggaacgaatacctgaagttggagaatgatgtggaacagctgaagcagaccctgcaggagcaacacagaagagccttttttttccaggagaaatcgcagatacagaaagatctatggagaattgaagatgtcactgcaggcct

SEQ ID NO: 166519 - DNA, 3688 bp, Homo sapiens
  Payload ID: 12789
  Gene Symbol: PLEKHA7
  Gene Name: pleckstrin homology domain containing, family A member 7
  ENST ID: ENST00000530489
  CDS Start-End: 1-2261
aggatgccttgtttatggatttacccactggcccaagaggccagcaggcacagccccaacgggcagagaagaatggaatgctgcctgcctcatatggcccaggagaacagaatgggactggtgggtaccagcgggcctttcctcccaggaccaaccctgaaaaacacagccaaaggaagagcaatctggcccaggtggagcactgggcaagggcccagaaaggggatagcaggagtcttcccttggaccagacgcttcctcgccagggtcctggccaatccctgtccttcccagaaaactaccagactcttcccaagagcacccgacacccctcggggggctcctcgccacctccccgaaacctgccaagtgactacaagtatgcgcaggaccgagccagccacctgaagatgtcgagtgaagagcgccgggcgcaccgggatggcaccgtgtggcagctctacgagtggcagcagcgccagcagttccggcacggcagccccacagcgcccatctgccttggctccccagagttcaccgaccagggccggagcaggagcatgctagaggtgccccgctccatctctgtgcctccatctccctcggacatccctcccccaggacccccaagggtcttcccaccccggcggccacacacaccagcagagcgagtcacagtgaagccaccggaccagaggaggagtgtggacatctcgctgggggattctccaaggagggcacggggccacgctgtcaagaactcatctcatgtggaccgacgctccatgccctccatgggttacatgacccacaccgtcagcgctcccagtttacatggaaaatcggctgatgatacctacctccagctgaagaaagacctggagtacctggatctaaagatgacaggccgggaccttctcaaggatcgaagtctgaagcctgtgaagatcgctgagagcgacactgacgtcaaactgagcatcttctgtgaacaagacagggtcctccaggacttggaagacaagatacgagcccttaaagagaacaaagaccagctagaatctgtgctggaggtgttgcacagacagatggagcagtaccgagaccagccccagcacttggagaagattgcctaccagcagaagttgctgcaggaggaccttgtccatatccgagctgagctctccagagagtccactgagatggaaaatgcttggaacgaatacctgaagttggagaatgatgtggaacagctgaagcagaccctgcaggagcaacacagaagagccttttttttccaggagaaatcgcagatacagaaagatctatggagaattgaagatgtcactgcaggcctgagtgcaaataaagagaacttcagaattctagtggagtcagtaaaaaatccggagagaaaaacggtgcctttgtttcctcacccgcctgtgccttcactctcaacttctgagagcaagccgcccccacagcccagtcctcccaccagccctgtgcggacccctctggaggttcgactcttcccccagctgcaaacctacgtgccgtaccgacctcacccaccccagctgaggaaagtgacatccccccttcagtcaccaactaaggcgaagcccaaagttcaggaagatgaagcacctcccaggcccccactccccgaactctacagcccagaggaccagcccccggctgtgccgcctctgccaagagaggccaccatcatccggcacacatctgtgcggggcctcaagcggcagtcagacgagaggaagcgagaccgggagctggggcagtgtgtgaatggggattccagggtggagctgcggtcgtatgtcagtgagcctgagctggcgaccctcagcggggacatggcccagccctccctaggacttgtgggccctgagagcaggtaccagacgctgccaggcagagggctctcagggtccacgtcaaggctccagcagtcgtccaccattgctccctacgtcacactccggaggggtctcaatgccgaaagcagcaaggcgaccttccctagacctaagagtgccttggagcgcctgtactcaggggatcaccagcgaggcaagatgagtgcagaggagcagctggagcgcatgaagcgacaccagaaggccctggtccgagagcgcaagaggacactgggccaaggggagaggacgggcctgccctcatctcgctacctcagccggccgctccctggagatcttggctcagtatgttaggaggggccaggcagcggggcagggacagggagccgagtgcccctcagagtcccccaaacacaagcacatcacacctcccagtgagagagctgtccattgacctacatggttcagagaacaccccacggggctgtttgtccacgacccaggctggacgaatgcctggtcagagggtgacctgaaccagagctggagtgaggatcaaacaggcccaggagcctgaggaaatacccagtcagtcctcccagccgcgatggagaggggcctttgcaggcgttcggaatctcggctgaattcaggacctgggaatacagggttcagagaggagaggaggaagatggtgacatgatttggttagaagcacaagcaaactgatcagcctcccagacctgccagcagatgctgtgtgagggtgatggagcacggggtcacacccctgccccaagggccactggtctccctgggcttgcagtgcagaggcctcagggtgtctgggattgctggggaggcctgtgctgccccctggtggcgcttcctggcgctgcgccctgtccacagtcaccttaggtccctttggaaacattccatttgacttttccctgttgtttgaaatcccatgtttccctaaacctctagcctgattgttctttccctaattcattgcacaagctcctttgcttttagtgttaccgctcattgcctctctaatcctgcctgattgtgtttacagaagcttctgatttgcattgaacatgctctaactggcctgtgctacttattaccgggcttgtaatagcggttcttgtctccatagcctgttgagtgttcccagatgtgactcacctttctgctgccctcttcatgcaggcctactgactcataattcacttgtcccaaaagccaccccacaagcctgagccaacctgctgcctgacgccacagtcattggcagaggtctgggcattattaatttataaaaatccatgctttacacctggacagtagacagggacttcagagattgcacgtttgaatacattctcccaagactgaggttgttcggttttaattcctgtagtccaatcacacaatttcttatggaaaaccttttgtgtttctggtatttaataacttgaagggatagcaaaatatactgtgtattcagagggcctctctgcagctgctagctcagacaccaaaggggtaaggcccaggacattcatatctttaaaagctgcaaacctggtaacctttaaacttttaaaacaaatgtcatatggggtaacactgaccttttataatttgatgtctcaaatgtagagattatctaaaaatcgtaacttgaataccttgtaatttttctcttaaaaaagaagacttgtgtaagtctctgcatcaacgccaataaacatgttgcttaataataa

SEQ ID NO: 166520 - DNA, 565 bp, Homo sapiens
  Payload ID: 12789
  Gene Symbol: PLEKHA7
  Gene Name: pleckstrin homology domain containing, family A member 7
  ENST ID: ENST00000532079
  CDS Start-End: 76-309
gctcggcgaacatggcggcggcgacggtcgggcgggacactttacctgagcattggtcctacggggtgtgccgggatggccgcgtcttcttcatcaatgaccagctccgctgcacgacctggctgcatccgcgcaccggggagcccgtcaactcggggtccacgtcaaggctccagcagtcgtccaccattgctccctacgtcacactccggaggggtctcaatgccgaaagcagcaaggcgaccttccctagacctaagagtgccttggagcgcctgtactcaggggatcaccagcgaggcaagatgagtgcagaggagcagctggagcgcatgaagcgacaccagaaggccctggtccgagagcgcaagaggacactgggccaaggggagaggacgggcctgccctcatctcgctacctcagccggccgctccctggagatcttggctcagtatgttaggaggggccaggcagcggggcagggacagggagccgagtgcccctcagagtcccccaaacacaagcacatcacacctcccagtgagagagctgtccattgaccta

SEQ ID NO: 166521 - DNA, 4561 bp, Homo sapiens
  Payload ID: 12789
  Gene Symbol: PLEKHA7
  Gene Name: pleckstrin homology domain containing, family A member 7
  ENST ID: ENST00000531066
  CDS Start-End: 43-3858
ccccctcccccccaccccgcggcggctccgcgctcggcgaacatggcggcggcgacggtcgggcgggacactttacctgagcattggtcctacggggtgtgccgggatggccgcgtcttcttcatcaatgaccagctccgctgcacgacctggctgcatccgcgcaccggggagcccgtcaactcgggccacatgatccgctcagacctgccccgcggctgggaggagggcttcacggaggagggcgccagctacttcatcgaccataaccagcagaccacagcattcaggcatcctgtgacgggacagttttctccagaaaatagtgaattcattcttcaagaagagccgaatccacatatgtcgaagcaagacagaaaccaaagaccgtccagcatggtcagtgaaacatccacggctgggaccgcctccaccctggaggccaagcctggacccaagatcataaagtccagcagtaaagtccacagctttgggaagagagaccaggccattcggaggaaccccaatgttcccgtggtggtgaggggctggctgcacaagcaggacagttctgggatgaggctgtggaaaaggaggtggtttgtgcttgctgattactgcttattttactataaagacagccgagaagaagcggtcctcgggagcatccccttgcccagctacgtgatctctcctgtggcccctgaggatcgcataagccgcaaatattcctttaaggctgtgcacacggggatgcgagcgctcatctataacagctccacagcgggctctcaggccgagcagtcaggcatgaggacctactacttcagtgccgacacccaggaggacatgaacgcttgggtcagggccatgaaccaggctgcacaggtgctgtctcgatcgtcactgaagagggatatggagaaggtggagcggcaggctgtcccccaggccaaccacacagagtcctgtcacgaatgtggccgggtgggacccggacatacgagagattgtcctcatcgtggccatgatgacattgtcaacttcgagaggcaggagcaggagggagagcagtaccgttcccagagggacccactggagggcaagcgggaccggagcaaggccaggtctccgtactcgccagccgaggaggatgccttgtttatggatttacccactggcccaagaggccagcaggcacagccccaacgggcagagaagaatggaatgctgcctgcctcatatggcccaggagaacagaatgggactggtgggtaccagcgggcctttcctcccaggaccaaccctgaaaaacacagccaaaggaagagcaatctggcccaggtggagcactgggcaagggcccagaaaggggatagcaggagtcttcccttggaccagacgcttcctcgccagggtcctggccaatccctgtccttcccagaaaactaccagactcttcccaagagcacccgacacccctcggggggctcctcgccacctccccgaaacctgccaagtgactacaagtatgcgcaggaccgagccagccacctgaagatgtcgagtgaagagcgccgggcgcaccgggatggcaccgtgtggcagctctacgagtggcagcagcgccagcagttccggcacggcagccccacagcgcccatctgccttggctccccagagttcaccgaccagggccggagcaggagcatgctagaggtgccccgctccatctctgtgcctccatctccctcggacatccctcccccaggacccccaagggtcttcccaccccggcggccacacacaccagcagagcgagtcacagtgaagccaccggaccagaggaggagtgtggacatctcgctgggggattctccaaggagggcacggggccacgctgtcaagaactcatctcatgtggaccgacgctccatgccctccatgggttacatgacccacaccgtcagcgctcccagtttacatggaaaatcggctgatgatacctacctccagctgaagaaagacctggagtacctggatctaaagatgacaggccgggaccttctcaaggatcgaagtctgaagcctgtgaagatcgctgagagcgacactgacgtcaaactgagcatcttctgtgaacaagacagggtcctccaggacttggaagacaagatacgagcccttaaagagaacaaagaccagctagaatctgtgctggaggtgttgcacagacagatggagcagtaccgagaccagccccagcacttggagaagattgcctaccagcagaagttgctgcaggaggaccttgtccatatccgagctgagctctccagagagtccactgagatggaaaatgcttggaacgaatacctgaagttggagaatgatgtggaacagctgaagcagaccctgcaggagcaacacagaagagccttttttttccaggagaaatcgcagatacagaaagatctatggagaattgaagatgtcactgcaggcctgagtgcaaataaagagaacttcagaattctagtggagtcagtaaaaaatccggagagaaaaacggtgcctttgtttcctcacccgcctgtgccttcactctcaacttctgagagcaagccgcccccacagcccagtcctcccaccagccctgtgcggacccctctggaggttcgactcttcccccagctgcaaacctacgtgccgtaccgacctcacccaccccagctgaggaaagtgacatccccccttcagtcaccaactaaggcgaagcccaaagttgaagatgaagcacctcccaggcccccactccccgaactctacagcccagaggaccagcccccggctgtgccgcctctgccaagagaggccaccatcatccggcacacatctgtgcggggcctcaagcggcagtcagacgagaggaagcgagaccgggagctggggcagtgtgtgaatggggattccagggtggagctgcggtcgtatgtcagtgagcctgagctggcgaccctcagcggggacatggcccagccctccctaggacttgtgggccctgagagcaggtaccagacgctgccaggcagagggctctcagggtccacgtcaaggctccagcagtcgtccaccattgctccctacgtcacactccggaggggtctcaatgccgaaagcagcaaggcgaccttccctagacctaagagtgccttggagcgcctgtactcaggggatcaccagcgaggcaagatgagtgcagaggagcagctggagcgcatgaagcgacaccagaaggccctggtccgagagcgcaagaggacactgggccaaggggagaggacgggcctgccctcatctcgctacctcagccggccgctccctggagatcttggctcatggaagcgtgagcaggactttgacctgcagttgctggaacgggtcgtgcaaggggaaaaaaaggacaaggaggagaatggctggttgaaagtgcaggccatgcctgtcactgagttggacctggagcctcaagactatgacttggacatcagcagagagctgtccaaaccagagaaggtgtcaatccctgagcgctacgtggagctagatcccgaagagccacccagccttgaggagctgcaggcgcggtaccgcaaagccgagaagatccgcaacatcctcgcccggtcaagcatgtgcaacctacagccgacctcaggccaggaccagaacagtgtggctgacctggacttgcagctgcaggagcaggagcgcatcatcaacatctcctacgccctggcctccgaggcctcccagcgtagcaagcaggtggcagcccaggcagtgactgacccgtgacccagcatgcaaagaagcctggagccaggggcccagtggaaccagcttcctccaaggagatgacctttctgcccccaaggaaaccccttccagctgagcagggaatccggccggaggaaggagcagcttaccgactgcgggtgttcaccacaggccaggccctaatatgcacccactagtttagctcagactcctctctacatatgaatggcaaaggcacttttgatatacactgtaaaatacactgtattttagaatcggaatctattttctaatgttcccctcaagggctgagtggcaggaaggttgaggatgcaggactttgcagctgcacgtacagattcaggtacttctgggtgacaggtgttgtgggggcaggaagggcggggcaagccgaggctagtccaacttccaatgacctcaggagaaagtgagatttaaagaggtgttcccagtagactccagcaagaggctggttggcgtgctgtctgggagaagaggggcccttggctgcagagatcagctgtccctgacctgatgaccagctctgtgtgaaactccacgaggatcacacgtggagcccaagtctgtgccttgccccttgggtttggcttaggggcaacagtgtgttcaagaggactggggcccacaacctgcccccaggcttcctccagcaaaaggctcttgtcagaaagaaaaaagc

SEQ ID NO: 166522 - DNA, 543 bp, Homo sapiens
  Payload ID: 12789
  Gene Symbol: PLEKHA7
  Gene Name: pleckstrin homology domain containing, family A member 7
  ENST ID: ENST00000528376
  CDS Start-End: 173-543
ctgacctgaacctaagatttaataaggtggtgcagctggggaagacactatccgaacgtggagcccaaagggaggccataaccagcagaccacagcattcaggcatcctgtgacgggacagttttctccagaaaatagtgaattcattcttcaagaagagccgaatccacatatgtcgaagcaagacagaaaccaaagaccgtccagcatggtcagtgaaacatccacggctgggaccgcctccaccctggaggccaagcctggacccaagatcataaagtccagcagtaaagtccacagctttgggaagagagaccaggccattcggaggaaccccaatgttcccgtggtggtgaggggctggctgcacaagcaggacagttctgggatgaggctgtggaaaaggaggtggtttgtgcttgctgattactgcttattttactataaagacagccgagaagaagcggtcctcgggagcatccccttgcccagctacgtgatctctcctgtggcccctgaggatcgcataagccgcaaatattc

SEQ ID NO: 166523 - DNA, 2016 bp, Homo sapiens
  Payload ID: 12790
  Gene Symbol: PLEKHB1
  Gene Name: pleckstrin homology domain containing, family B (evectins) member 1
  Uniprot ID: Q9UF11
  ENST ID: ENST00000227214
  CDS Start-End: 230-799
actccccctccctggggtgggcaggtccggagggcggggcccgggggcagctgggctctcaggcgctgcgggaggagagaaatgccccaggctctccggggcacacaaagcgcaggcgcagcgggttgggtggcagcagcatcgagtagcggccgcttaggcagcaacatccgcaacaagtgtagacaaggtcccgcctgactccgctctggaaagtccttttgaagaaatggccctggtgaggggcggctggctgtggagacagagctccatcctccgccgctggaagcggaactggtttgccctgtggctggacgggaccctgggatactaccacgatgagacagcgcaggacgaggaggaccgtgtgctcatccacttcaatgtccgtgacataaagatcggcccagagtgccatgatgtgcagcccccagagggccggagccgagatggcctgctgactgtgaacctacgggaaggcggccgcctgcacctctgtgcggagaccaaggatgatgccctagcatggaagacagcactgctggaggcaaactccaccccggtgcgcgtctacagcccgtaccaagactactacgaggtggtgccccccaatgcacacgaggccacgtatgtccgcagctactacggaccgccctacgcaggccctggcgtgacgcacgtgatagtgcgggaggatccctgctacagcgccggcgcccctctggccatgggcatgcttgcgggagccgccactggggcggcgctgggctcgctcatgtggtcgccctgctggttctgagccctgggactcggagcactgacccctgcgcttggattgctagactcctcttcctcctggaccccatcctctaccatccaagccctgtcccactttggccctatcctctccattagctccttccgggtttggaccattccccccactccctacccttaatccccacatgggaagaagctatcatcacaggtacaaacatcgcttgaagtcttcacatctaccactagacacccccaaaatctgttatagacatttatggatacatttcctctaaacacaacagggcacagcaaatacgacttcatttggcttcgagttccccaggcgctgtagacacaacatgaatcgggctctctgctctctccttagggagctcgagtcctggtggggagaacaggagtaaacaaggacttgacaaagctgaagagttatcagtcctttgacaaggacaggtggggcagggagcaagacaggtaggctggaagaacagttattggcaagtatgcagagccgtgaacgtcatggcatgtccaaggaattaaatgggagttcatttgggctggggtggaggctgggatcagaccgtggtgggccttcaagctaaggagcttcctaggtgaaaggggagatgtgagccttctctggagggaagtttcatgattgcatctataatgaatatattgcctgttttgtgaatactgacacatgtccatacctaaaacactcctgagtcaagtcccatccttcccacaaacagcttcctggctggtacccatgataacaattgagctgaacctggggacccctggttggggaacaggtgagttctatttgagacttccagccctagaaagctgcctccgtccagaaatgcctctcacaccaggagctcggccctctctttgtagctgtgactgtcaccctctcaggctttgtctcatccttcattctgaataagatggcagtgttctcctctggggcctgatccacctctacaccagcccaggaagccccatctgtgcctgccctcaggtggtccaccagtctccccctttggttcccttccagtctcttccccctttctatcccaatcaccaatagaaatgctaacatccctgcctggtagccagactagcccactaaagctcccctgtaaatgggggctccattagttctgctgccgagactaataaagatttggttggctctagcagtaa

SEQ ID NO: 166524 - DNA, 2380 bp, Homo sapiens
  Payload ID: 12790
  Gene Symbol: PLEKHB1
  Gene Name: pleckstrin homology domain containing, family B (evectins) member 1
  Uniprot ID: Q9UF11
  ENST ID: ENST00000354190
  CDS Start-End: 432-1163
aagagaggaaggcttaaagagccagactgcgcagccaggactggggtgatgggcgctgtcctgccaggccaaagaatgaagatgtagccccgcccccaacctagggaggaggaccagcccggttcctgtcctgcccccgcaacctcgccccgattccactccgggaacctcggcgatgctgagccaagaccacttctgaatcagggatgacttgtctagtgaacctagggtcagagccatcagttggaaaggctgggaggagcctggagaaagagggcgaccttccttgggatctgtgcgctccctccttgcctccccctccagcctcccacttggtagcaccttcctgatccccttatctctaaggcgctcagggaaatgccccgctgcgggagccttctgggaaatgctgccctggccacccaggaaccatgagccctgcagccccggtcccgcctgactccgctctggaaagtccttttgaagaaatggccctggtgaggggcggctggctgtggagacagagctccatcctccgccgctggaagcggaactggtttgccctgtggctggacgggaccctgggatactaccacgatgagacagcgcaggacgaggaggaccgtgtgctcatccacttcaatgtccgtgacataaagatcggcccagagtgccatgatgtgcagcccccagagggccggagccgagatggcctgctgactgtgaacctacgggaaggcggccgcctgcacctctgtgcggagaccaaggatgatgccctagcatggaagacagcactgctggaggcaaactccaccccggccccagctggagccaccgtccctcccaggagccgccgggtttgctccaaggtcaggtgtgtgacccgctcgtggagcccctgtaaggttgagaggcggatctgggtgcgcgtctacagcccgtaccaagactactacgaggtggtgccccccaatgcacacgaggccacgtatgtccgcagctactacggaccgccctacgcaggccctggcgtgacgcacgtgatagtgcgggaggatccctgctacagcgccggcgcccctctggccatgggcatgcttgcgggagccgccactggggcggcgctgggctcgctcatgtggtcgccctgctggttctgagccctgggactcggagcactgacccctgcgcttggattgctagactcctcttcctcctggaccccatcctctaccatccaagccctgtcccactttggccctatcctctccattagctccttccgggtttggaccattccccccactccctacccttaatccccacatgggaagaagctatcatcacaggtacaaacatcgcttgaagtcttcacatctaccactagacacccccaaaatctgttatagacatttatggatacatttcctctaaacacaacagggcacagcaaatacgacttcatttggcttcgagttccccaggcgctgtagacacaacatgaatcgggctctctgctctctccttagggagctcgagtcctggtggggagaacaggagtaaacaaggacttgacaaagctgaagagttatcagtcctttgacaaggacaggtggggcagggagcaagacaggtaggctggaagaacagttattggcaagtatgcagagccgtgaacgtcatggcatgtccaaggaattaaatgggagttcatttgggctggggtggaggctgggatcagaccgtggtgggccttcaagctaaggagcttcctaggtgaaaggggagatgtgagccttctctggagggaagtttcatgattgcatctataatgaatatattgcctgttttgtgaatactgacacatgtccatacctaaaacactcctgagtcaagtcccatccttcccacaaacagcttcctggctggtacccatgataacaattgagctgaacctggggacccctggttggggaacaggtgagttctatttgagacttccagccctagaaagctgcctccgtccagaaatgcctctcacaccaggagctcggccctctctttgtagctgtgactgtcaccctctcaggctttgtctcatccttcattctgaataagatggcagtgttctcctctggggcctgatccacctctacaccagcccaggaagccccatctgtgcctgccctcaggtggtccaccagtctccccctttggttcccttccagtctcttccccctttctatcccaatcaccaatagaaatgctaacatccctgcctggtagccagactagcccactaaagctcccctgtaaatgggggctccattagttctgctgccgagactaataaagatttggttggctctagcagtaa

SEQ ID NO: 166525 - DNA, 2275 bp, Homo sapiens
  Payload ID: 12790
  Gene Symbol: PLEKHB1
  Gene Name: pleckstrin homology domain containing, family B (evectins) member 1
  Uniprot ID: Q9UF11
  ENST ID: ENST00000398492
  CDS Start-End: 432-1058
aagagaggaaggcttaaagagccagactgcgcagccaggactggggtgatgggcgctgtcctgccaggccaaagaatgaagatgtagccccgcccccaacctagggaggaggaccagcccggttcctgtcctgcccccgcaacctcgccccgattccactccgggaacctcggcgatgctgagccaagaccacttctgaatcagggatgacttgtctagtgaacctagggtcagagccatcagttggaaaggctgggaggagcctggagaaagagggcgaccttccttgggatctgtgcgctccctccttgcctccccctccagcctcccacttggtagcaccttcctgatccccttatctctaaggcgctcagggaaatgccccgctgcgggagccttctgggaaatgctgccctggccacccaggaaccatgagccctgcagccccggtcccgcctgactccgctctggaaagtccttttgaagaaatggccctggtgaggggcggctggctgtggagacagagctccatcctccgccgctggaagcggaactggtttgccctgtggctggacgggaccctgggatactaccacgatgagacagcgcaggacgaggaggaccgtgtgctcatccacttcaatgtccgtgacataaagatcggcccagagtgccatgatgtgcagcccccagagggccggagccgagatggcctgctgactgtgaacctacgggaaggcggccgcctgcacctctgtgcggagaccaaggatgatgccctagcatggaagacagcactgctggaggcaaactccaccccggtgcgcgtctacagcccgtaccaagactactacgaggtggtgccccccaatgcacacgaggccacgtatgtccgcagctactacggaccgccctacgcaggccctggcgtgacgcacgtgatagtgcgggaggatccctgctacagcgccggcgcccctctggccatgggcatgcttgcgggagccgccactggggcggcgctgggctcgctcatgtggtcgccctgctggttctgagccctgggactcggagcactgacccctgcgcttggattgctagactcctcttcctcctggaccccatcctctaccatccaagccctgtcccactttggccctatcctctccattagctccttccgggtttggaccattccccccactccctacccttaatccccacatgggaagaagctatcatcacaggtacaaacatcgcttgaagtcttcacatctaccactagacacccccaaaatctgttatagacatttatggatacatttcctctaaacacaacagggcacagcaaatacgacttcatttggcttcgagttccccaggcgctgtagacacaacatgaatcgggctctctgctctctccttagggagctcgagtcctggtggggagaacaggagtaaacaaggacttgacaaagctgaagagttatcagtcctttgacaaggacaggtggggcagggagcaagacaggtaggctggaagaacagttattggcaagtatgcagagccgtgaacgtcatggcatgtccaaggaattaaatgggagttcatttgggctggggtggaggctgggatcagaccgtggtgggccttcaagctaaggagcttcctaggtgaaaggggagatgtgagccttctctggagggaagtttcatgattgcatctataatgaatatattgcctgttttgtgaatactgacacatgtccatacctaaaacactcctgagtcaagtcccatccttcccacaaacagcttcctggctggtacccatgataacaattgagctgaacctggggacccctggttggggaacaggtgagttctatttgagacttccagccctagaaagctgcctccgtccagaaatgcctctcacaccaggagctcggccctctctttgtagctgtgactgtcaccctctcaggctttgtctcatccttcattctgaataagatggcagtgttctcctctggggcctgatccacctctacaccagcccaggaagccccatctgtgcctgccctcaggtggtccaccagtctccccctttggttcccttccagtctcttccccctttctatcccaatcaccaatagaaatgctaacatccctgcctggtagccagactagcccactaaagctcccctgtaaatgggggctccattagttctgctgccgagactaataaagatttggttggctctagcagtaa

SEQ ID NO: 166526 - DNA, 2061 bp, Homo sapiens
  Payload ID: 12790
  Gene Symbol: PLEKHB1
  Gene Name: pleckstrin homology domain containing, family B (evectins) member 1
  Uniprot ID: Q9UF11
  ENST ID: ENST00000398494
  CDS Start-End: 170-844
aggcgctgcgggaggagagaaatgccccaggctctccggggcacacaaagcgcaggcgcagcgggttgggtggcagcagcatcgagtagcggccgcttaggcagcaacatccgcaacaagtgtagacaaggtcccgcctgactccgctctggaaagtccttttgaagaaatggccctggtgaggggcggctggctgtggagacagagctccatcctccgccgctggaagcggaactggtttgccctgtggctggacgggaccctgggatactaccacgatgagacagcgcaggacgaggaggaccgtgtgctcatccacttcaatgtccgtgacataaagatcggcccagagtgccatgatgtgcagcccccagagggccggagccgagatggcctgctgactgtgaacctacgggaaggcggccgcctgcacctctgtgcggagaccaaggatgatgccctagcatggaagacagcactgctggaggcaaactccaccccggccccagctggagccaccgtccctcccaggagccgccgggtttgctccaaggtcaggtgtgtgacccgctcgtggagcccctgtaaggttgagaggcggatctgggtgcgcgtctacagcccgtaccaagactactacgaggtggtgccccccaatgcacacgaggccacgtatgtccgcagctactacggaccgccctacgcaggccctggcgtgacgcacgtgatagtgcgggaggatccctgctacagcgccggcgcccctctggccatgggcatgcttgcgggagccgccactggggcggcgctgggctcgctcatgtggtcgccctgctggttctgagccctgggactcggagcactgacccctgcgcttggattgctagactcctcttcctcctggaccccatcctctaccatccaagccctgtcccactttggccctatcctctccattagctccttccgggtttggaccattccccccactccctacccttaatccccacatgggaagaagctatcatcacaggtacaaacatcgcttgaagtcttcacatctaccactagacacccccaaaatctgttatagacatttatggatacatttcctctaaacacaacagggcacagcaaatacgacttcatttggcttcgagttccccaggcgctgtagacacaacatgaatcgggctctctgctctctccttagggagctcgagtcctggtggggagaacaggagtaaacaaggacttgacaaagctgaagagttatcagtcctttgacaaggacaggtggggcagggagcaagacaggtaggctggaagaacagttattggcaagtatgcagagccgtgaacgtcatggcatgtccaaggaattaaatgggagttcatttgggctggggtggaggctgggatcagaccgtggtgggccttcaagctaaggagcttcctaggtgaaaggggagatgtgagccttctctggagggaagtttcatgattgcatctataatgaatatattgcctgttttgtgaatactgacacatgtccatacctaaaacactcctgagtcaagtcccatccttcccacaaacagcttcctggctggtacccatgataacaattgagctgaacctggggacccctggttggggaacaggtgagttctatttgagacttccagccctagaaagctgcctccgtccagaaatgcctctcacaccaggagctcggccctctctttgtagctgtgactgtcaccctctcaggctttgtctcatccttcattctgaataagatggcagtgttctcctctggggcctgatccacctctacaccagcccaggaagccccatctgtgcctgccctcaggtggtccaccagtctccccctttggttcccttccagtctcttccccctttctatcccaatcaccaatagaaatgctaacatccctgcctggtagccagactagcccactaaagctcccctgtaaatgggggctccattagttctgctgccgagactaataaagatttggttggctctagcagtaa

SEQ ID NO: 166527 - DNA, 567 bp, Homo sapiens
  Payload ID: 12790
  Gene Symbol: PLEKHB1
  Gene Name: pleckstrin homology domain containing, family B (evectins) member 1
  ENST ID: ENST00000535582
  CDS Start-End: 217-567
aaagcgcaggcgcagcgggttgggtggcagcagcatcgagtagcggccgcttaggcagcaacatccgcaacaagtgtagacaagacattctgatttaattgttacggagtgtggcctggtatcggaagttctcaaagctcctgccggcataacggtttgaagccaggactgctgggtgtcccgcctgactccgctctggaaagtccttttgaagaaatggccctggtgaggggcggctggctgtggagacagagctccatcctccgccgctggaagcggaactggtttgccctgtggctggacgggaccctgggatactaccacgatgagacagcgcaggacgaggaggaccgtgtgctcatccacttcaatgtccgtgacataaagatcggcccagagtgccatgatgtgcagcccccagagggccggagccgagatggcctgctgactgtgaacctacgggaaggcggccgcctgcacctctgtgcggagaccaaggatgatgccctagcatggaagacagcactgctggaggcaaactccaccccggtgcgcgtctacagcccg

SEQ ID NO: 166528 - DNA, 562 bp, Homo sapiens
  Payload ID: 12790
  Gene Symbol: PLEKHB1
  Gene Name: pleckstrin homology domain containing, family B (evectins) member 1
  ENST ID: ENST00000546251
  CDS Start-End: 124-562
aaagcgcaggcgcagcgggttgggtggcagcagcatcgagtagcggccgcttaggcagcaacatccgcaacaagtgtagacaaggtcccgcctgactccgctctggaaagtccttttgaagaaatggccctggtgaggggcggctggctgtggagacagagctccatcctccgccgctggaagcggaactggtttgccctgtggctggacgggaccctgggatactaccacgatgagacagcgcaggacgaggaggaccgtgtgctcatccacttcaatgtccgtgacataaagatcggcccagagtgccatgatgtgcagcccccagagggccggagccgagatggcctgctgactgtgaacctacgggaaggcggccgcctgcacctctgtgcggagaccaaggatgatgccctagcatggaagacagcactgctggaggcaaactccaccccgatgataagactgaagctcattcatccgcacaacaaatatttactgagctgctactatgggccaggtggtgtgccaagtgccagggatcagaggtgcgcgtctacag

SEQ ID NO: 166529 - DNA, 618 bp, Homo sapiens
  Payload ID: 12790
  Gene Symbol: PLEKHB1
  Gene Name: pleckstrin homology domain containing, family B (evectins) member 1
  ENST ID: ENST00000542389
  CDS Start-End: 138-618
aaacgtttcctgggtggctccccagggacggcagggctgggggcttctctccagggagctgctgctgaggcctgtgtctcccgtggctcctctgacaggtcccgcctgactccgctctggaaagtccttttgaagaaatggccctggtgaggggcggctggctgtggagacagagctccatcctccgccgctggaagcggaactggtttgccctgtggctggacgggaccctgggatactaccacgatgagacagcgcaggacgaggaggaccgtgtgctcatccacttcaatgtccgtgacataaagatcggcccagagtgccatgatgtgcagcccccagagggccggagccgagatggcctgctgactgtgaacctacgggaaggcggccgcctgcacctctgtgcggagaccaaggatgatgccctagcatggaagacagcactgctggaggcaaactccaccccggccccagctggagccaccgtccctcccaggagccgccgggtttgctccaaggtcaggtgtgtgacccgctcgtggagcccctgtaaggttgagaggcggatctgggtgcgcgtctacagcccgtaccaagactactacgaggtggtgc

SEQ ID NO: 166530 - DNA, 433 bp, Homo sapiens
  Payload ID: 12790
  Gene Symbol: PLEKHB1
  Gene Name: pleckstrin homology domain containing, family B (evectins) member 1
  ENST ID: ENST00000536527
  CDS Start-End: 229-433
gggaaatgctgccctggccacccaggaaccatgagccctgcagccccggaactgagttcaatgattcttaagaaaaagtatttcatgataaatgagtgaacaaatgtcttaatagaaaagtaaaattgcaggcggggctgcttctgcccagctctacaggggtagactacaagtcccagtacgcctcgggtcccgcctgactccgctctggaaagtccttttgaagaaatggccctggtgaggggcggctggctgtggagacagagctccatcctccgccgctggaagcggaactggtttgccctgtggctggacgggaccctgggatactaccacgatgagacagcgcaggacgaggaggaccgtgtgctcatccacttcaatgtccgtgacataaagatcggcccagagtgccatggtgagccaggcacag

SEQ ID NO: 166531 - DNA, 632 bp, Homo sapiens
  Payload ID: 12790
  Gene Symbol: PLEKHB1
  Gene Name: pleckstrin homology domain containing, family B (evectins) member 1
  ENST ID: ENST00000543085
  CDS Start-End: 153-569
agaaatgccccaggctctccggggcacacaaagcgcaggcgcagcgggttgggtggcagcagcatcgagtagcggccgcttaggcagcaacatccgcaacaagtgtagacaaggtcccgcctgactccgctctggaaagtccttttgaagaaatggccctggtgaggggcggctggctgtggagacagaatgtgcagcccccagagggccggagccgagatggcctgctgactgtgaacctacgggaaggcggccgcctgcacctctgtgcggagaccaaggatgatgccctagcatggaagacagcactgctggaggcaaactccaccccggtgcgcgtctacagcccgtaccaagactactacgaggtggtgccccccaatgcacacgaggccacgtatgtccgcagctactacggaccgccctacgcaggccctggcgtgacgcacgtgatagtgcgggaggatccctgctacagcgccggcgcccctctggccatgggcatgcttgcgggagccgccactggggcggcgctgggctcgctcatgtggtcgccctgctggttctgagccctgggactcggagcactgacccctgcgcttggattgctagactcctcttcctcctggacc

SEQ ID NO: 166532 - DNA, 579 bp, Homo sapiens
  Payload ID: 12790
  Gene Symbol: PLEKHB1
  Gene Name: pleckstrin homology domain containing, family B (evectins) member 1
  ENST ID: ENST00000540431
  CDS Start-End: 40-579
gtcccgcctgactccgctctggaaagtccttttgaagaaatggccctggtgaggggcggctggctgtggagacagatgcatctggaatatcgtacaggctccatcctccgccgctggaagcggaactggtttgccctgtggctggacgggaccctgggatactaccacgatgagacagcgcaggacgaggaggaccgtgtgctcatccacttcaatgtccgtgacataaagatcggcccagagtgccatgatgtgcagcccccagagggccggagccgagatggcctgctgactgtgaacctacgggaaggcggccgcctgcacctctgtgcggagaccaaggatgatgccctagcatggaagacagcactgctggaggcaaactccaccccggtgcgcgtctacagcccgtaccaagactactacgaggtggtgccccccaatgcacacgaggccacgtatgtccgcagctactacggaccgccctacgcaggccctggcgtgacgcacgtgatagtgcgggaggatccctgctacagcgccggcgcccctctggccatgggcatgcttgcgggagcc

SEQ ID NO: 166533 - DNA, 685 bp, Homo sapiens
  Payload ID: 12790
  Gene Symbol: PLEKHB1
  Gene Name: pleckstrin homology domain containing, family B (evectins) member 1
  ENST ID: ENST00000541597
  CDS Start-End: 196-685
ggcaagtgagtcgccctcaggaacagagggcacctacctggattccagtgcaagctacatcatgtacatggatgagtcatttgctaaccctcagtttgtccatctgtaaaacaggagtaaggattcccttcctaacagggttagagtggggacaaggtcccgcctgactccgctctggaaagtccttttgaagaaatggccctggtgaggggcggctggctgtggagacagagctccatcctccgccgctggaagcggaactggtttgccctgtggctggacgggaccctgggatactaccacgatgagacagcgcaggacgaggaggaccgtgtgctcatccacttcaatgtccgtgacataaagatcggcccagagtgccatgatgtgcagcccccagagggccggagccgagatggcctgctgactgtgaacctacgggaaggcggccgcctgcacctctgtgcggagaccaaggatgatgccctagcatggaagacagcactgctggaggcaaactccaccccggtgcgcgtctacagcccgtaccaagactactacgaggtggtgccccccaatgcacacgaggccacgtatgtccgcagctactacggaccgccctacgcaggccctggcgtgacgcacgtgatagtgcgggaggatccctgctacagcgccggcgccc

SEQ ID NO: 166534 - DNA, 1049 bp, Homo sapiens
  Payload ID: 12790
  Gene Symbol: PLEKHB1
  Gene Name: pleckstrin homology domain containing, family B (evectins) member 1
  Uniprot ID: Q9UF11
  ENST ID: ENST00000535129
  CDS Start-End: 362-931
acttctacagatctagaaactgagaccaggacagagggccagggaggagggatatggccaaagttaccaagctgaggctggaatccaggctcctggtccccacccccaccccacaccaatggctgccctgctgaccccacagtgacagtgctcccattctcttcctgagcagagaatggggaggaggccgaggccgcctggcccttgtttactaaccctccctcaaacgtttcctgggtggctccccagggacggcagggctgggggcttctctccagggagctgctgctgaggcctgtgtctcccgtggctcctctgacaggtcccgcctgactccgctctggaaagtccttttgaagaaatggccctggtgaggggcggctggctgtggagacagagctccatcctccgccgctggaagcggaactggtttgccctgtggctggacgggaccctgggatactaccacgatgagacagcgcaggacgaggaggaccgtgtgctcatccacttcaatgtccgtgacataaagatcggcccagagtgccatgatgtgcagcccccagagggccggagccgagatggcctgctgactgtgaacctacgggaaggcggccgcctgcacctctgtgcggagaccaaggatgatgccctagcatggaagacagcactgctggaggcaaactccaccccggtgcgcgtctacagcccgtaccaagactactacgaggtggtgccccccaatgcacacgaggccacgtatgtccgcagctactacggaccgccctacgcaggccctggcgtgacgcacgtgatagtgcgggaggatccctgctacagcgccggcgcccctctggccatgggcatgcttgcgggagccgccactggggcggcgctgggctcgctcatgtggtcgccctgctggttctgagccctgggactcggagcactgacccctgcgcttggattgctagactcctcttcctcctggaccccatcctctaccatccaagccctgtcccactttggccctatcctctccattagct

SEQ ID NO: 166535 - DNA, 534 bp, Homo sapiens
  Payload ID: 12790
  Gene Symbol: PLEKHB1
  Gene Name: pleckstrin homology domain containing, family B (evectins) member 1
  ENST ID: ENST00000545798
  CDS Start-End: 281-534
aaagcgcaggcgcagcgggttgggtggcagcagcatcgagtagcggccgcttaggcagcaacatccgcaacaagtgtagacaaggtgggtgcatcaaggggaggggctggaaaaggagtctgcacctgaccctcttgtctgatctgtgtcaagaccgtggagaggggagggagcggcaagaggaacagacaaggctgggccttccagcccaggtgtgccagcccttgttacgcagcaacaggtcccgcctgactccgctctggaaagtccttttgaagaaatggccctggtgaggggcggctggctgtggagacagagctccatcctccgccgctggaagcggaactggtttgccctgtggctggacgggaccctgggatactaccacgatgagacagcgcaggacgaggaggaccgtgtgctcatccacttcaatgtccgtgacataaagatcggcccagagtgccatgatgtgcagcccccagagggccggagccgagatggcctgctgactgtgaacctacgggaaggcgg

SEQ ID NO: 166536 - DNA, 656 bp, Homo sapiens
  Payload ID: 12790
  Gene Symbol: PLEKHB1
  Gene Name: pleckstrin homology domain containing, family B (evectins) member 1
  ENST ID: ENST00000543524
  CDS Start-End: 193-656
aacatccgcaacaagtgtagacaaggtgggtgcatcaaggggaggggctggaaaaggagtctgcacctgaccctcttgtctgatctgtgtcaagaccgtggagaggggagggagcggcaagaggaacagacaaggctgggccttccagcccaggtcccgcctgactccgctctggaaagtccttttgaagaaatggccctggtgaggggcggctggctgtggagacagagctccatcctccgccgctggaagcggaactggtttgccctgtggctggacgggaccctgggatactaccacgatgagacagcgcaggacgaggaggaccgtgtgctcatccacttcaatgtccgtgacataaagatcggcccagagtgccatgatgtgcagcccccagagggccggagccgagatggcctgctgactgtgaacctacgggaaggcggccgcctgcacctctgtgcggagaccaaggatgatgccctagcatggaagacagcactgctggaggcaaactccaccccggtgcgcgtctacagcccgtaccaagactactacgaggtggtgccccccaatgcacacgaggccacgtatgtccgcagctactacggaccgccctacgcaggccctggcgtgacgcacgtgatagtgcggga

SEQ ID NO: 166537 - DNA, 577 bp, Homo sapiens
  Payload ID: 12790
  Gene Symbol: PLEKHB1
  Gene Name: pleckstrin homology domain containing, family B (evectins) member 1
  ENST ID: ENST00000538227
  CDS Start-End: 124-577
aaagcgcaggcgcagcgggttgggtggcagcagcatcgagtagcggccgcttaggcagcaacatccgcaacaagtgtagacaaggtcccgcctgactccgctctggaaagtccttttgaagaaatggccctggtgaggggcggctggctgtggagacagagctccatcctccgccgctggaagcggaactggtttgccctgtggctggacgggaccctgggatactaccacgatgagacagcgcaggacgaggaggaccgtgtgctcatccacttcaatgtccgtgacataaagatcggcccagagtgccatgatgtgcagcccccagagggccggagccgagatggcctgctgactgtgaacctacgggaaggcggccgcctgcacctctgtgcggagaccaaggatgatgccctagcatggaagacagcactgctggaggcaaactccaccccggtgcgcgtctacagcccgtaccaagactactacgaggtggtgccccccaatgcacacgaggccacgtatgtccgcagctactacggaccgccctacgcaggtaagtctccagcgtgccccg

SEQ ID NO: 166538 - DNA, 586 bp, Homo sapiens
  Payload ID: 12790
  Gene Symbol: PLEKHB1
  Gene Name: pleckstrin homology domain containing, family B (evectins) member 1
  ENST ID: ENST00000539157
  CDS Start-End: 124-586
aaagcgcaggcgcagcgggttgggtggcagcagcatcgagtagcggccgcttaggcagcaacatccgcaacaagtgtagacaaggtcccgcctgactccgctctggaaagtccttttgaagaaatggccctggtgaggggcggctggctgtggagacagatgcatctggaatatcgtacaggctccatcctccgccgctggaagcggaactggtttgccctgtggctggacgggaccctgggatactaccacgatgagacagcgcaggacgaggaggaccgtgtgctcatccacttcaatgtccgtgacataaagatcggcccagagtgccatgatgtgcagcccccagagggccggagccgagatggcctgctgactgtgaacctacgggaaggcggccgcctgcacctctgtgcggagaccaaggatgatgccctagcatggaagacagcactgctggaggcaaactccaccccggccccagctggagccaccgtccctcccaggagccgccgggtttgctccaaggtcaggtgtgtgacccgctcgtggagcccctgtaaggttgagaggcggatctgggtgc

SEQ ID NO: 166539 - DNA, 4208 bp, Homo sapiens
  Payload ID: 12791
  Gene Symbol: PLEKHB2
  Gene Name: pleckstrin homology domain containing, family B (evectins) member 2
  Uniprot ID: Q96CS7
  ENST ID: ENST00000234115
  CDS Start-End: 464-1129
cttggacgcccggtccttcagttttttgagcacctcaagcttctggcctacaaaacgctcccggctcagctggagctttctgcgcccgggtcctagagtcgcccatttctctaaggcgccttggccctatttttagagagcggtatttagaaaccaagattagggtgctaacaatttttttttaaatttttatatttttaagacaggatctcactttgtaacacttccttttagtggaagcgccgacctcctgggagacccacgccccctgccgccttccgtcccgtttctcagaaaaccacccagacaccccgccccaccggccggggcccgccgcgcatgcgcgccgaggcgtgacgtcagaacggcggccaggacgccggacgtgcggcagttgcaggcgagcaggcgaggaatcgccgtggcgtcttggtgttctccacgctggttcgcaggtgaagagatggcgtttgtgaagagtggctggttgctgcgacagagtactattttgaagcgctggaagaagaactggtttgatctgtggtcggatggtcacctgatctattatgatgaccagactcggcagaatatcgaggataaggtccacatgccaatggactgcatcaacatccgcacggggcaggaatgtcgggatactcagcccccggatggaaagtcaaaagactgcatgctccagattgtttgtcgagatgggaaaacaattagtctttgtgcagaaagcacagatgattgcttggcctggaaatttacactccaagattctaggacaaacacagcgtatgtgggctctgcagtcatgaccgatgagacatccgtggtttcctcacctccaccatacacggcctatgctgcaccggcccctgaggcttatggctatgggccatacggtggtgcgtacccgccaggaactcaagttgtctacgctgcgaatgggcaggcgtatgccgtgccctaccagtacccatatgcaggactttatggacagcagcctgctaaccaagtcatcattcgagagcgctatcgagacaacgacagcgacctggcactgggcatgctggcaggagcagccacgggcatggccttagggtctctattttgggtcttctaggggcctcaaggtcttgatgtgcatagcttctgataaccctgtgtgcaataatatgatttgcagggcatttctgtttgtgacaaaagtttttaataatagttttaatcattcctttgaaagtagtgatgtcataattgtactaatccacataagtaccacagagaagggtttgaactgtgctattttgttcaaatgttgactctccgggggcactggctcattccaagactgttcttgtgcaactctcagaataccttatttgagcatacctgttttgaaaggcattttctttttagagttaggtgtagtgcttaagggttaatttattttcatgttatgccagtaatatagtgttgtatgcctattgagtgattgtggcaagaaaagctacagcttctttgcgtttaactttttcaaaccacagaccagaactggttgcatgttactttaggagttgtgggttggtaagctcccaggtacttcccgaggctatggtgtgagagcccccgtcctgccctctggggctccacaggcccctggcaaggccgatggctcaggatgatggggcacagcccgcctttgaacaatcatgcttcagaaatctgcctgaccctagctgctgctgctgctcactttattcttgtatggctttggtaggcatacttggagaacatatcccacattaggaattgatttaagcctgagagtttgagggctttaatcctttaaaacttggagaagctggctgggcgcggtggctcacgcctgtaatcccagcactttgagagaccgaggcgggcggatcacgaggtcaggagatcgagaccatcctggctaacacggtgaaaccccatctctactaaaaatacaaaaaattagctgggcgtggtggcaggcgcctgtggtcccagctactcgggaggctgaggcaggagaatagtgtgaacccaggaggcggagcttgcagtgagccaagatagtgccactgcacttcagcctgggtgacagagtgagactctgtctcaaaaaaaaaaaaaaaatcctggagaagccagaacaatatacaaacaagtatgtggaggcagatttgctttattccaagaggctgtttgagtgtgtgtctgcctaagcctccttatagcctatttttctacttgctgagagagtaatattaaaggaacagtgagggagtggaaggagagccttagttagagcgttcccatttctggcctttgggggtttgcactgtgcgggagatgctctctcatcactctgaaggcccatcctgtgcagaagtgggactctgtggctgttcactgagcaccagggcagactgtagctgagcagacttgggttatggatgggatatggggcccagggaccctcaggacacagggaccggctcaaggtaccactcagcctggccaggacccccagctttgcttttgttcttgatctctttgtgatagagaagcttagaacattgaatttggaaccccaaaatgtgtgagtctttggaaaacccattccagcctttcttcaaatgctcttattttcagtatatgaagtgtgtatttgaaatattcatatttctgttatttcttgttttcaagctctgaattattgcagttttctgtcctgcatgctttcaacagtgtgcttttacagtggcagtttagcacagcgaatgtccctgccccacactccatatggtcctgttttcctgaaaatacactccaggtagcacagacttgttattttgcctggctggttacacacatgctgtcttgctttgctgctcagccacctccctctgaggccaacttaggccaacctacataggactccatctttagcgagacaccagagacacctagtgatgaccacgggtctgcttttctctctgatcctaggggacttgttgacatgggagtgtctgtttccacatggaaggatgtctgtttatctctcatctctgaatagatgtatgacaactctagtgtccatggtttaaaatgttgctttgaggattttccatcctgtataagaagaatggctttcttcagattataatcgttattaaagctgtatgtacactttacttaaaaactattaacagtttttcatgttgcactggtggtaattttgaacttggaattactgggtgggaattccaggaaccacagagtattgatttttgctgccaaaatgctcttgaagcagatgtccctgtgctcccctggctgcttctggctgaaggggggaggtgtagactgaagcttgggcactcatgtgtgtcccctccccagtccccatcctagtggggccagtctcattaggcagccatagataagcctggaacttggctgtcattagtgacttgatcctggtatgaaatgcatactgggtataaggttgctcaggtattttatttccttggccacaactcccatagatgccaatgttttgatagcctcagtttctcaacgatgtcttttgtttacagtgctacacttagtgtgagtcaagaagtgcttgagttacaagaaacttcttattcaggtttgagtaagcattttacttccatgtgtacttttaaataatccataccttgaagaagttggccaatgatattatatacatgctgatctgattgttcttttcattccttgagtcaacttcagggtcttggatactaaagagaaggagaactgtggttaatgttttggatcatcatttgtgaacaaggccagactttgcccattttaggctatccaggacttaaggtagccatctggatcataagaaggtcctgcagttgagacaaaatgacccaagtgtattttccacaagttttgatcctgtgtaatatttctttttccttccctagtgtatgtagatacaaggcatggaatgcagttccactttctccccagagttgatctttttgtgattgctttcccgtctctagtagtattctgttgtgtctagagaactgattttttcctacatacgcaaattgtacatttgtaagtgaaaatgtcaatacattaaagcattaaccttaaagcatgtttca

SEQ ID NO: 166540 - DNA, 1167 bp, Homo sapiens
  Payload ID: 12791
  Gene Symbol: PLEKHB2
  Gene Name: pleckstrin homology domain containing, family B (evectins) member 2
  ENST ID: ENST00000404460
  CDS Start-End: 55-984
cgaggaatcgccgtggcgtcttggtgttctccacgctggttcgcaggtgaagagatggcgtttgtgaagagtggctggttgctgcgacagagtactattttgaagcgctggaagaagaactggtttgatctgtggtcggatggtcacctgatctattatgatgaccagactcggcagaatatcgaggataaggtccacatgccaatggactgcatcaacatccgcacggggcaggaatgtcgggatactcagcccccggatggaaagtcaaaagactgcatgctccagattgtttgtcgagatgggaaaacaattagtctttgtgcagaaagcacagatgattgcttggcctggaaatttacactccaagattctaggacaaacacagcgtatgtgggctctgcagtcatgaccgatgagacatccgtggtttcctcacctccaccatacacggcctatgctgcaccggcccctgaggagctgcacagtaaaggtcccaaaatacacaccaccacgagtgcaaaaacccaggcggttctcccaacgcgatgtttttttcccagcgaatctccgataagaaggtctgtgcagatttctgtgctcctacctgcagtaaatattcgtagacgtataaagctaacttttccccagcctgcccgtccgagggcaccaaggagcctttgcctttggcaaacatggtttgcagggaagagggcgcccagcctccccacagccgccaccgctccggctctcccgagctgcccctcgcccccggccccctcccaggcgctccctccctctctcgctggctggcgctctcctagcagcgctcccctccctcccgagcaggcgctggctccgcgctctttccagctgtcaaagcatcaggcccggccgcggccccatcgccctggaactcctcccgtgccggcttggcctggggtgccgccgccgcctcccgcaaggccgcccgctctccggtagctcgcgtgctcgcccggttccgcttgcgcggccctctgcgcccccagcaccgctgccgccgccgccggcgctggcctcatgtgtcacattttcttaatccagtctatggctgatggatatttgggttggttccaactttttgctattgtgaatagtgccgcaataaacatacgtgtgcatgtg

SEQ ID NO: 166541 - DNA, 4349 bp, Homo sapiens
  Payload ID: 12791
  Gene Symbol: PLEKHB2
  Gene Name: pleckstrin homology domain containing, family B (evectins) member 2
  ENST ID: ENST00000403716
  CDS Start-End: 561-1271
atactttaggttataacttaatgcaatgtactttatattgctgctcaaattgtcccaggcgcggcccccggaagctctctgggtagatccctgcgcccttggacgcccggtccttcagttttttgagcacctcaagcttctggcctacaaaacgctcccggctcagctggagctttctgcgcccgggtcctagagtcgcccatttctctaaggcgccttggccctatttttagagagcggtatttagaaaccaagattagggtgctaacaatttttttttaaatttttatatttttaagacaggatctcactttgtaacacttccttttagtggaagcgccgacctcctgggagacccacgccccctgccgccttccgtcccgtttctcagaaaaccacccagacaccccgccccaccggccggggcccgccgcgcatgcgcgccgaggcgtgacgtcagaacggcggccaggacgccggacgtgcggcagttgcaggcgagcaggcgaggaatcgccgtggcgtcttggtgttctccacgctggttcgcaggtgaagagatggcgtttgtgaagagtggctggttgctgcgacagagtactattttgaagcgctggaagaagaactggtttgatctgtggtcggatggtcacctgatctattatgatgaccagactcggcagaatatcgaggataaggtccacatgccaatggactgcatcaacatccgcacggggcaggaatgtcgggatactcagcccccggatggaaagtcaaaagactgcatgctccagattgtttgtcgagatgggaaaacaattagtctttgtgcagaaagcacagatgattgcttggcctggaaatttacactccaagattctaggacaaacacagcgtatgtgggctctgcagtcatgaccgatgagacatccgtggtttcctcacctccaccatacacggcctatgctgcaccggcccctgagcaggcttatggctatgggccatacggtggtgcgtacccgccaggaactcaagttgtctacgctgcgaatgggcaggcgtatgccgtgccctaccagtacccatatgcagagaccatcctcatgacacgtcattgcactgcagtttccaggggactttatggacagcagcctgctaaccaagtcatcattcgagagcgctatcgagacaacgacagcgacctggcactgggcatgctggcaggagcagccacgggcatggccttagggtctctattttgggtcttctaggggcctcaaggtcttgatgtgcatagcttctgataaccctgtgtgcaataatatgatttgcagggcatttctgtttgtgacaaaagtttttaataatagttttaatcattcctttgaaagtagtgatgtcataattgtactaatccacataagtaccacagagaagggtttgaactgtgctattttgttcaaatgttgactctccgggggcactggctcattccaagactgttcttgtgcaactctcagaataccttatttgagcatacctgttttgaaaggcattttctttttagagttaggtgtagtgcttaagggttaatttattttcatgttatgccagtaatatagtgttgtatgcctattgagtgattgtggcaagaaaagctacagcttctttgcgtttaactttttcaaaccacagaccagaactggttgcatgttactttaggagttgtgggttggtaagctcccaggtacttcccgaggctatggtgtgagagcccccgtcctgccctctggggctccacaggcccctggcaaggccgatggctcaggatgatggggcacagcccgcctttgaacaatcatgcttcagaaatctgcctgaccctagctgctgctgctgctcactttattcttgtatggctttggtaggcatacttggagaacatatcccacattaggaattgatttaagcctgagagtttgagggctttaatcctttaaaacttggagaagctggctgggcgcggtggctcacgcctgtaatcccagcactttgagagaccgaggcgggcggatcacgaggtcaggagatcgagaccatcctggctaacacggtgaaaccccatctctactaaaaatacaaaaaattagctgggcgtggtggcaggcgcctgtggtcccagctactcgggaggctgaggcaggagaatagtgtgaacccaggaggcggagcttgcagtgagccaagatagtgccactgcacttcagcctgggtgacagagtgagactctgtctcaaaaaaaaaaaaaaaatcctggagaagccagaacaatatacaaacaagtatgtggaggcagatttgctttattccaagaggctgtttgagtgtgtgtctgcctaagcctccttatagcctatttttctacttgctgagagagtaatattaaaggaacagtgagggagtggaaggagagccttagttagagcgttcccatttctggcctttgggggtttgcactgtgcgggagatgctctctcatcactctgaaggcccatcctgtgcagaagtgggactctgtggctgttcactgagcaccagggcagactgtagctgagcagacttgggttatggatgggatatggggcccagggaccctcaggacacagggaccggctcaaggtaccactcagcctggccaggacccccagctttgcttttgttcttgatctctttgtgatagagaagcttagaacattgaatttggaaccccaaaatgtgtgagtctttggaaaacccattccagcctttcttcaaatgctcttattttcagtatatgaagtgtgtatttgaaatattcatatttctgttatttcttgttttcaagctctgaattattgcagttttctgtcctgcatgctttcaacagtgtgcttttacagtggcagtttagcacagcgaatgtccctgccccacactccatatggtcctgttttcctgaaaatacactccaggtagcacagacttgttattttgcctggctggttacacacatgctgtcttgctttgctgctcagccacctccctctgaggccaacttaggccaacctacataggactccatctttagcgagacaccagagacacctagtgatgaccacgggtctgcttttctctctgatcctaggggacttgttgacatgggagtgtctgtttccacatggaaggatgtctgtttatctctcatctctgaatagatgtatgacaactctagtgtccatggtttaaaatgttgctttgaggattttccatcctgtataagaagaatggctttcttcagattataatcgttattaaagctgtatgtacactttacttaaaaactattaacagtttttcatgttgcactggtggtaattttgaacttggaattactgggtgggaattccaggaaccacagagtattgatttttgctgccaaaatgctcttgaagcagatgtccctgtgctcccctggctgcttctggctgaaggggggaggtgtagactgaagcttgggcactcatgtgtgtcccctccccagtccccatcctagtggggccagtctcattaggcagccatagataagcctggaacttggctgtcattagtgacttgatcctggtatgaaatgcatactgggtataaggttgctcaggtattttatttccttggccacaactcccatagatgccaatgttttgatagcctcagtttctcaacgatgtcttttgtttacagtgctacacttagtgtgagtcaagaagtgcttgagttacaagaaacttcttattcaggtttgagtaagcattttacttccatgtgtacttttaaataatccataccttgaagaagttggccaatgatattatatacatgctgatctgattgttcttttcattccttgagtcaacttcagggtcttggatactaaagagaaggagaactgtggttaatgttttggatcatcatttgtgaacaaggccagactttgcccattttaggctatccaggacttaaggtagccatctggatcataagaaggtcctgcagttgagacaaaatgacccaagtgtattttccacaagttttgatcctgtgtaatatttctttttccttccctagtgtatgtagatacaaggcatggaatgcagttccactttctccccagagttgatctttttgtgattgctttcccgtctctagtagtattctgttgtgtctagagaactgattttttcctacatacgcaaattgtacatttgtaagtgaaaatgtcaatacattaaagcattaaccttaaagcatgtttc

SEQ ID NO: 166542 - DNA, 2277 bp, Homo sapiens
  Payload ID: 12791
  Gene Symbol: PLEKHB2
  Gene Name: pleckstrin homology domain containing, family B (evectins) member 2
  Uniprot ID: Q96CS7
  ENST ID: ENST00000409158
  CDS Start-End: 561-1253
atactttaggttataacttaatgcaatgtactttatattgctgctcaaattgtcccaggcgcggcccccggaagctctctgggtagatccctgcgcccttggacgcccggtccttcagttttttgagcacctcaagcttctggcctacaaaacgctcccggctcagctggagctttctgcgcccgggtcctagagtcgcccatttctctaaggcgccttggccctatttttagagagcggtatttagaaaccaagattagggtgctaacaatttttttttaaatttttatatttttaagacaggatctcactttgtaacacttccttttagtggaagcgccgacctcctgggagacccacgccccctgccgccttccgtcccgtttctcagaaaaccacccagacaccccgccccaccggccggggcccgccgcgcatgcgcgccgaggcgtgacgtcagaacggcggccaggacgccggacgtgcggcagttgcaggcgagcaggcgaggaatcgccgtggcgtcttggtgttctccacgctggttcgcaggtgaagagatggcgtttgtgaagagtggctggttgctgcgacagagtactattttgaagcgctggaagaagaactggtttgatctgtggtcggatggtcacctgatctattatgatgaccagactcggcagaatatcgaggataaggtccacatgccaatggactgcatcaacatccgcacggggcaggaatgtcgggatactcagcccccggatggaaagtcaaaagactgcatgctccagattgtttgtcgagatgggaaaacaattagtctttgtgcagaaagcacagatgattgcttggcctggaaatttacactccaagattctaggacaaacacagcgtatgtgggctctgcagtcatgaccgatgagacatccgtggtttcctcacctccaccatacacggcctatgctgcaccggcccctgaggtagggagaaccctgagcctccagcaggcttatggctatgggccatacggtggtgcgtacccgccaggaactcaagttgtctacgctgcgaatgggcaggcgtatgccgtgccctaccagtacccatatgcaggactttatggacagcagcctgctaaccaagtcatcattcgagagcgctatcgagacaacgacagcgacctggcactgggcatgctggcaggagcagccacgggcatggccttagggtctctattttgggtcttctaggggcctcaaggtcttgatgtgcatagcttctgataaccctgtgtgcaataatatgatttgcagggcatttctgtttgtgacaaaagtttttaataatagttttaatcattcctttgaaagtagtgatgtcataattgtactaatccacataagtaccacagagaagggtttgaactgtgctattttgttcaaatgttgactctccgggggcactggctcattccaagactgttcttgtgcaactctcagaataccttatttgagcatacctgttttgaaaggcattttctttttagagttaggtgtagtgcttaagggttaatttattttcatgttatgccagtaatatagtgttgtatgcctattgagtgattgtggcaagaaaagctacagcttctttgcgtttaactttttcaaaccacagaccagaactggttgcatgttactttaggagttgtgggttggtaagctcccaggtacttcccgaggctatggtgtgagagcccccgtcctgccctctggggctccacaggcccctggcaaggccgatggctcaggatgatggggcacagcccgcctttgaacaatcatgcttcagaaatctgcctgaccctagctgctgctgctgctcactttattcttgtatggctttggtaggcatacttggagaacatatcccacattaggaattgatttaagcctgagagtttgagggctttaatcctttaaaacttggagaagctggctgggcgcggtggctcacgcctgtaatcccagcactttgagagaccgaggcgggcggatcacgaggtcaggagatcgagaccatcctggctaacacggtgaaaccccatctctactaaaaatacaaaaaattagctgggcgtggtggcaggcgcctgtggtcccagctactcgggaggctgaggcaggagaatagtgtgaacccaggaggcggagcttgcagtgagccaagatagtgccactgcacttcagcctgggtgacagagtgagactctgtctc

SEQ ID NO: 166543 - DNA, 2210 bp, Homo sapiens
  Payload ID: 12791
  Gene Symbol: PLEKHB2
  Gene Name: pleckstrin homology domain containing, family B (evectins) member 2
  Uniprot ID: Q96CS7
  ENST ID: ENST00000409612
  CDS Start-End: 518-1186
gaaagagagctggagaactgggatatcatgaggagttgtagacagttaaacctgaattctagcttttggaacaaaatagtaatgtaattgtagcagttctcacttttttattttttatttttttgagacggagtttcactcctgttgcttaggctggagtgcgatggcgcagtctcggctcactgcaacctccgcttcccgggttcaagggagtcccctgcctctgccccccaaatagctgggattacaggcgtgcgccaccatgctcggctaattttttgtatttttaatagagatggggtttcactatgttggtcaggctggtctcgaactcctgacctcaggtgatccgcctgccttggcctcccaaagtgttgggattataggcgtgagccaacgcgcctggccaattctcacttttggaccatctactacagggctgtttggacatacctcctttaattgtcacagtaaccccatgacgtaattggttgtgcctggtcatacaggtgaagagatggcgtttgtgaagagtggctggttgctgcgacagagtactattttgaagcgctggaagaagaactggtttgatctgtggtcggatggtcacctgatctattatgatgaccagactcggcagaatatcgaggataaggtccacatgccaatggactgcatcaacatccgcacggggcaggaatgtcgggatactcagcccccggatggaaagtcaaaagactgcatgctccagattgtttgtcgagatgggaaaacaattagtctttgtgcagaaagcacagatgattgcttggcctggaaatttacactccaagattctaggacaaacacagcgtatgtgggctctgcagtcatgaccgatgagacatccgtggtttcctcacctccaccatacacggcctatgctgcaccggcccctgagcaggcttatggctatgggccatacggtggtgcgtacccgccaggaactcaagttgtctacgctgcgaatgggcaggcgtatgccgtgccctaccagtacccatatgcaggactttatggacagcagcctgctaaccaagtcatcattcgagagcgctatcgagacaacgacagcgacctggcactgggcatgctggcaggagcagccacgggcatggccttagggtctctattttgggtcttctaggggcctcaaggtcttgatgtgcatagcttctgataaccctgtgtgcaataatatgatttgcagggcatttctgtttgtgacaaaagtttttaataatagttttaatcattcctttgaaagtagtgatgtcataattgtactaatccacataagtaccacagagaagggtttgaactgtgctattttgttcaaatgttgactctccgggggcactggctcattccaagactgttcttgtgcaactctcagaataccttatttgagcatacctgttttgaaaggcattttctttttagagttaggtgtagtgcttaagggttaatttattttcatgttatgccagtaatatagtgttgtatgcctattgagtgattgtggcaagaaaagctacagcttctttgcgtttaactttttcaaaccacagaccagaactggttgcatgttactttaggagttgtgggttggtaagctcccaggtacttcccgaggctatggtgtgagagcccccgtcctgccctctggggctccacaggcccctggcaaggccgatggctcaggatgatggggcacagcccgcctttgaacaatcatgcttcagaaatctgcctgaccctagctgctgctgctgctcactttattcttgtatggctttggtaggcatacttggagaacatatcccacattaggaattgatttaagcctgagagtttgagggctttaatcctttaaaacttggagaagctggctgggcgcggtggctcacgcctgtaatcccagcactttgagagaccgaggcgggcggatcacgaggtcaggagatcgagaccatcctggctaacacggtgaaaccccatctctactaaaaatacaaaaaattagctgggcgtggtggcaggcgcctgtggtcccagctactcgggaggctgaggcaggagaatagtgtgaacccaggaggcggagcttgcagtgagccaagatagtgccactgcacttcagcctgggtgacagagtgagactctgtctc

SEQ ID NO: 166544 - DNA, 2488 bp, Homo sapiens
  Payload ID: 12791
  Gene Symbol: PLEKHB2
  Gene Name: pleckstrin homology domain containing, family B (evectins) member 2
  Uniprot ID: Q96CS7
  ENST ID: ENST00000409279
  CDS Start-End: 796-1464
aaaaaaaagctaaagcagaaaacaaaagtggcccatggtctcagcttccagataataactattgatttcaaaaaataaaatggcctgggattacaggcatgagctgctgcgcccggccaatttttgtatttttagtagagatgaggtttcaccatgttggccaggctggtctcgaattcctgacctcaggtgatccaccctcctcggcctgagccaccgtgcccagccgtgactgtttcttctaatttatcacttttaaagtctcatttaactttttttccatacagaagatttaaatttttatggagttgactttatgaacctttttcttgatgacttttgtttttttgccctgacctggccactccacgtcactcactgctgacaccagtgcagcacccctgcctgggccatgtggaccccactgggaacgccaaatgtaggcacctcagggctccagcaagccacgagaatcccccatgtccttgacagagctaaatcctgtgtccctggggctgctttatgtttgttgagtggtgttagactcggtcaggtgggctgggtggtgaggctgaaggcgagtgtgggaggaagggagggggtacagagtgcggggcacatgaaccccaatgaggaggtgtttgttaaatgccaggggggcactgagctaaaatggccttgggcccttcctcagctgatgctgaaggggataaggatagagactcgggccggacaggctattctctttctgggtatgattttgaacctgcctgtttttgttctgtaggtgaagagatggcgtttgtgaagagtggctggttgctgcgacagagtactattttgaagcgctggaagaagaactggtttgatctgtggtcggatggtcacctgatctattatgatgaccagactcggcagaatatcgaggataaggtccacatgccaatggactgcatcaacatccgcacggggcaggaatgtcgggatactcagcccccggatggaaagtcaaaagactgcatgctccagattgtttgtcgagatgggaaaacaattagtctttgtgcagaaagcacagatgattgcttggcctggaaatttacactccaagattctaggacaaacacagcgtatgtgggctctgcagtcatgaccgatgagacatccgtggtttcctcacctccaccatacacggcctatgctgcaccggcccctgagcaggcttatggctatgggccatacggtggtgcgtacccgccaggaactcaagttgtctacgctgcgaatgggcaggcgtatgccgtgccctaccagtacccatatgcaggactttatggacagcagcctgctaaccaagtcatcattcgagagcgctatcgagacaacgacagcgacctggcactgggcatgctggcaggagcagccacgggcatggccttagggtctctattttgggtcttctaggggcctcaaggtcttgatgtgcatagcttctgataaccctgtgtgcaataatatgatttgcagggcatttctgtttgtgacaaaagtttttaataatagttttaatcattcctttgaaagtagtgatgtcataattgtactaatccacataagtaccacagagaagggtttgaactgtgctattttgttcaaatgttgactctccgggggcactggctcattccaagactgttcttgtgcaactctcagaataccttatttgagcatacctgttttgaaaggcattttctttttagagttaggtgtagtgcttaagggttaatttattttcatgttatgccagtaatatagtgttgtatgcctattgagtgattgtggcaagaaaagctacagcttctttgcgtttaactttttcaaaccacagaccagaactggttgcatgttactttaggagttgtgggttggtaagctcccaggtacttcccgaggctatggtgtgagagcccccgtcctgccctctggggctccacaggcccctggcaaggccgatggctcaggatgatggggcacagcccgcctttgaacaatcatgcttcagaaatctgcctgaccctagctgctgctgctgctcactttattcttgtatggctttggtaggcatacttggagaacatatcccacattaggaattgatttaagcctgagagtttgagggctttaatcctttaaaacttggagaagctggctgggcgcggtggctcacgcctgtaatcccagcactttgagagaccgaggcgggcggatcacgaggtcaggagatcgagaccatcctggctaacacggtgaaaccccatctctactaaaaatacaaaaaattagctgggcgtggtggcaggcgcctgtggtcccagctactcgggaggctgaggcaggagaatagtgtgaacccaggaggcggagcttgcagtgagccaagatagtgccactgcacttcagcctgggtgacagagtgagactctgtctc

SEQ ID NO: 166545 - DNA, 4177 bp, Homo sapiens
  Payload ID: 12791
  Gene Symbol: PLEKHB2
  Gene Name: pleckstrin homology domain containing, family B (evectins) member 2
  ENST ID: ENST00000439822
  CDS Start-End: 561-1076
atactttaggttataacttaatgcaatgtactttatattgctgctcaaattgtcccaggcgcggcccccggaagctctctgggtagatccctgcgcccttggacgcccggtccttcagttttttgagcacctcaagcttctggcctacaaaacgctcccggctcagctggagctttctgcgcccgggtcctagagtcgcccatttctctaaggcgccttggccctatttttagagagcggtatttagaaaccaagattagggtgctaacaatttttttttaaatttttatatttttaagacaggatctcactttgtaacacttccttttagtggaagcgccgacctcctgggagacccacgccccctgccgccttccgtcccgtttctcagaaaaccacccagacaccccgccccaccggccggggcccgccgcgcatgcgcgccgaggcgtgacgtcagaacggcggccaggacgccggacgtgcggcagttgcaggcgagcaggcgaggaatcgccgtggcgtcttggtgttctccacgctggttcgcaggtgaagagatggcgtttgtgaagagtggctggttgctgcgacagagtactattttgaagcgctggaagaagaactggtttgatctgtggtcggatggtcacctgatctattatgatgaccagactcggcagaatatcgaggataaggtccacatgccaatggactgcatcaacatccgcacggggcaggaatgtcgggatactcagcccccggatggaaagtcaaaagactgcatgctccagattgtttgtcgagatgggaaaacaattagtctttgtgcagaaagcacagatgattgcttcaggcttatggctatgggccatacggtggtgcgtacccgccaggaactcaagttgtctacgctgcgaatgggcaggcgtatgccgtgccctaccagtacccatatgcaggactttatggacagcagcctgctaaccaagtcatcattcgagagcgctatcgagacaacgacagcgacctggcactgggcatgctggcaggagcagccacgggcatggccttagggtctctattttgggtcttctaggggcctcaaggtcttgatgtgcatagcttctgataaccctgtgtgcaataatatgatttgcagggcatttctgtttgtgacaaaagtttttaataatagttttaatcattcctttgaaagtagtgatgtcataattgtactaatccacataagtaccacagagaagggtttgaactgtgctattttgttcaaatgttgactctccgggggcactggctcattccaagactgttcttgtgcaactctcagaataccttatttgagcatacctgttttgaaaggcattttctttttagagttaggtgtagtgcttaagggttaatttattttcatgttatgccagtaatatagtgttgtatgcctattgagtgattgtggcaagaaaagctacagcttctttgcgtttaactttttcaaaccacagaccagaactggttgcatgttactttaggagttgtgggttggtaagctcccaggtacttcccgaggctatggtgtgagagcccccgtcctgccctctggggctccacaggcccctggcaaggccgatggctcaggatgatggggcacagcccgcctttgaacaatcatgcttcagaaatctgcctgaccctagctgctgctgctgctcactttattcttgtatggctttggtaggcatacttggagaacatatcccacattaggaattgatttaagcctgagagtttgagggctttaatcctttaaaacttggagaagctggctgggcgcggtggctcacgcctgtaatcccagcactttgagagaccgaggcgggcggatcacgaggtcaggagatcgagaccatcctggctaacacggtgaaaccccatctctactaaaaatacaaaaaattagctgggcgtggtggcaggcgcctgtggtcccagctactcgggaggctgaggcaggagaatagtgtgaacccaggaggcggagcttgcagtgagccaagatagtgccactgcacttcagcctgggtgacagagtgagactctgtctcaaaaaaaaaaaaaaaatcctggagaagccagaacaatatacaaacaagtatgtggaggcagatttgctttattccaagaggctgtttgagtgtgtgtctgcctaagcctccttatagcctatttttctacttgctgagagagtaatattaaaggaacagtgagggagtggaaggagagccttagttagagcgttcccatttctggcctttgggggtttgcactgtgcgggagatgctctctcatcactctgaaggcccatcctgtgcagaagtgggactctgtggctgttcactgagcaccagggcagactgtagctgagcagacttgggttatggatgggatatggggcccagggaccctcaggacacagggaccggctcaaggtaccactcagcctggccaggacccccagctttgcttttgttcttgatctctttgtgatagagaagcttagaacattgaatttggaaccccaaaatgtgtgagtctttggaaaacccattccagcctttcttcaaatgctcttattttcagtatatgaagtgtgtatttgaaatattcatatttctgttatttcttgttttcaagctctgaattattgcagttttctgtcctgcatgctttcaacagtgtgcttttacagtggcagtttagcacagcgaatgtccctgccccacactccatatggtcctgttttcctgaaaatacactccaggtagcacagacttgttattttgcctggctggttacacacatgctgtcttgctttgctgctcagccacctccctctgaggccaacttaggccaacctacataggactccatctttagcgagacaccagagacacctagtgatgaccacgggtctgcttttctctctgatcctaggggacttgttgacatgggagtgtctgtttccacatggaaggatgtctgtttatctctcatctctgaatagatgtatgacaactctagtgtccatggtttaaaatgttgctttgaggattttccatcctgtataagaagaatggctttcttcagattataatcgttattaaagctgtatgtacactttacttaaaaactattaacagtttttcatgttgcactggtggtaattttgaacttggaattactgggtgggaattccaggaaccacagagtattgatttttgctgccaaaatgctcttgaagcagatgtccctgtgctcccctggctgcttctggctgaaggggggaggtgtagactgaagcttgggcactcatgtgtgtcccctccccagtccccatcctagtggggccagtctcattaggcagccatagataagcctggaacttggctgtcattagtgacttgatcctggtatgaaatgcatactgggtataaggttgctcaggtattttatttccttggccacaactcccatagatgccaatgttttgatagcctcagtttctcaacgatgtcttttgtttacagtgctacacttagtgtgagtcaagaagtgcttgagttacaagaaacttcttattcaggtttgagtaagcattttacttccatgtgtacttttaaataatccataccttgaagaagttggccaatgatattatatacatgctgatctgattgttcttttcattccttgagtcaacttcagggtcttggatactaaagagaaggagaactgtggttaatgttttggatcatcatttgtgaacaaggccagactttgcccattttaggctatccaggacttaaggtagccatctggatcataagaaggtcctgcagttgagacaaaatgacccaagtgtattttccacaagttttgatcctgtgtaatatttctttttccttccctagtgtatgtagatacaaggcatggaatgcagttccactttctccccagagttgatctttttgtgattgctttcccgtctctagtagtattctgttgtgtctagagaactgattttttcctacatacgcaaattgtacatttgtaagtgaaaatgtcaatacattaaagcattaaccttaaagcatgtttc

SEQ ID NO: 166546 - DNA, 1460 bp, Homo sapiens
  Payload ID: 12791
  Gene Symbol: PLEKHB2
  Gene Name: pleckstrin homology domain containing, family B (evectins) member 2
  Uniprot ID: Q96CS7
  ENST ID: ENST00000438882
  CDS Start-End: 72-608
agttgcaggcgagcaggcgaggaatcgccgtggcgtcttggtgttctccacgctggttcgcaggtgaagagatggcgtttgtgaagagtggctggttgctgcgacagagtactattttgaagcgctggaagaagaactggtttgatctgtggtcggatggtcacctgatctattatgatgaccagactcggcagaatatcgaggataaggtccacatgccaatggactgcatcaacatccgcacggggcaggaatgtcgggatactcagcccccggatggaaagtcaaaagactgcatgctccagattgtttgtcgagatgggaaaacaattagtctttgtgcagaaagcacagatgattgcttggcctggaaatttacactccaagattctaggacaaacacagcgtatgtgggctctgcagtcatgaccgatgagacatccgtggtttcctcacctccaccatacacggcctatgctgcaccggcccctgaggactttatggacagcagcctgctaaccaagtcatcattcgagagcgctatcgagacaacgacagcgacctggcactgggcatgctggcaggagcagccacgggcatggccttagggtctctattttgggtcttctaggggcctcaaggtcttgatgtgcatagcttctgataaccctgtgtgcaataatatgatttgcagggcatttctgtttgtgacaaaagtttttaataatagttttaatcattcctttgaaagtagtgatgtcataattgtactaatccacataagtaccacagagaagggtttgaactgtgctattttgttcaaatgttgactctccgggggcactggctcattccaagactgttcttgtgcaactctcagaataccttatttgagcatacctgttttgaaaggcattttctttttagagttaggtgtagtgcttaagggttaatttattttcatgttatgccagtaatatagtgttgtatgcctattgagtgattgtggcaagaaaagctacagcttctttgcgtttaactttttcaaaccacagaccagaactggttgcatgttactttaggagttgtgggttggtaagctcccaggtacttcccgaggctatggtgtgagagcccccgtcctgccctctggggctccacaggcccctggcaaggccgatggctcaggatgatggggcacagcccgcctttgaacaatcatgcttcagaaatctgcctgaccctagctgctgctgctgctcactttattcttgtatggctttggtaggcatacttggagaacatatcccacattaggaattgatttaagcctgagagtttgagggctttaatcctttaaaacttggagaagctggctgggcgcggtggctcacgcctgtaatcccagcactttgagagaccgaggcgggcggatcacgaggtcaggagatcgagaccat

SEQ ID NO: 166547 - DNA, 1297 bp, Homo sapiens
  Payload ID: 12791
  Gene Symbol: PLEKHB2
  Gene Name: pleckstrin homology domain containing, family B (evectins) member 2
  Uniprot ID: Q96CS7
  ENST ID: ENST00000628582
  CDS Start-End: 106-618
gtcagaacggcggccaggacgccggacgtgcggcagttgcaggcgagcaggcgaggaatcgccgtggcgtcttggtgttctccacgctggttcgcaggtgaagagatggcgtttgtgaagagtggctggttgctgcgacagagtactattttgaagcgctggaagaagaactggtttgatctgtggtcggatggtcacctgatctattatgatgaccagactcggcagaatatcgaggataaggtccacatgccaatggactgcatcaacatccgcacggggcaggaatgtcgggatactcagcccccggatggaaagtcaaaagactgcatgctccagattgtttgtcgagatgggaaaacaattagtctttgtgcagaaagcacagatgattgcttgcttatggctatgggccatacggtggtgcgtacccgccaggaactcaagttgtctacgctgcgaatgggcaggcgtatgccgtgccctaccagtacccatatgcaggactttatggacagcagcctgctaaccaagtcatcattcgagagcgctatcgagacaacgacagcgacctggcactgggcatgctggcaggagcagccacgggcatggccttagggtctctattttgggtcttctaggggcctcaaggtcttgatgtgcatagcttctgataaccctgtgtgcaataatatgatttgcagggcatttctgtttgtgacaaaagtttttaataatagttttaatcattcctttgaaagtagtgatgtcataattgtactaatccacataagtaccacagagaagggtttgaactgtgctattttgttcaaatgttgactctccgggggcactggctcattccaagactgttcttgtgcaactctcagaataccttatttgagcatacctgttttgaaaggcattttctttttagagttaggtgtagtgcttaagggttaatttattttcatgttatgccagtaatatagtgttgtatgcctattgagtgattgtggcaagaaaagctacagcttctttgcgtttaactttttcaaaccacagaccagaactggttgcatgttactttaggagttgtgggttggtaagctcccaggtacttcccgaggctatggtgtgagagcccccgtcctgccctctggggctccacaggcccctggcaaggccgatggctcaggatgatggggcacagcccgcctttgaacaatcatgcttcagaaatctgcctgaccctagctgctgctgctgctcactttattcttgtatggctttggta

SEQ ID NO: 166548 - DNA, 4865 bp, Homo sapiens
  Payload ID: 12792
  Gene Symbol: PLEKHD1
  Gene Name: pleckstrin homology domain containing, family D (with coiled-coil domains) member 1
  Uniprot ID: A6NEE1
  ENST ID: ENST00000322564
  CDS Start-End: 213-1733
ccggagcccaagccgccggctacgcgccctgcgcccccttggtgccgcgtccagtgcccagcgcgctttgatgctgcagctccgggccgggccgctctgcttctctgctcgctgggacgctctccgacggctccgccctcgcctctcgccccgagtccctgctgaccccggggaggtggggtccgggccgggcacagccccgctgaggcaggatgttcacgtccaagtccaactcggtgtcgccctcgccgtccctggagcaggctgactcggacgccctggatatcagcaccaaagtgcagctctacggcgtgctgtggaagaggcctttcggcaggccgtcggccaagtggtcccggcggtttttcatcatcaaagagagctttctgctttactactctgagagcgaaaaaaagagctttgaaaccaataaatacttcaatatacatcctaagggcgtcatccctctggggggctgcctggtggagcccaaggaagagcctagcatgccctatgccatgaagatctcccaccaggacttccatgggaacatcttgcttgctgctgagtcggagtttgagcagacccagtggctggagatgctgcaggagtctgggaaggtgacctggaagaatgcccagctgggagaagccatgatcaaaagcctggaggcccaggggctgcagttggctaaggaaaagcaggagtatttagacaaactgatggaagagaccgaagaactctgccttcagagggagcagagagaggagcttgagcgccttaaccaggtgctggaggccgagaagcagcagttcgaggaggtggtgcaggagctgagaatggagcaggagcagatcaagagggagctggaactgactgcaagatgccttaagggtgtagaacaagagaaaaaggaactgaggcacctcacggagtccttgcagcagacactggaggaactctccatagagaagaagaaaaccctggaaatgctggaggagaacgagaaccacctgcagacactggccaatcagagtgagcagccccctcccagtgggggcctccatagcaacctccggcagatcgaggagaagatgcagcagctcttagaggagaagctcctggcagagaagcggatgaaggagaacgaggagcgctcacgggccctggaggaggagcgtgagttctactccagccagtcccaggcactgcagaactcgctgcaggagctgacggcagagaagcagcaggctgagcgggagctcaaggctgaggtgaaggtccgcatggacctggagaggcgtctccgggaggcagaaggggccttgcgaagcctggaacaggggctgaattccaaggtgcggaataaggagaaggaggagaggatgcgggctgatgtgagccatctgaaaaggttctttgaggagtgcatccggaatgccgagctggaggccaagatgcctgtgatcatgaagaactccgtgtacatccataaggcagccactcgccgcatcaagagctgccgcttccaccgacgccggtccagcacctcctggaatgacatgaagccgtcccagtccttcatgacctcccagctggatgccaacaacatggaggagctaaaggaggtggccaagcggctcagcagggaccagcgcttccgggaatccatctaccacatcatggccacccagcctggagccccctcggcactctcccggggtggaaagtgatgggcgctcctcccctgcttcccaagtctcccctggatgggcgggggaggggaaggggtggcagagggaggcctcactctaccagctcctggcctctctggtctggagcctatgtctcctctgggccggagctccacttgggggccagccttgccctcaaaggacatggacgctgccttcctcatcctcaccccacaccccacctttgggtccacaccagggccatgcaggcctgagctgggtgctggttgtcatggtgaggtgaggacaggacctggttgtatgtggagatttgtgtcggttagggagtggggtggggaggtgctgtctaccactgtgccatcaggcagggtctgccccactgaggaagatggcagccctccctggtgcccactggacctctctgggactctgctgccctgcccgtggtcctcatgtagaaaggccttgcctccctaccttgacattcccttttccccagggtttcctaaccctccctttgcttctgacactcagcaaaatgtccctcagctgagacccctcatttacaccacatcatgctgtgcaggaggaaaggggcctaggacagcagcttctgggctcctgacataccacacacccgccacagtgccgcttttcctgagctcaggccctggctgtggggccacccactgattcccctcctcctctggtgagctcactcacagccttggcaccctgcaagggtagaatgatggcaccagtccctcctgcctgtgtacctagggccctggctgggagctggggccagcagtgatgctgggggctcccccagaggacacgtaacaagctcaggagtgggctgggcacagtggctcatgcctgtaatcccagcactttgagaggccgaggcgggaggattacttgaagtcaggagtttgagaccagcctggccaatacggcaaaaccctgtctctacaaaaaataaaaaaaataaaataaatagctgggcatggtggtgcatgcctgtagtcccagctacttgggagactgaaatgaggggattgattgagcctgggaggttgaggctgcagtgagctgagattgtgccactgcactccagccagggtaacagagcaagaccctgtctcaaacaaacacaaggaaaacaagctcaggagtgaaggaaagtcactctggttcctgcattatgtacttctggttgcgcagggaggcagtgttcctgctggtcgagagatcacagatatctccttcccagctgcccctgcttcagtcaccttgctgcctcctctccctgcagagatttcagcctgtgaagcaatgtgaccatgaactctggcagctggggaccctgggcctgtgatgaggccagtagtcattggttggctcagtgtcattgggagtgaagctgaaacgccaatctgcagcttctgtggaagaccaccaccctccagggggctgaagggtgtgtctgtctctcactcatggacagacagactgcccagaccctctccctgcaggcccaccctccaaagctacctgaggctattggcctccagaaaaggggtccacctgggatcagggtgctcttggacactgttgacattaaaggtgctcattctttgctgcttggaaaaccaagaagttctgagagataaacagatggcttcggggcaagtcccagcaaaaagtgcaagaacctgggagcccacaacctattctgtgggaagaggagcattgttgcctctaagaacacatgcacatctgctgctaggctggccgagcccaggccgggctgccctgctctttgctcagtgcttcctgccaaaactaatctcagtggttcctttcagtgatgggtggactttggtggcttcatacagtctctgcagaatctagctggggagagggctgagtcagtttggaataaatgcatttgacagggctgagcctaaatgtaaaactttaaacgtgtataacatgcataaacctggaacttgtttctctaacacgtatgaaggatgaactttgaattgaaggggaatatttataaaaccaagattactgtttccttttttttaaaagaattaatcatggcttgcttttagagagatctttcataattttcagatgcatttgtttttcttgggcgagctattaaccagacaggaaagtgctagtcttcgtttgctttgtactgctgtaacagaatacctgagactgggtaatttataaggaacagaaatgtactggctcacagatatggtggctaagacgtccaatatcaaggtgctggcatctggcaaggaccttcttgttgcatcatcccatggttgacaggcaaagagagggtgagagagcaagaggggccaaacttattcttttataacaaacccaccccctcgataatgacattaatcctttcataagggagagtcttcatggccaaatcacctcttaaatgttccacctcttgcggatcacctgaggtcaggagtttgagaccagcctggccaatatggcgaaaccccacctgtactaaaaatacaaaaattagctgggcgtggtggtgggtgcctatagtcccagctactcaggaggctgagacaggagaatcacttgaacctgggaggtggaggttgcagtgagccgagattgtgctattgtactccagcctgggcaacatgagtgaaactctgtctcagaaaaaaaaaaaaggtcccacctcttaatattgttacaatggcaatcaaatttctttttttaatcctgcaaactactgggatagtaattaaatttcagtgtgagtttgggagggaacaaacattcaaactgtagcagtgcttttccatgcacatttaccaatcgatacttcctcctattctcaccctgtattttccatgcctcaggcaagtctgaattatcttcagccaactgaacaatccataagtgtttattcgttaaaagctcactatgtacctagcactgtaaatagaaaaatagcaacatctctatatcaaaatacgtaggagtggaaattacttagtggagatatgttgatgtaatttttttaatttttaaaaacaaaactcttattccttggccaattaaatgcatttcctgcagtatcta

SEQ ID NO: 166549 - DNA, 2084 bp, Homo sapiens
  Payload ID: 12793
  Gene Symbol: PLEKHF1
  Gene Name: pleckstrin homology domain containing, family F (with FYVE domain) member 1
  Uniprot ID: Q96S99
  ENST ID: ENST00000436066
  CDS Start-End: 467-1306
tgaccgctgagggtgactgtgctgtgaggcccgccggaggcaccagaaggcacaagcctcccactgcccctttccccgccaagtcccgcaggtctcgcagtcgcgggcgcccccaccccacccctgcccaaggccagggtcgcagtcccaccgggtgacggcagtcgcgctccgcgtggggcagcggcgagcggaaagggaagccgggcggggccagggggtcaaacacgggcgacagtcccgcccagccccggacctgcagcgcgcacaagctcgggcgccctccgagcgccgcgcccaagccccgcccctcccgcttcccgggctccgattggccgagccaccgcgggggcgtgtccggcggagctggccgggacccgggcggagcgggcggggacccgggctactgcggtgtggactcgagggctgggcgcggggccggcgcagaagccgccagctggagacgatggtggaccacttggccaacacggagatcaacagccagcgcatcgcggcagtggagagctgcttcggggcctcggggcagccgctggcgctgccaggccgagtgctgctgggcgagggcgtgctgaccaaagagtgccgcaagaaggccaagccgcgcatcttcttcctctttaacgacatcctggtgtatggcagcatcgtgctcaacaagcgcaagtaccgcagccagcacatcatccccctggaggaggtcacactggagctgttgccggagacgctgcaggccaagaaccgctggatgatcaagacggccaagaagtcctttgtggtgtcggccgcctccgctacggagcgccaggaatggattagccacatcgaggagtgcgtgcggcggcaactgagggccacgggccgcccgcccagcacggagcacgcggcaccctggatccccgacaaggccacggacatctgcatgcgctgcacgcagacgcgcttctctgccctcacgaggcgccaccactgccgcaagtgcggcttcgtggtctgcgctgagtgctcgcgccagcgcttcctgctcccgcgcctgtcccccaagcccgtgcgcgtctgcagcctctgctaccgcgaactggccgcccagcagcggcaggaggaggcggaggagcagggcgcggggtccccagggcagccagcccacctggcccggcccatctgcggagcgtccagtggagatgacgatgactccgacgaggacaaggagggcagcagggacggcgactggcccagcagcgtggagttctacgcctcgggggtggcctggtctgccttccacagctgacccccggcctgcagaacatctgtccccaagccagctccactgcccaggcccccaagagggcagctccagaagctgcccagggctccgggaccccatcccatggtggcaggtgcagcggtggggagtggctctttctggactcccagtgcctttttgctggacactgtgtccttatggcttcactgcaggtaatgcctttcccttcaggaagccccagaacacccacaggtcttggtaacaaacgccaccttacactctgcaggctgcagcggcagctccagatggcctcctgagctggacgaccccaggtctccagacatctagggaccagagcaggtttgggaacacagagggaagacaggatgggagtgtagccacagaacccacctgcaccctgacaggcacaccccactgaagagcctgagtcccaggaggcctcctggaagcccaggactgcccacccaccacgctggtgcccaccgcctggccagccaagccctgccgatcagacatgtgggctccccgaagcccagccagagactgccgtgctgtgggtgccaccaggcccagggactgcagcctgagctccccgaggcccagggcagccgggtgaggactctgtcctgtgtcacctctctccaggtgtccagctgtctcatgcctttttgtcctgtcctcagctctccgtgtggtcagcgaaaccattgttttctgttaggactcagttgcaagaacagaaaccctgcccccacttaataataaaaaagaaagtttattg

SEQ ID NO: 166550 - DNA, 543 bp, Homo sapiens
  Payload ID: 12793
  Gene Symbol: PLEKHF1
  Gene Name: pleckstrin homology domain containing, family F (with FYVE domain) member 1
  ENST ID: ENST00000588833
  CDS Start-End: 298-543
agaaggtgagtccccccaccgtcccccggccgggctgcgggtcgcggggcaggcgcatgaggcgagtctcccatcaccacccccggacaagcgagctctctcccgccgcgcggtcttggcggctcctgggccggcggggcgcagtgccgctgactccagcccaagaagaggcctgggaagggcgctcctgggcggcttgcggggtgaacctgcagggagcctggggagagcggtcaggggtcagagcgtccgaggcggaatccccggggaaacgcgcagatccgccagctggagacgatggtggaccacttggccaacacggagatcaacagccagcgcatcgcggcagtggagagctgcttcggggcctcggggcagccgctggcgctgccaggccgagtgctgctgggcgagggcgtgctgaccaaagagtgccgcaagaaggccaagccgcgcatcttcttcctctttaacgacatcctggtgtatggcagcatcgtgctcaacaagcgcaagtaccgcagccagcacatcatccccctg

SEQ ID NO: 166551 - DNA, 707 bp, Homo sapiens
  Payload ID: 12793
  Gene Symbol: PLEKHF1
  Gene Name: pleckstrin homology domain containing, family F (with FYVE domain) member 1
  ENST ID: ENST00000586888
  CDS Start-End: 324-707
ccggtctcttcccggaggagggccttccaggaatcacagggctggacagagcccaggggcggcccctctggagggagaggaggcttggcgcctgatgctgcagtctcaatgcacatggagaaaacctcacatcctcacgctggcctgggagcctgcaggatgtctcctgccggcactgcaacctcatctgtcctccttgccccatcgctccttcctccgcagcctgacttcacccattccaccttgagctgctccccaggaccggagctctgcccctagatctttgcacagctgacttcaggctggaccgccagctggagacgatggtggaccacttggccaacacggagatcaacagccagcgcatcgcggcagtggagagctgcttcggggcctcggggcagccgctggcgctgccaggccgagtgctgctgggcgagggcgtgctgaccaaagagtgccgcaagaaggccaagccgcgcatcttcttcctctttaacgacatcctggtgtatggcagcatcgtgctcaacaagcgcaagtaccgcagccagcacatcatccccctggaggaggtcacactggagctgttgccggagacgctgcaggccaagaaccgctggatgatcaagacggccaagaagtcctttgtggtgtcggccgcctccgctacggagcgccaggaatggattagccacatcgaggag

SEQ ID NO: 166552 - DNA, 1357 bp, Homo sapiens
  Payload ID: 12793
  Gene Symbol: PLEKHF1
  Gene Name: pleckstrin homology domain containing, family F (with FYVE domain) member 1
  Uniprot ID: Q96S99
  ENST ID: ENST00000592810
  CDS Start-End: 354-1193
ctactgcggtgtggactcgagggctgggcgcggggccggcgcagaaggtgagtccccccaccgtcccccggccgggctgcgggtcgcggggcaggcgcatgaggcgagtctcccatcaccacccccggacaagcgagctctctcccgccgcgcggtcttggcggctcctgggccggcggggcgcagtgccgctgactccagcccaagaagaggcctgggaagggcgctcctgggcggcttgcggggtgaacctgcagggagcctggggagagcggtcaggggtcagagcgtccgaggcggaatccccggggaaacgcgcagatgtaagctggtggagccgccagctggagacgatggtggaccacttggccaacacggagatcaacagccagcgcatcgcggcagtggagagctgcttcggggcctcggggcagccgctggcgctgccaggccgagtgctgctgggcgagggcgtgctgaccaaagagtgccgcaagaaggccaagccgcgcatcttcttcctctttaacgacatcctggtgtatggcagcatcgtgctcaacaagcgcaagtaccgcagccagcacatcatccccctggaggaggtcacactggagctgttgccggagacgctgcaggccaagaaccgctggatgatcaagacggccaagaagtcctttgtggtgtcggccgcctccgctacggagcgccaggaatggattagccacatcgaggagtgcgtgcggcggcaactgagggccacgggccgcccgcccagcacggagcacgcggcaccctggatccccgacaaggccacggacatctgcatgcgctgcacgcagacgcgcttctctgccctcacgaggcgccaccactgccgcaagtgcggcttcgtggtctgcgctgagtgctcgcgccagcgcttcctgctcccgcgcctgtcccccaagcccgtgcgcgtctgcagcctctgctaccgcgaactggccgcccagcagcggcaggaggaggcggaggagcagggcgcggggtccccagggcagccagcccacctggcccggcccatctgcggagcgtccagtggagatgacgatgactccgacgaggacaaggagggcagcagggacggcgactggcccagcagcgtggagttctacgcctcgggggtggcctggtctgccttccacagctgacccccggcctgcagaacatctgtccccaagccagctccactgcccaggcccccaagagggcagctccagaagctgcccagggctccgggaccccatcccatggtggcaggtgcagcggtggggagtggctctttctggactcccagtgcctttttgctggacac

SEQ ID NO: 166553 - DNA, 2881 bp, Homo sapiens
  Payload ID: 12794
  Gene Symbol: PLEKHF2
  Gene Name: pleckstrin homology domain containing, family F (with FYVE domain) member 2
  Uniprot ID: Q9H8W4
  ENST ID: ENST00000315367
  CDS Start-End: 242-991
cgttgtcgggttcgactggaggggcgggggagtcacctgcgagcggctgcgctggcggccagcccgcccaccgcgtctggatcgcgccggctgcgcggggctgcggacagcacacaccctggaaggccccggcggggaacgggcagagtccgcgccctgcgtccgcgaccaggaggatcggaccttcgccttcgctgtcgccgccgccgccgcccgcggccgtcggggctattagtgaaagatggtggatcgcttggcaaacagtgaagcaaatactagacgtataagtatagtggaaaactgttttggagcagctggtcaacctttaactatacctggacgagttcttattggagaaggagtattgactaagttgtgcaggaaaaagcccaaagcaaggcagtttttcttgtttaatgatattcttgtatatggcaatattgtcatccagaagaaaaaatataacaaacaacatattattcccctggaaaatgtcactattgattccatcaaagatgagggagacttaaggaatggatggctaatcaagacaccaactaaatcttttgcagtttatgctgccactgctacggagaaatcagaatggatgaatcatataaataaatgtgttactgatttactctccaaaagtgggaagacacccagtaatgaacatgctgctgtctgggttcctgactctgaggcaactgtatgtatgcgttgtcagaaagcaaaattcacacctgttaatcgtcgccaccattgccgcaaatgtggttttgttgtctgtgggccctgctctgaaaagagatttcttcttcccagccagtcctctaagcctgtgcggatttgtgacttctgctatgacctgctttctgctggggacatggccacatgccagcctgctagatcagactcttacagccagtcattgaagtctcctttaaatgatatgtctgatgatgatgacgatgatgatagcagtgactaaggacacatttgggagtatttaatcaggtgtggctatctgagaaatcaactttgggggaaatgtaagattctgagctctctctctgttttgttctagccatgaatttgcctgagaaacttgtaacctatgtgcctcaatatattccatagaaagtaggtccccctgccttctcccactcctcacactcttctacagggataggcttttgcaaatatatcagataaattttttgtttcttgtttatttttaggttattttcttggaaggttgggaaaagatgtttgttttaacaggtcatgtactacgttgttgttttcatttctgttataagtaaaactaaaagcacagaatggtgggaaaggggctataatgtggttcattaataatgttagcagcttttttctaaccatcctgtctaatggttaagacaccagtaacaaaaacacatgatttggaaatactttggctttttcatatacctagtggtgccttatcataatagcactgttacatgaaataagcccctaccttcttactttctggtttgttgaaaaaatacactggtgctctttgaagtgataaaatgagtgtttatgaatgggtgtaattaggaaatacttctcatctgacagctacaaataactaagtttggaggtattttcactctatatgaataaatatttttccataaaatagttgtgattatatttttgttttatataggtcccaaattataattgtcaaatatatattttaaattaataaaagttgtcattcttaggaatttggtttgaaatttatcagttatacagaattgtcatactgcattagcttctacctttagtaagacatattttttaggtataaattcttatgctttaacattatttctggattgaaaatcttataaaacccttgaaaataaacagtctcttttttacaaagcctgtgttagagcacagatttacctaggcttgaagatttggaagaaataatatgtaagaatggcctcaaggcagaccactttaagtttggctagacttcatatcgtggaagtattgtctatttcagtgtgaaactatcttgaatttgcaaatatagtgttatattttataaagttttgtaaaatcccaaacaatatttctatttttgtaaaacaattgtatgtataatctgtatttgaaatcattttgcaatctatggaaatagagtagcaattgctatttctaaattgtgaactttaagtcaatctagatttattttgagaagtaattgttcactctttacttttgaggcagccattaggttgaaagtatatatttatcatataaaacttgatgcgttttgcactactctttccatttatatgctgcaaacaactacagtctttgaaatatggaaaatcagcagtctaaagtttgttttaaattctaaatttaaaaaatcttcaaatctgaatataccgcaaatgtcatgagaagtttgattcagtaacttgtgatggaggattctttggtatcttactgtttggttaaggcactaattttacttacctattagattttgaaagtatctgagatatacaaatctccctgtaggaaatgtgaaagaaaagcacaacaaaactagggttttttgttcatttgcttgcttttatgattttttttggtttgttttaatatcaggtggatttttgtttctaagcaatatatacataaaatcaaccaacatatctgaaaaggatcatgaaacctgagaaatgctaatggagatttgctggtacataggaatctagcaaattcaggaaccaaggggaaatgttgtgagataacatttacattgtcaacctttattgactttgtttttacaataaaaaatattttacaactt

SEQ ID NO: 166554 - DNA, 1144 bp, Homo sapiens
  Payload ID: 12794
  Gene Symbol: PLEKHF2
  Gene Name: pleckstrin homology domain containing, family F (with FYVE domain) member 2
  Uniprot ID: Q9H8W4
  ENST ID: ENST00000519516
  CDS Start-End: 271-1020
ggaggggagacgcgaaactttccgggcgcttcctcccgcggtcccggagccgtcgcagcgccgggaggtgtcgtcgtcgcgggcggtggcggccgacgccatgttggggtctgtgagaaacggggcgctcccggccgctcccctcgcgccggggccggcccgcgggccagttgccgccgccgtcccgccagcccgggagcgagccgcgcccgcccgtaggacgccgccgccgccgcggggggacgggggccgccgggctattagtgaaagatggtggatcgcttggcaaacagtgaagcaaatactagacgtataagtatagtggaaaactgttttggagcagctggtcaacctttaactatacctggacgagttcttattggagaaggagtattgactaagttgtgcaggaaaaagcccaaagcaaggcagtttttcttgtttaatgatattcttgtatatggcaatattgtcatccagaagaaaaaatataacaaacaacatattattcccctggaaaatgtcactattgattccatcaaagatgagggagacttaaggaatggatggctaatcaagacaccaactaaatcttttgcagtttatgctgccactgctacggagaaatcagaatggatgaatcatataaataaatgtgttactgatttactctccaaaagtgggaagacacccagtaatgaacatgctgctgtctgggttcctgactctgaggcaactgtatgtatgcgttgtcagaaagcaaaattcacacctgttaatcgtcgccaccattgccgcaaatgtggttttgttgtctgtgggccctgctctgaaaagagatttcttcttcccagccagtcctctaagcctgtgcggatttgtgacttctgctatgacctgctttctgctggggacatggccacatgccagcctgctagatcagactcttacagccagtcattgaagtctcctttaaatgatatgtctgatgatgatgacgatgatgatagcagtgactaaggacacatttgggagtatttaatcaggtgtggctatctgagaaatcaactttgggggaaatgtaagattctgagctctctctctgttttgttctagccatgaatttgcctgagaaacttgtaac

SEQ ID NO: 166555 - DNA, 7138 bp, Homo sapiens
  Payload ID: 12795
  Gene Symbol: PLEKHG1
  Gene Name: pleckstrin homology domain containing, family G (with RhoGef domain) member 1
  Uniprot ID: Q9ULL1
  ENST ID: ENST00000358517
  CDS Start-End: 212-4369
aatatttctacggaaggcgctgcacagactagcaaaggctgtttcttttacctgactgaggtcactgcatcagctgaaggcagacgatgtgcttaagcctgagtggagcagagatgggcaccagttgcgtcttgaagtgccatcagctgtaaccaaagttccacatcccaagacgacagccaggcgttcctgccctcaagaactgaagacaatggagctctctgatagtgaccgacccgtcagcttcggttccacatcatcctcggcctcttcccgcgacagccatggttccttcggcagcagaatgaccttagtttcaaatagccacatgggcttgtttaaccaggataaggaggtaggggccataaaactggagctgattcctgccaggccgttttccagcagcgagctgcagagggacaaccccgccacggggcaacagaacgcggatgagggcagcgaaaggccacccagagcgcagtggagagtggactcaaacggggcacccaagacgatcgcagactcggccacgagccccaagctcctctatgtggatagagttgttcaggaaattctggaaaccgaaaggacttatgtacaagatttaaaaagcatcgtagaggattaccttgactgcatcagggaccaaacaaaacttcccctggggaccgaagaaagatcagccctttttggaaacatacaggatatctaccacttcaatagtgaacttctgcaagatttggaaaactgtgaaaatgatcctgtggccatagcagagtgttttgtgtccaagagtgaagagttccacatttatacccagtattgcactaactatccaaggtccgtggctgtgctaacagagtgtatgaggaacaagatactggccaaattcttcagggagcgtcaggaaactctgaaacactcgctgcctctggggtcctatctcttgaaaccagttcagcggattctcaagtatcatctccttctgcatgaaatagaaaaccaccttgataaggacacagaaggctatgatgtggtgcttgatgctatagacacaatgcagcgagtcgcctggcatatcaatgacatgaagcggaaacacgagcacgcggtccggttacaggagatacagagtttgctcactaactggaaggggccagacctgaccagctacggggaactggtgcttgagggaaccttccgcatccagcgagccaagaatgagcggacgctcttcctcttcgacaagctgctgctcatcacgaagaagagagatgacacgtttacatacaaagctcacatcctgtgtggcaacctcatgcttgtggaggtgattccaaaagagccgctcagcttcagcgtcttccactacaagaatcccaagctgcagcacacagtccaggccaaatcccagcaagacaaacgcctctgggttctgcacctaaagagactgattctggagaaccatgcagccaagattccagctaaggccaagcaagcaatccttgaaatggatgccattcatcatccaggcttctgttacagtcctgagggagggacgaaagcactgttcggctctaaagaaggttctgctccatatcggctgagaagaaaatctgaaccttcctcacggtcacataaagttttgaagaccagtgaaacagcacaagacatccaaaaggtttctagagaggaaggatctccccagctgtcttcagcaaggccgtctcctgcccagagaaatagtcagcctagcagttctaccatgatcagcgtgcttcgagcgggtggagctctcagaaacatctggaccgatcaccagatcaggcaagccttgtttcccagccgacggtccccgcaggagaatgaggatgatgaagatgattatcagatgttcgtgccgtcattttcctcctcagatctgaactctaccagactatgtgaagatagcacttctagtcgcccttgcagctggcatatgggacagatggagtccacagagacctccagctctggtcacaggattgtcaggcgggccagcagtgctggggagagcaacacatgccctcctgaaataggaactagtgacagaactagggaactgcagaacagccccaaaacagaagggcaggaggagatgactccctttgggtcatccatagagttgactattgatgacatagaccatgtctatgataacatcagttatgaggacttaaaactaatggttgctaagcgggaagaagctgaatccactccctctaaatcagccagggactccgttcgccccaagagcaccccagagttagccttcacaaagaggcaagctggccacagtaagggctctctttacgcacaaacagatggcaccctctcaggtggagaggcatccagccaaagcacgcatgaactccaagcggttgaggagaacatctatgacaccatagggctcccagatcctccgtcgctgggttttaagtgcagcagcctaaagcgtgcaaagcggagcacctttttgggtctggaggccgacttcgtgtgctgtgacagcctgaggccatttgtttcccaagacagcctccagctcagtgaggacgaagccccttaccatcaggccactcccgatcatggttatctgagtttgctgtatgactctcccagtggtaacttgtctatgcctcataagcctgtatctgataaactgtccgaagaagtagatgaaatctggaatgacctggaaaattacatcaagaaaaatgaagacaaggccagagaccgtctcctggcagcgtttcctgtgagcaaggatgatgtgccagacaggctgcacgcagagagcacccctgagctgagccgggacgtggggcgctctgtgtccacgctgtccctgcctgagagccaggctctcctcacgcccgtgaagagcagggctggcagagccagccgcgccaactgcccctttgaggaagacctgatttctaaagaaggctcctttatgagccttaaccggctttctctggctagtgaaatgcccctcatggacaatccctacgacctggccaacagtggcctgtctcaaacagacccagaaaaccctgacctggggatggaggccacagataagacaaaaagcagggtgtttatgatggctcggcagtacagtcagaagattaagaaggcgaatcaacttttaaaagtgaaaagtctggagctggagcagccgccggccagtcagcatcagaaatccatgcacaaagacctggctgccatcttggaagagaagaagcaaggagggcccgccattggtgccaggattgctgagtattcccagttgtatgaccagattgtattcagagagtctcccttgaaaattcagaaggatggctgggccagccctcaagaatcctccctcctgaggtctgtgtcaccttcccaggtccaccatggtagtggagactggcttctgcattcaacctatagtaatggagagttagcagatttctgtctcccaccagagcaagacttgaggtcaagatatcccacgtttgagatcaatacaaaaagtactcccaggcaattgtccgcagcttgctctgtgccttctcttcaaacctctgaccctctgccaggctctgtgcagagatgcagcgtggtagtaagtcagcccaacaaagagaactggtgtcaggaccatctttacaactccttgggtcggaaagggatcagcgctaaatctcagccttatcacaggtcccagtcatcttcctccgtcttgatcaacaaatcaatggattccatcaactaccctagtgatgtgggaaagcagcagctgctgtctttacacagaagttcaaggtgtgagagtcaccaggacttgctgccagatattgctgactcgcatcaacagggcactgaaaaactctcagatctcacactccaagactcacagaaagttgtggtggtcaatagaaatttacccttaaatgcccaaattgcaacacagaattatttttccaatttcaaagagactgatggagatgaagatgactatgtggaaatcaagtcagaagaagatgagtcggagttggagctatctcacaatcgtagaaggaaatctgactcaaagtttgtggatgctgacttttctgataatgtctgcagcggcaacacattgcattctttgaatagtccgcgcactccaaaaaagccggttaacagcaaacttggcctttcaccatatctgacaccatataatgattctgacaaactgaatgactatctttggagggggccatctcccaatcaacaaaatattgtccagtctctaagggaaaaatttcagtgtctcagttcaagcagctttgcttaaggttcttcataataactgcttgaatcaacttcttattttgctcataaaacgttacagatactgatgaggtgttttatgtataccagattaaaacaattttgtaagaaccagaggtgtaaaatatactttcttttacagcacaacttttggaaatggctgacgatgcagcccggattgtactgtagcacatgttggcatcaacagtatattttctcatgctgagtgtcttcatgtttcatgtaagtcaatcttacttgaaagtttttagacttttaacacgatggccataacctgacaatagtgcccacaccttaagaaatgcaataatcctttcctgttatccagaaggcccaggtagttttatcctgtgactcaaaggcagcaaggagactttttcacattttaaaaggcaacgaaagctgttgaaagaattatgcttatatctcacattttggttatatttgtggtaacaccttaggataacgtaagccagagatctgtaaattggactgcagtctgaggtgcccattttagggtttttgtgctagtattcttttatgtcattttgatgcagaaattgtgtgactgttgaaaattaaaatgtagcgggacccattttctgtacgcagaaccctttacctgtattcctggacaaggcctagagaacgagctgctcatcatgtttctaatataatttctggggtgaaatgaatgatttccttactggcttagagaaaaccaaggtcaataaaatgcagattgacttaactattagaaaagatgggatgacttctgggaaccacttaactcttcaaatgactgttgaaagagaaaaagcaaaactgaaatcccaccagaccattttgtgtgcctgtttctaatcgatacaaagttaagcatgagctaaaatcagacaaagcactttaaatttatcctttccagagcgctttgcacatgcaccctcctgagtttgggattctgccaaatgaccaacttgatcctggccctgaggagtcattggctgcaggaatagggcaagaatctatttcctaaactacacataacatgggagcctttttttcgttgttttcaggtatattaaagaatgaaatctttggttactaggtgctgactaataaataacaccttttatattctgaccatttgtcacatttcattgtgatactgtatactgatctaactccttatgaaaggcaacaaacaaaaataagacattgaataaaaagcaaaatcaaagaagctaaagagaaaaatgaaggcagatatattgcaactttataacatattctattttattgaagactgcaattaatgcagcaagaatgctttctcaagcggtggcctttgtattctcattttaatcaggtgtacattctatggcctctcccccatgctgttagtttctattttaaaagatacaataatatatgtagggaaaggggcctgggctcttcatttaaaggtaagcagtaatattgagtaagtgacataattctttttctctttgttaagtcctatgcctctttttcttaactgtaaaacatagaatatgagcgtttttatcttacaaataggtacctaaggcatgtgattttatttttaaataacaaaaaataacccaagtttcttgcttctccaaagtattcttctcatagcttataaaagaaagtccacattgaatagcatggtctgggaacattccttctttattgtgtttatttgaacatgatatgagtttccaagatgaaatgatcaaaaaagataagtaccacaagaaagtttttttgtttggttggtttttttgtttgtttgtttttttcttgagactgagtctctccctgttgcccaagttggagtgcaatcttggctcactgcagcctccacctccccggttccagcgattctcctgcctcagcctcttgaatagctgggattacaggcgcccgccaccacacctggctaatttttgtgttgttagtagaggcggggtttcatcatgttggccaggctggtctcgaactcctgatctcatgatccgtctgcctcggcctcccagagtgctgggattacaggcatgagccactgcgcccggccaagaaagtatgtttttagaggtgtgtgtaagtgcatttgtattacctatgaacaaaattacctgactcttgtcccaggaaagctgtttcgcattttcgctttttgattggtattatccagttctatgtagttcatattattgttctgtctgactctcagaaattacttcttcacgccagtgtcttgttgcatgactttgatgtcacctataggaatacacctcactgcacgtaagtgggtatcttactgtataaaaggtctacatggctttaggttttaggacaaatgtgtagatttatagaccatttctgttggccaggacacagattttgagagctgtgtgtatatatatataatcatgtttgtatttttttcctgaaagttatcaattgcttttgtttaaaacagtttgttttagaggtggggtggggatgtatataacgaggaaaagttatatgtactttaaagtatgtcaagttcttactagtttcctgtactgaaggttcaattttttttatataagtttacttttcacctgctctattctttgtggggaaaaaatgcatctagaaaaacatagtttaaatactgtatataagataatgaaagttagtaacgtccattatttaataaagtttgtaaagtacaaggtaa

SEQ ID NO: 166556 - DNA, 478 bp, Homo sapiens
  Payload ID: 12795
  Gene Symbol: PLEKHG1
  Gene Name: pleckstrin homology domain containing, family G (with RhoGef domain) member 1
  ENST ID: ENST00000367326
  CDS Start-End: 339-478
ccgagcctgagcccgagcccgagcccgacggcggctgcagggcgctccggcagcccgagccggcgcagcgcagcccgcaccctccccgcccgacctgcgagcgccgcccgggcatgcgaagccgtccctccccgggaaaggagagtgaatatctatggatattgccctggcccttaagaaggtgaagactgatgagaagagtctgtgggtgaagacattgaaaaggtttcaactataaaaatgggcaccagttgcgtcttgaagtgccatcagctgtaaccaaagttccacatcccaagacgacagccaggcgttcctgccctcaagaactgaagacaatggagctctctgatagtgaccgacccgtcagcttcggttccacatcatcctcggcctcttcccgcgacagccatggttccttcggcagcagaatgaccttagtttcaaatagccacatgggcttgtttaaccaggataa

SEQ ID NO: 166557 - DNA, 7237 bp, Homo sapiens
  Payload ID: 12795
  Gene Symbol: PLEKHG1
  Gene Name: pleckstrin homology domain containing, family G (with RhoGef domain) member 1
  Uniprot ID: Q9ULL1
  ENST ID: ENST00000367328
  CDS Start-End: 313-4470
gaggaagaggaagtcggagcccgagcctgagcccgagcccgagcccgacggcggctgcagggcgctccggcagcccgagccggcgcagcgcagcccgcaccctccccgcccgacctgcgagcgccgcccgggcatgcgaagccgtccctccccgggtgaagactgatgagaagagtctgtgggtgaagacattgaaaaggtttcaactataaaaatgggcaccagttgcgtcttgaagtgccatcagctgtaaccaaagttccacatcccaagacgacagccaggcgttcctgccctcaagaactgaagacaatggagctctctgatagtgaccgacccgtcagcttcggttccacatcatcctcggcctcttcccgcgacagccatggttccttcggcagcagaatgaccttagtttcaaatagccacatgggcttgtttaaccaggataaggaggtaggggccataaaactggagctgattcctgccaggccgttttccagcagcgagctgcagagggacaaccccgccacggggcaacagaacgcggatgagggcagcgaaaggccacccagagcgcagtggagagtggactcaaacggggcacccaagacgatcgcagactcggccacgagccccaagctcctctatgtggatagagttgttcaggaaattctggaaaccgaaaggacttatgtacaagatttaaaaagcatcgtagaggattaccttgactgcatcagggaccaaacaaaacttcccctggggaccgaagaaagatcagccctttttggaaacatacaggatatctaccacttcaatagtgaacttctgcaagatttggaaaactgtgaaaatgatcctgtggccatagcagagtgttttgtgtccaagagtgaagagttccacatttatacccagtattgcactaactatccaaggtccgtggctgtgctaacagagtgtatgaggaacaagatactggccaaattcttcagggagcgtcaggaaactctgaaacactcgctgcctctggggtcctatctcttgaaaccagttcagcggattctcaagtatcatctccttctgcatgaaatagaaaaccaccttgataaggacacagaaggctatgatgtggtgcttgatgctatagacacaatgcagcgagtcgcctggcatatcaatgacatgaagcggaaacacgagcacgcggtccggttacaggagatacagagtttgctcactaactggaaggggccagacctgaccagctacggggaactggtgcttgagggaaccttccgcatccagcgagccaagaatgagcggacgctcttcctcttcgacaagctgctgctcatcacgaagaagagagatgacacgtttacatacaaagctcacatcctgtgtggcaacctcatgcttgtggaggtgattccaaaagagccgctcagcttcagcgtcttccactacaagaatcccaagctgcagcacacagtccaggccaaatcccagcaagacaaacgcctctgggttctgcacctaaagagactgattctggagaaccatgcagccaagattccagctaaggccaagcaagcaatccttgaaatggatgccattcatcatccaggcttctgttacagtcctgagggagggacgaaagcactgttcggctctaaagaaggttctgctccatatcggctgagaagaaaatctgaaccttcctcacggtcacataaagttttgaagaccagtgaaacagcacaagacatccaaaaggtttctagagaggaaggatctccccagctgtcttcagcaaggccgtctcctgcccagagaaatagtcagcctagcagttctaccatgatcagcgtgcttcgagcgggtggagctctcagaaacatctggaccgatcaccagatcaggcaagccttgtttcccagccgacggtccccgcaggagaatgaggatgatgaagatgattatcagatgttcgtgccgtcattttcctcctcagatctgaactctaccagactatgtgaagatagcacttctagtcgcccttgcagctggcatatgggacagatggagtccacagagacctccagctctggtcacaggattgtcaggcgggccagcagtgctggggagagcaacacatgccctcctgaaataggaactagtgacagaactagggaactgcagaacagccccaaaacagaagggcaggaggagatgactccctttgggtcatccatagagttgactattgatgacatagaccatgtctatgataacatcagttatgaggacttaaaactaatggttgctaagcgggaagaagctgaatccactccctctaaatcagccagggactccgttcgccccaagagcaccccagagttagccttcacaaagaggcaagctggccacagtaagggctctctttacgcacaaacagatggcaccctctcaggtggagaggcatccagccaaagcacgcatgaactccaagcggttgaggagaacatctatgacaccatagggctcccagatcctccgtcgctgggttttaagtgcagcagcctaaagcgtgcaaagcggagcacctttttgggtctggaggccgacttcgtgtgctgtgacagcctgaggccatttgtttcccaagacagcctccagctcagtgaggacgaagccccttaccatcaggccactcccgatcatggttatctgagtttgctgtatgactctcccagtggtaacttgtctatgcctcataagcctgtatctgataaactgtccgaagaagtagatgaaatctggaatgacctggaaaattacatcaagaaaaatgaagacaaggccagagaccgtctcctggcagcgtttcctgtgagcaaggatgatgtgccagacaggctgcacgcagagagcacccctgagctgagccgggacgtggggcgctctgtgtccacgctgtccctgcctgagagccaggctctcctcacgcccgtgaagagcagggctggcagagccagccgcgccaactgcccctttgaggaagacctgatttctaaagaaggctcctttatgagccttaaccggctttctctggctagtgaaatgcccctcatggacaatccctacgacctggccaacagtggcctgtctcaaacagacccagaaaaccctgacctggggatggaggccacagataagacaaaaagcagggtgtttatgatggctcggcagtacagtcagaagattaagaaggcgaatcaacttttaaaagtgaaaagtctggagctggagcagccgccggccagtcagcatcagaaatccatgcacaaagacctggctgccatcttggaagagaagaagcaaggagggcccgccattggtgccaggattgctgagtattcccagttgtatgaccagattgtattcagagagtctcccttgaaaattcagaaggatggctgggccagccctcaagaatcctccctcctgaggtctgtgtcaccttcccaggtccaccatggtagtggagactggcttctgcattcaacctatagtaatggagagttagcagatttctgtctcccaccagagcaagacttgaggtcaagatatcccacgtttgagatcaatacaaaaagtactcccaggcaattgtccgcagcttgctctgtgccttctcttcaaacctctgaccctctgccaggctctgtgcagagatgcagcgtggtagtaagtcagcccaacaaagagaactggtgtcaggaccatctttacaactccttgggtcggaaagggatcagcgctaaatctcagccttatcacaggtcccagtcatcttcctccgtcttgatcaacaaatcaatggattccatcaactaccctagtgatgtgggaaagcagcagctgctgtctttacacagaagttcaaggtgtgagagtcaccaggacttgctgccagatattgctgactcgcatcaacagggcactgaaaaactctcagatctcacactccaagactcacagaaagttgtggtggtcaatagaaatttacccttaaatgcccaaattgcaacacagaattatttttccaatttcaaagagactgatggagatgaagatgactatgtggaaatcaagtcagaagaagatgagtcggagttggagctatctcacaatcgtagaaggaaatctgactcaaagtttgtggatgctgacttttctgataatgtctgcagcggcaacacattgcattctttgaatagtccgcgcactccaaaaaagccggttaacagcaaacttggcctttcaccatatctgacaccatataatgattctgacaaactgaatgactatctttggagggggccatctcccaatcaacaaaatattgtccagtctctaagggaaaaatttcagtgtctcagttcaagcagctttgcttaaggttcttcataataactgcttgaatcaacttcttattttgctcataaaacgttacagatactgatgaggtgttttatgtataccagattaaaacaattttgtaagaaccagaggtgtaaaatatactttcttttacagcacaacttttggaaatggctgacgatgcagcccggattgtactgtagcacatgttggcatcaacagtatattttctcatgctgagtgtcttcatgtttcatgtaagtcaatcttacttgaaagtttttagacttttaacacgatggccataacctgacaatagtgcccacaccttaagaaatgcaataatcctttcctgttatccagaaggcccaggtagttttatcctgtgactcaaaggcagcaaggagactttttcacattttaaaaggcaacgaaagctgttgaaagaattatgcttatatctcacattttggttatatttgtggtaacaccttaggataacgtaagccagagatctgtaaattggactgcagtctgaggtgcccattttagggtttttgtgctagtattcttttatgtcattttgatgcagaaattgtgtgactgttgaaaattaaaatgtagcgggacccattttctgtacgcagaaccctttacctgtattcctggacaaggcctagagaacgagctgctcatcatgtttctaatataatttctggggtgaaatgaatgatttccttactggcttagagaaaaccaaggtcaataaaatgcagattgacttaactattagaaaagatgggatgacttctgggaaccacttaactcttcaaatgactgttgaaagagaaaaagcaaaactgaaatcccaccagaccattttgtgtgcctgtttctaatcgatacaaagttaagcatgagctaaaatcagacaaagcactttaaatttatcctttccagagcgctttgcacatgcaccctcctgagtttgggattctgccaaatgaccaacttgatcctggccctgaggagtcattggctgcaggaatagggcaagaatctatttcctaaactacacataacatgggagcctttttttcgttgttttcaggtatattaaagaatgaaatctttggttactaggtgctgactaataaataacaccttttatattctgaccatttgtcacatttcattgtgatactgtatactgatctaactccttatgaaaggcaacaaacaaaaataagacattgaataaaaagcaaaatcaaagaagctaaagagaaaaatgaaggcagatatattgcaactttataacatattctattttattgaagactgcaattaatgcagcaagaatgctttctcaagcggtggcctttgtattctcattttaatcaggtgtacattctatggcctctcccccatgctgttagtttctattttaaaagatacaataatatatgtagggaaaggggcctgggctcttcatttaaaggtaagcagtaatattgagtaagtgacataattctttttctctttgttaagtcctatgcctctttttcttaactgtaaaacatagaatatgagcgtttttatcttacaaataggtacctaaggcatgtgattttatttttaaataacaaaaaataacccaagtttcttgcttctccaaagtattcttctcatagcttataaaagaaagtccacattgaatagcatggtctgggaacattccttctttattgtgtttatttgaacatgatatgagtttccaagatgaaatgatcaaaaaagataagtaccacaagaaagtttttttgtttggttggtttttttgtttgtttgtttttttcttgagactgagtctctccctgttgcccaagttggagtgcaatcttggctcactgcagcctccacctccccggttccagcgattctcctgcctcagcctcttgaatagctgggattacaggcgcccgccaccacacctggctaatttttgtgttgttagtagaggcggggtttcatcatgttggccaggctggtctcgaactcctgatctcatgatccgtctgcctcggcctcccagagtgctgggattacaggcatgagccactgcgcccggccaagaaagtatgtttttagaggtgtgtgtaagtgcatttgtattacctatgaacaaaattacctgactcttgtcccaggaaagctgtttcgcattttcgctttttgattggtattatccagttctatgtagttcatattattgttctgtctgactctcagaaattacttcttcacgccagtgtcttgttgcatgactttgatgtcacctataggaatacacctcactgcacgtaagtgggtatcttactgtataaaaggtctacatggctttaggttttaggacaaatgtgtagatttatagaccatttctgttggccaggacacagattttgagagctgtgtgtatatatatataatcatgtttgtatttttttcctgaaagttatcaattgcttttgtttaaaacagtttgttttagaggtggggtggggatgtatataacgaggaaaagttatatgtactttaaagtatgtcaagttcttactagtttcctgtactgaaggttcaattttttttatataagtttacttttcacctgctctattctttgtggggaaaaaatgcatctagaaaaacatagtttaaatactgtatataagataatgaaagttagtaacgtccattatttaataaagtttgtaaagtacaaggt

SEQ ID NO: 166558 - DNA, 1476 bp, Homo sapiens
  Payload ID: 12795
  Gene Symbol: PLEKHG1
  Gene Name: pleckstrin homology domain containing, family G (with RhoGef domain) member 1
  ENST ID: ENST00000475490
  CDS Start-End: 1-1179
gaagaaagatcagccctttttggaaacatacaggatatctaccacttcaatagtgaacttctgcaagatttggaaaactgtgaaaatgatcctgtggccatagcagagtgttttgtgtccaagagtgaagagttccacatttatacccagtattgcactaactatccaaggtccgtggctgtgctaacagagtgtatgaggaacaagatactggccaaattcttcagggagcgtcaggaaactctgaaacactcgctgcctctggggtcctatctcttgaaaccagttcagcggattctcaagtatcatctccttctgcatgaaatagaaaaccaccttgataaggacacagaaggctatgatgtggtgcttgatgctatagacacaatgcagcgagtcgcctggcatatcaatgacatgaagcggaaacacgagcacgcggtccggttacaggagatacagagtttgctcactaactggaaggggccagacctgaccagctacggggaactggtgcttgagggaaccttccgcatccagcgagccaagaatgagcggacgctcttcctcttcgacaagctgctgctcatcacgaagaagagagatgacacgtttacatacaaagctcacatcctgtgtggcaacctcatgcttgtggaggtgattccaaaagagccgctcagcttcagcgtcttccactacaagaatcccaagctgcagcacacagtccaggccaaatcccagcaagacaaacgcctctgggttctgcacctaaagagactgattctggagaaccatgcagccaagattccagctaaggccaagcaagcaatccttgaaatggatgccattcatcatccaggcttctgttacagtcctgagggagggacgaaagcactgttcggctctaaagaaggttctgctccatatcggctgagaagaaaatctgaaccttcctcacggtcacataaagttttgaagaccagtgaaacagcacaagacatccaaaaggtttctagagaggaaggatctccccagctgtcttcagcaaggccgtctcctgcccagagaaatagtcagcctagcagttctaccatgatcagcgtgcttcgagcgggtggagctctcagaaacatctggaccgatcaccagatcagcacaacttttggaaatggctgacgatgcagcccggattgtactgtagcacatgttggcatcaacagtatattttctcatgctgagtgtcttcatgtttcatagcgctttgcacatgcaccctcctgagtttgggattctgccaaatgaccaacttgatcctggccctgaggagtcattggctgcaggaatagggcaagaatctatttcctaaactacacataacatgggagcctttttttcgttgttttcaggtatattaaagaatgaaatctttggttactaggtgctgactaataaataacaccttttatattctga

SEQ ID NO: 166559 - DNA, 4209 bp, Homo sapiens
  Payload ID: 12796
  Gene Symbol: PLEKHG2
  Gene Name: pleckstrin homology domain containing, family G (with RhoGef domain) member 2
  ENST ID: ENST00000205135
  CDS Start-End: 1-3764
agcgtgtggcccgggagatcgtggagacagaacgggcctatgtcagggacctccgcagcatcgtggaggactacctgggccctctgctggacggcggggtcctggggctgagcgtggagcaggtgggcacgctgtttgccaacattgaggacatctacgagttcagcagcgagctcctggaggacttggagaacagcagcagcgccgggggtattgccgagtgcttcgtgcagaggagcgaggattttgacatctacacattgtactgcatgaactacccgagctccctggccctgctccgggagctgtcgttgtctccgccagcagccctgtggctgcaggagcgccaggcccagcttcgccactcgctgcccctgcagagcttcctgctgaaacctgtccagcgcattctcaagtaccatctgctgctgcaggaactagggaagcactgggcggagggcccaggcactgggggtcgcgagatggtggaggaagctattgtgtccatgacagcggttgcctggtacatcaacgacatgaagcgcaagcaggagcatgcagcgcgcctccaggaagtgcagcggcggctgggtggctggaccggaccagagctcagtgcttttggggaactggtgttggagggcgcgttccgaggaggcggagggggtggcccccggctacgagggggtgagcggctgctcttcctgttctctcggatgctgctggtggccaagcgcagggggctggagtacacctacaaaggccacatcttctgctgcaacctgagcgtgagcgagagtccccgagaccctctagggttcaaggtgtctgatctgaccattcccaagcacagacacctgctccaggccaagaaccaagaagagaagaggctgtggattcactgtctccagcgcctcttctttgagaaccaccctgcctccatccctgccaaggcaaagcaagttctccttgaaaacagcctgcattgtgcccccaaaagtaagcctgtcctagagcccctgacacccccacttgggtctcctcgacctcgagatgctagaagttttacccctgggcgaaggaacacagctaagcctggattcaagcacgctggcagcgaaggggaactctaccctccagaatctcagccaccagtttcaggctctgcaccccctgaggacctggaggatgctggacccccaacactggacccctctgggacctcaatcactgaagaaatcctggaactgctgaatcagcgaggccttcgagatccagggccgtccacccatgacattcccaagttccccggagactcccaggtgcctggcgacagcgaaaccctcacattccaagccctgcccagccgggactcttcagaagaggaggaggaggaagaggaagggctggagatggatgaacgggggccttccccactccacgtcctggaagggctcgaaagttccattgcagctgaaatgcccagcattccctgccttaccaaaattcctgacgtgcccaaccttcctgaaattcccagccgctgtgaaattcccgaaggttctcgccttcctagtctctctgacatttccgatgtttttgagatgccctgccttccagccatacctagtgtccccaacacccccagtctgtctagcactcccaccctctcctgtgactcctggctccaagggcctctgcaggaaccagctgaggctccagccaccaggagagaactgttttctgggagcaatcctgggaaactgggagagccgccttcaggaggcaaggcagggccagaggaggatgaagaaggggtatcattcacagacttccagccccaggatgtcacccaacatcagggattcccagatgagctggcattccgctcttgctcagaaatccggagcgcctggcaggcattggaacagggacagctggcccggccaggcttcccagagccactgctgatcctggaggattcggatctgggtggagacagcgggagcgggaaggcaggagccccgagttcagaaaggacggcgtcccgagtgcgagagctggcccggctttacagcgagcggatccagcagatgcagcgggcggagactcgggcatcagccaatgccccgcgccgccggcctcgggttctggcccaaccccagccatccccctgtctgccccaggagcaggcagagccagggctcctgcctgcctttggacacgtgctggtatgtgagctggccttcccactgacatgtgcccaggagtctgtccccctgggtcctgctgtctgggttcaagctgccatacctttgtcaaagcagggaggcagcccggatggccagggtctacatgtttccaatttgcctaagcaagaccttccgggcatccacgtttcagctgctacccttttgcctgagcaaggaggttcccggcatgtccaggctccagccgccacacctttgcccaagcaagaaggccccctgcacctccaggtgccggctcttacaactttctctgatcaaggccacccagaaatccaagttccagccaccactcctttgcctgagcatagaagtcacatggttataccagctccatccaccgccttttgtcctgagcagggacactgtgcggacatccacgttcccaccactccagctttgcccaaggagatttgttctgatttcacagtttcagtcaccacccctgtgcccaagcaagaaggtcacctagacagcgagagcccaaccaatatcccactgacaaagcaaggaggttccagggatgttcagggcccagaccctgtctgcagtcaacccatccagcctttgtcttggcatggaagcagcctggatccccagggcccaggcgacaccctaccacccttgccatgtcacctcccagaccttcagattccaggtacctcacctttgcctgcacatggaagccacctggaccatcggatcccagccaacgccccactgtctttgtcccaggagctcccagacactcaggttccagctaccacacctttgcccctgccacaagtcctcacagacatctgggtccaagccctcccaacttcacccaagcagggaagcctcccagacatccagggtccagcggctgcacctccacttccggagccaagccttacagatacacaggtccaaaaactcacaccttcgttggagcagaagagcctcatagatgcccatgttccagctgccacacctttacctgagagaggaggctctctagacattcagggcctctcacccaccccagttcagaccaccatggttttgtccaaaccaggaggctccttagcctctcacgttgccaggttggagtcttcagacttgacgccacctcatagtcccccaccttccagccgtcagctcctgggccccaatgcagctgccctctccagatacctggcagcctcatatatcagccagagcctggctcggcggcaggggcctgggggaggggcccccgcagcctcccggggctcctggtcctctgctcccacgtcacgggcatcttcgccgcccccccagccccagccaccacctcccccagccaggcggctcagctatgccacgacggttaacatccacgtgggcgggggtgggcggctgcggccagccaaggcccaggtccggttgaaccaccctgctctcttggcctccacacaggaatctatgggccttcacagggcccagggggctcctgatgcccccttccacatgtgagccaggacatgaggcttccctgaagcaaggatttcagccagatgccatagaccctcagaacttgacctggaagtccagacactgaacgcaggcctcaaaactgctgcggccttccaactcctggtatctgcatcggcgaatggcccttcttgccttgatccacagggatggggaagggaggaatgtcattaatgttttgttaatactgattctttcatgcaatgatgtgtattttcccattctggaggctgtgggagatgacaagacaatgaatgggaaggtctgacacagaacaaatcagcggttctgaaagcttggggaatctcagactcctttgagaattattggaaaatggacccactataacttggcgtgtgtgtgaactgcttgatgcccatccaggaaagccaagttaagaagctttgcttcaagtagacactagaaa

SEQ ID NO: 166560 - DNA, 2205 bp, Homo sapiens
  Payload ID: 12796
  Gene Symbol: PLEKHG2
  Gene Name: pleckstrin homology domain containing, family G (with RhoGef domain) member 2
  Uniprot ID: Q9H7P9
  ENST ID: ENST00000409797
  CDS Start-End: 250-1983
ctgcaggaccctggcatccggtcccccagcctccgccctcccctgggaccccgcggcctcccgcccacggcttttcccagccctgcccctcgccctccgctccagctggagcccaaacgttcccaggatccctaagcctccggccccagacaaacgggactcgcagcttctgcgcctcctgctccgctcactcttctttgtctcagcctttccatctttttcgccaggactctgctgggccgctcagccatgcctgagggagcccaaggactgagcctctccaaacctagcccaagcctcgggtgtggccgaagaggtgaagtgtgtgactgtggcaccgtgtgtgagactcggacagctcctgcagcccccaccatggcctccccccgaggttctgggagctccacatccctgagcacagtgggctctgagggggatccagcccctgggcccactccagcctgctcagcctccaggccagagccccttccagggcctcccatccgcctacatctctctccggtggggatcccaggttcagccagaccctcaaggctggagcgtgtggcccgggagatcgtggagacagaacgggcctatgtcagggacctccgcagcatcgtggaggactacctgggccctctgctggacggcggggtcctggggctgagcgtggagcaggtgggcacgctgtttgccaacattgaggacatctacgagttcagcagcgagctcctggaggacttggagaacagcagcagcgccgggggtattgccgagtgcttcgtgcagaggagcgaggattttgacatctacacattgtactgcatgaactacccgagctccctggccctgctccgggagctgtcgttgtctccgccagcagccctgtggctgcaggagcgccaggcccagcttcgccactcgctgcccctgcagagcttcctgctgaaacctgtccagcgcattctcaagtaccatctgctgctgcaggaactagggaagcactgggcggagggcccaggcactgggggtcgcgagatggtggaggaagctattgtgtccatgacagcggttgcctggtacatcaacgacatgaagcgcaagcaggagcatgcagcgcgcctccaggaagtgcagcggcggctgggtggctggaccggaccagagctcagtgcttttggggaactggtgttggagggcgcgttccgaggaggcggagggggtggcccccggctacgagggggtgagcggctgctcttcctgttctctcggatgctgctggtggccaagcgcagggggctggagtacacctacaaaggccacatcttctgctgcaacctgagcgtgagcgagagtccccgagaccctctagggttcaaggtgtctgatctgaccattcccaagcacagacacctgctccaggccaagaaccaagaagagaagaggctgtggattcactgtctccagcgcctcttctttgagaaccaccctgcctccatccctgccaaggcaaagcaagttctccttgaaaacagcctgcattgtgcccccaaaagtaagcctgtcctagagcccctgacacccccacttgggtctcctcgacctcgagatgctagaagttttacccctgggcgaaggaacacagctccatctcctgggccctctgtgattcgccgaggccgcaggcagtctgagccggtgaaggacccttatgtcatgttcccacagaacgctaagcctggattcaagcacgctggcagcgaaggggaactctaccctccagaatctcagccaccagtttcaggctctgcaccccctgaggacctggaggatgctggacccccaacactggacccctctgggacctcaatcactgaagaaatcctggaactgctgaatcagcgaggccttcgagatccaggggaatctatgggccttcacagggcccagggggctcctgatgcccccttccacatgtgagccaggacatgaggcttccctgaagcaaggatttcagccagatgccatagaccctcagaacttgacctggaagtccagacactgaacgcaggcctcaaaactgctgcggccttccaactcctggtatctgcatcggcgaatggcccttcttgccttgatccacagggatggggaagggaggaatgtcattaatgttttgttaatactgattctttcatgcaa

SEQ ID NO: 166561 - DNA, 8132 bp, Homo sapiens
  Payload ID: 12796
  Gene Symbol: PLEKHG2
  Gene Name: pleckstrin homology domain containing, family G (with RhoGef domain) member 2
  Uniprot ID: Q9H7P9
  ENST ID: ENST00000425673
  CDS Start-End: 851-5011
atgtgagccccggcgacagcgggggaggggaagccccgggcgaccgccccccgcctcacagctgggatcggactctcccgccccagatgtggcgccgccgccgtcacacgagccccgtgacacccagccgggagcccgaggggtccagaggctcggacccgggcgtccggaatttctgcaccgcatcctgagagaccccgaggtccagaccccggcgcccaggctggaggacttgagccatccaggtgcgcagcgccccctcctggagcagccgggagcccggacgtcaccccgcgagaccctggaggccgagcgccccgtatccccgtttcaagaactcaggatccaggaccgcagactccctccagggctccgatcccaagaccccgcgttggaggaacttgagatccggacttctaagcgccccaaccagtttcgggctgcagcggccatcgcttcaaggggacccaggactttgggacccccctgtgctcccacctggagggagtttcattcctgcccctagaattaggggaactcagaaatccatcccccaccccacggccctacctagaagacttaggaatgtgggtccccagcgccgccatctgagactccagagtcgaggctcctagcatcccctacgtagaacactgagaaattccgactgcgggaccccagtctccgagagaccccagattctattcctggagcctgagagcccgaagttcacgcccctgagtctgggctccgcacctccctggggaccgcgtcggggtcgcgcaggagccgggctgcctcgagccggggctggaggctccccgggaggactctgctgggccgctcagccatgcctgagggagcccaaggactgagcctctccaaacctagcccaagcctcgggtgtggccgaagaggtgaagtgtgtgactgtggcaccgtgtgtgagactcggacagctcctgcagcccccaccatggcctccccccgaggttctgggagctccacatccctgagcacagtgggctctgagggggatccagcccctgggcccactccagcctgctcagcctccaggccagagccccttccagggcctcccatccgcctacatctctctccggtggggatcccaggttcagccagaccctcaaggctggagcgtgtggcccgggagatcgtggagacagaacgggcctatgtcagggacctccgcagcatcgtggaggactacctgggccctctgctggacggcggggtcctggggctgagcgtggagcaggtgggcacgctgtttgccaacattgaggacatctacgagttcagcagcgagctcctggaggacttggagaacagcagcagcgccgggggtattgccgagtgcttcgtgcagaggagcgaggattttgacatctacacattgtactgcatgaactacccgagctccctggccctgctccgggagctgtcgttgtctccgccagcagccctgtggctgcaggagcgccaggcccagcttcgccactcgctgcccctgcagagcttcctgctgaaacctgtccagcgcattctcaagtaccatctgctgctgcaggaactagggaagcactgggcggagggcccaggcactgggggtcgcgagatggtggaggaagctattgtgtccatgacagcggttgcctggtacatcaacgacatgaagcgcaagcaggagcatgcagcgcgcctccaggaagtgcagcggcggctgggtggctggaccggaccagagctcagtgcttttggggaactggtgttggagggcgcgttccgaggaggcggagggggtggcccccggctacgagggggtgagcggctgctcttcctgttctctcggatgctgctggtggccaagcgcagggggctggagtacacctacaaaggccacatcttctgctgcaacctgagcgtgagcgagagtccccgagaccctctagggttcaaggtgtctgatctgaccattcccaagcacagacacctgctccaggccaagaaccaagaagagaagaggctgtggattcactgtctccagcgcctcttctttgagaaccaccctgcctccatccctgccaaggcaaagcaagttctccttgaaaacagcctgcattgtgcccccaaaagtaagcctgtcctagagcccctgacacccccacttgggtctcctcgacctcgagatgctagaagttttacccctgggcgaaggaacacagctccatctcctgggccctctgtgattcgccgaggccgcaggcagtctgagccggtgaaggacccttatgtcatgttcccacagaacgctaagcctggattcaagcacgctggcagcgaaggggaactctaccctccagaatctcagccaccagtttcaggctctgcaccccctgaggacctggaggatgctggacccccaacactggacccctctgggacctcaatcactgaagaaatcctggaactgctgaatcagcgaggccttcgagatccagggccgtccacccatgacattcccaagttccccggagactcccaggtgcctggcgacagcgaaaccctcacattccaagccctgcccagccgggactcttcagaagaggaggaggaggaagaggaagggctggagatggatgaacgggggccttccccactccacgtcctggaagggctcgaaagttccattgcagctgaaatgcccagcattccctgccttaccaaaattcctgacgtgcccaaccttcctgaaattcccagccgctgtgaaattcccgaaggttctcgccttcctagtctctctgacatttccgatgtttttgagatgccctgccttccagccatacctagtgtccccaacacccccagtctgtctagcactcccaccctctcctgtgactcctggctccaagggcctctgcaggaaccagctgaggctccagccaccaggagagaactgttttctgggagcaatcctgggaaactgggagagccgccttcaggaggcaaggcagggccagaggaggatgaagaaggggtatcattcacagacttccagccccaggatgtcacccaacatcagggattcccagatgagctggcattccgctcttgctcagaaatccggagcgcctggcaggcattggaacagggacagctggcccggccaggcttcccagagccactgctgatcctggaggattcggatctgggtggagacagcgggagcgggaaggcaggagccccgagttcagaaaggacggcgtcccgagtgcgagagctggcccggctttacagcgagcggatccagcagatgcagcgggcggagactcgggcatcagccaatgccccgcgccgccggcctcgggttctggcccaaccccagccatccccctgtctgccccaggagcaggcagagccagggctcctgcctgcctttggacacgtgctggtatgtgagctggccttcccactgacatgtgcccaggagtctgtccccctgggtcctgctgtctgggttcaagctgccatacctttgtcaaagcagggaggcagcccggatggccagggtctacatgtttccaatttgcctaagcaagaccttccgggcatccacgtttcagctgctacccttttgcctgagcaaggaggttcccggcatgtccaggctccagccgccacacctttgcccaagcaagaaggccccctgcacctccaggtgccggctcttacaactttctctgatcaaggccacccagaaatccaagttccagccaccactcctttgcctgagcatagaagtcacatggttataccagctccatccaccgccttttgtcctgagcagggacactgtgcggacatccacgttcccaccactccagctttgcccaaggagatttgttctgatttcacagtttcagtcaccacccctgtgcccaagcaagaaggtcacctagacagcgagagcccaaccaatatcccactgacaaagcaaggaggttccagggatgttcagggcccagaccctgtctgcagtcaacccatccagcctttgtcttggcatggaagcagcctggatccccagggcccaggcgacaccctaccacccttgccatgtcacctcccagaccttcagattccaggtacctcacctttgcctgcacatggaagccacctggaccatcggatcccagccaacgccccactgtctttgtcccaggagctcccagacactcaggttccagctaccacacctttgcccctgccacaagtcctcacagacatctgggtccaagccctcccaacttcacccaagcagggaagcctcccagacatccagggtccagcggctgcacctccacttccggagccaagccttacagatacacaggtccaaaaactcacaccttcgttggagcagaagagcctcatagatgcccatgttccagctgccacacctttacctgagagaggaggctctctagacattcagggcctctcacccaccccagttcagaccaccatggttttgtccaaaccaggaggctccttagcctctcacgttgccaggttggagtcttcagacttgacgccacctcatagtcccccaccttccagccgtcagctcctgggccccaatgcagctgccctctccagatacctggcagcctcatatatcagccagagcctggctcggcggcaggggcctgggggaggggcccccgcagcctcccggggctcctggtcctctgctcccacgtcacgggcatcttcgccgcccccccagccccagccaccacctcccccagccaggcggctcagctatgccacgacggttaacatccacgtgggcgggggtgggcggctgcggccagccaaggcccaggtccggttgaaccaccctgctctcttggcctccacacaggaatctatgggccttcacagggcccagggggctcctgatgcccccttccacatgtgagccaggacatgaggcttccctgaagcaaggatttcagccagatgccatagaccctcagaacttgacctggaagtccagacactgaacgcaggcctcaaaactgctgcggccttccaactcctggtatctgcatcggcgaatggcccttcttgccttgatccacagggatggggaagggaggaatgtcattaatgttttgttaatactgattctttcatgcaatgatgtgtattttcccattctggaggctgtgggagatgacaagacaatgaatgggaaggtctgacacagaacaaatcagcggttctgaaagcttggggaatctcagactcctttgagaattattggaaaatggacccactataacttggcgtgtgtgtgaactgcttgatgcccatccaggaaagccaagttaagaagctttgcttcaagtagacactagaaatccattcccttggcaatttatacagttcacgtctcccaccatccgttcatctcacccaccctgccatctctccacctatccatctggctattgctccatctagctttcccgctccatctacccatcttccaatccatcatctcacgtatctgccttgcttatccaactgtctgccttattcacccacccatccctttatcattctaaccccatctggcattccatccctccatttatccatcttcccacttacccatcttctccatccagcactccgttcatcagtccgtctctccctccatatttccatctgtccattcatccactcattttgccatccatacatattcacccagccatctcccaatccatcgacataccccatccctccctcactggactctccggggtcttagtactatgatacttcagagacaattccatgctgatacgggggagatcaattttggggctctgggataagtctgtcccacatctgtctgatttcccttggcatccttcccgtcagttcctcttgaatatcccagttcttgtacccactcacatacctcagatcccttcactcctccccgcagtttgcagcctctacaattcatccacatgctccctcccccagcaaaataattcaggtcgtggagacaaaaggcttttatgttaggttctgtctgcccccttgttccagcagtggtatgcccagtgagaggcacaatttaaacggtttctttggtgatgatattagctactttcatcaaatacttagcctcttgtgctttagcacattatttatgtaagctcccctaggattctctgaagcaccctggtgtcctggctgtgaattcaagtcccatctttacttatttggtgtgggtcctccctctgagccggttttctcatctacaaaatgaagacaacagtacttccctcctgggatcattgaaagatttagggagcatatccttccacttcccaaacatatttgaacctctgacttgcttaggagcatcattcaaatcacagatcccccagtatctagtcccaacctattgaatcaggatccccagggaaggaggagcttgggaatctgatttttttttttttttttagataaagtctcactctgtcacccaggcttgagtgcagtggcaaaatcttggctcattgcaacctccacctcctgggttcaagcaattctcatgcctcagcttcccgacatagctgggattataggcgtgcaccaccatgcccagctaatttttcgttgttgttgttgttgttttgtttttgagacagagtctcgctctgttgcccaggctggagtacagtggcacgatcttggctcactgcaagctccgcttcccgggttcacgccattctcctgcctcagcctcccgagtagctgggaccacaggtgcccgccaccacgcccggctaatttttttggtatttttagtagagacggggttttaccatgttagccaggatggtctcgatctcctgacctcgtgatcctcccgcctcggcctcccaaagtgctggcattacaggcgtgagccatcattcctggctgggaatccgaatttttttttttttttagacggagtttcgctcttgttgcccaggctggagttcaatagcatgatctcggctcactgcaacctctgcctcccaggttcaagtgattctcctgcctctagctgggattgcaggcgcccacgaccacgcccagctaatttttgtattttgtagtagagacgggatttcgccatattggccaggccatagtggtcttggactcctgacctcaggtgatccgcccacctcggcctcccaaagtgttgggtttacaggcgtgagctaccataccctgcccaggaatctgaatttttagcaatcagttagcagcaaataagctgagatttcctgggtactaagcacatactatgagcattacagccgctttatataagctcgttcactgtcctcattacattcctaatatgcaagtgagcatgttttttaatcctcagtctagaggtgaggaaactgaggcaggcacagagaggctaagggatttgcctagtcgcacagctaggaaggtgcagcactgagactcgaatccacacagcttggcttaagtctaccattaaatttgcctgtcctggccaggtgcggtggctcacgcctgtaatcccaacacttcgtgaggccaaggcaggtggatcacttgaagtgaggagttcgagaccacaccagcctggccaacatggtgaaatcccgtctttactaaaaatacaaaaaattagctgggcgtggtggtgggtgccggtaatcctagctactcaggaggctgaggcaggagaatcacttgaacctgggaggtggaggttgcagtgaaccgagattgcgccactagactccagcctgggagacgagcaaaactgtctcaaaaaaataaaatgaaatacataaataaatgtgcctatcctgtgccgggtgctgttcttgccagtggggatacatgagagaacactgccttgcccgcatgaggcttgtggcctggtactgtgcacacctcaggggattctgataattagctgagcacagttgccagcacagggcctggctcaataaatattagctgctggcttctgctca

SEQ ID NO: 166562 - DNA, 482 bp, Homo sapiens
  Payload ID: 12796
  Gene Symbol: PLEKHG2
  Gene Name: pleckstrin homology domain containing, family G (with RhoGef domain) member 2
  ENST ID: ENST00000438123
  CDS Start-End: 102-482
tggaggggtgtgggaaggcgctggggaggctgtggctgtggggacggcgatcggggttcggagagaccggccggagggggactctgctgggccgctcagccatgcctgagggagcccaaggactgagcctctccaaacctagcccaagcctcgggtgtggccgaagaggtgaagtgtgtgactgtggcaccgtgtgtgagactcggacagcagctcctgcagcccccaccatggcctccccccgaggttctgggagctccacatccctgagcacagtgggctctgagggggatccagcccctgggcccactccagcctgctcagcctccaggccagagccccttccagggcctcccatccgcctacatctctctccggtggggatcccaggttcagccagaccctcaaggctggagcgtgtggcccgggagatcgtggagacagaacgggcctatgtcagggacctccgcagcatcgtggag

SEQ ID NO: 166563 - DNA, 3898 bp, Homo sapiens
  Payload ID: 12796
  Gene Symbol: PLEKHG2
  Gene Name: pleckstrin homology domain containing, family G (with RhoGef domain) member 2
  ENST ID: ENST00000458508
  CDS Start-End: 127-3840
gaagttcacgcccctgagtctgggctccgcacctccctggggaccgcgtcggggtcgcgcaggagccgggctgcctcgagccggggctggaggctccccgggaggactctgctgggccgctcagccatgcctgagggagcccaaggactgagcctctccaaacctagcccaagcctcgggtgtggccgaagaggtgaagtgtgtgactgtggcaccgtgtgtgagactcggacaggttcagccagaccctcaaggctggagcgtgtggcccgggagatcgtggagacagaacgggcctatgtcagggacctccgcagcatcgtggaggactacctgggccctctgctggacggcggggtcctggggctgagcgtggagcaggtgggcacgctgtttgccaacattgaggacatctacgagttcagcagcgagctcctggaggacttggagaacagcagcagcgccgggggtattgccgagtgcttcgtgcagaggagcgaggattttgacatctacacattgtactgcatgaactacccgagctccctggccctgctccgggagctgtcgttgtctccgccagcagccctgtggctgcaggagcgccaggcccagcttcgccactcgctgcccctgcagagcttcctgctgaaacctgtccagcgcattctcaagtaccatctgctgctgcaggaactagggaagcactgggcggagggcccaggcactgggggtcgcgagatggtggaggaagctattgtgtccatgacagcggttgcctggtacatcaacgacatgaagcgcaagcaggagcatgcagcgcgcctccaggaagtgcagcggcggctgggtggctggaccggaccagagctcagtgcttttggggaactggtgttggagggcgcgttccgaggaggcggagggggtggcccccggctacgagggggtgagcggctgctcttcctgttctctcggatgctgctggtggccaagcgcagggggctggagtacacctacaaaggccacatcttctgctgcaacctgagcgtgagcgagagtccccgagaccctctagggttcaaggtgtctgatctgaccattcccaagcacagacacctgctccaggccaagaaccaagaagagaagaggctgtggattcactgtctccagcgcctcttctttgagaaccaccctgcctccatccctgccaaggcaaagcaagttctccttgaaaacagcctgcattgtgcccccaaaagtaagcctgtcctagagcccctgacacccccacttgggtctcctcgacctcgagatgctagaagttttacccctgggcgaaggaacacagctccatctcctgggccctctgtgattcgccgaggccgcaggcagtctgagccggtgaaggacccttatgtcatgttcccacagaacgctaagcctggattcaagcacgctggcagcgaaggggaactctaccctccagaatctcagccaccagtttcaggctctgcaccccctgaggacctggaggatgctggacccccaacactggacccctctgggacctcaatcactgaagaaatcctggaactgctgaatcagcgaggccttcgagatccagggccgtccacccatgacattcccaagttccccggagactcccaggtgcctggcgacagcgaaaccctcacattccaagccctgcccagccgggactcttcagaagaggaggaggaggaagaggaagggctggagatggatgaacgggggccttccccactccacgtcctggaagggctcgaaagttccattgcagctgaaatgcccagcattccctgccttaccaaaattcctgacgtgcccaaccttcctgaaattcccagccgctgtgaaattcccgaaggttctcgccttcctagtctctctgacatttccgatgtttttgagatgccctgccttccagccatacctagtgtccccaacacccccagtctgtctagcactcccaccctctcctgtgactcctggctccaagggcctctgcaggaaccagctgaggctccagccaccaggagagaactgttttctgggagcaatcctgggaaactgggagagccgccttcaggaggcaaggcagggccagaggaggatgaagaaggggtatcattcacagacttccagccccaggatgtcacccaacatcagggattcccagatgagctggcattccgctcttgctcagaaatccggagcgcctggcaggcattggaacagggacagctggcccggccaggcttcccagagccactgctgatcctggaggattcggatctgggtggagacagcgggagcgggaaggcaggagccccgagttcagaaaggacggcgtcccgagtgcgagagctggcccggctttacagcgagcggatccagcagatgcagcgggcggagactcgggcatcagccaatgccccgcgccgccggcctcgggttctggcccaaccccagccatccccctgtctgccccaggagcaggcagagccagggctcctgcctgcctttggacacgtgctggtatgtgagctggccttcccactgacatgtgcccaggagtctgtccccctgggtcctgctgtctgggttcaagctgccatacctttgtcaaagcagggaggcagcccggatggccagggtctacatgtttccaatttgcctaagcaagaccttccgggcatccacgtttcagctgctacccttttgcctgagcaaggaggttcccggcatgtccaggctccagccgccacacctttgcccaagcaagaaggccccctgcacctccaggtgccggctcttacaactttctctgatcaaggccacccagaaatccaagttccagccaccactcctttgcctgagcatagaagtcacatggttataccagctccatccaccgccttttgtcctgagcagggacactgtgcggacatccacgttcccaccactccagctttgcccaaggagatttgttctgatttcacagtttcagtcaccacccctgtgcccaagcaagaaggtcacctagacagcgagagcccaaccaatatcccactgacaaagcaaggaggttccagggatgttcagggcccagaccctgtctgcagtcaacccatccagcctttgtcttggcatggaagcagcctggatccccagggcccaggcgacaccctaccacccttgccatgtcacctcccagaccttcagattccaggtacctcacctttgcctgcacatggaagccacctggaccatcggatcccagccaacgccccactgtctttgtcccaggagctcccagacactcaggttccagctaccacacctttgcccctgccacaagtcctcacagacatctgggtccaagccctcccaacttcacccaagcagggaagcctcccagacatccagggtccagcggctgcacctccacttccggagccaagccttacagatacacaggtccaaaaactcacaccttcgttggagcagaagagcctcatagatgcccatgttccagctgccacacctttacctgagagaggaggctctctagacattcagggcctctcacccaccccagttcagaccaccatggttttgtccaaaccaggaggctccttagcctctcacgttgccaggaatctatgggccttcacagggcccagggggctcctgatgcccccttccacatgtgagccaggacatgaggcttccctgaagcaaggatttcagccagatgccatagaccctcagaacttgacctggaagtccagacactgaacgcaggcctcaaaactgctgcggccttccaactcctggtatctgcatcggcgaatgg

SEQ ID NO: 166564 - DNA, 871 bp, Homo sapiens
  Payload ID: 12796
  Gene Symbol: PLEKHG2
  Gene Name: pleckstrin homology domain containing, family G (with RhoGef domain) member 2
  ENST ID: ENST00000451354
  CDS Start-End: 276-871
agacaaacgggactcgcagcttctgcgcctcctgctccgctcactcttctttgtctcagcctttccatctttttcgccaggttctctctccttgtccccttctttctgtcactttgtgcctcccccattagttactcccaggggcccctccctggatttacaccacgctcctaattcccagcccccatctgtgagtctgggcggcggagaggcccatggggtcctgatatccaagaaggggctctttctgcaggactctgctgggccgctcagccatgcctgagggagcccaaggactgagcctctccaaacctagcccaagcctcgggtgtggccgaagaggtgaagtgtgtgactgtggcaccgtgtgtgagactcggacagcagctcctgcagcccccaccatggcctccccccgaggttctgggagctccacatccctgagcacagtgggctctgagggggatccagcccctgggcccactccagcctgctcagcctccaggccagagccccttccagggcctcccatccgcctacatctctctccggtggggatcccaggttcagccagaccctcaaggctggagcgtgtggcccgggagatcgtggagacagaacgggcctatgtcagggacctccgcagcatcgtggaggactacctgggccctctgctggacggcggggtcctggggctgagcgtggagcaggtgggcacgctgtttgccaacattgaggacatctacgagttcagcagcgagctcctggaggacttggagaacagcagcagcgccgggggtattgccgagtgcttcgtgcagaggagcgaggattttgacatctacacattgtactgcatgaactacccgag

SEQ ID NO: 166565 - DNA, 527 bp, Homo sapiens
  Payload ID: 12796
  Gene Symbol: PLEKHG2
  Gene Name: pleckstrin homology domain containing, family G (with RhoGef domain) member 2
  ENST ID: ENST00000596443
  CDS Start-End: 1-348
tctcctcgacctcgagatgctagaagttttacccctgggcgaaggaacacagctccatctcctgggccctctgtgattcgccgaggccgcaggcagtctgctaagcctggattcaagcacgctggcagcgaaggggaactctaccctccagaatctcagccaccagtttcaggctctgcaccccctgaggacctggaggatgctggacccccaacactggacccctctgggacctcaatcactgaagaaatcctggaactgctgaatcagcgaggccttcgagatccaggggaatctatgggccttcacagggcccagggggctcctgatgcccccttccacatgtgagccaggacatgaggcttccctgaagcaaggatttcagccagatgccatagaccctcagaacttgacctggaagtccagacactgaacgcaggcctcaaaactgctgcggccttccaactcctggtatctgcatcggcgaatggcccttcttgccttgatccacagggatggggaaggga

SEQ ID NO: 166566 - DNA, 578 bp, Homo sapiens
  Payload ID: 12796
  Gene Symbol: PLEKHG2
  Gene Name: pleckstrin homology domain containing, family G (with RhoGef domain) member 2
  ENST ID: ENST00000596339
  CDS Start-End: 1-462
acacctttgcccctgccacaagtcctcacagacatctgggtccaagccctcccaacttcacccaagcagggaagcctcccagacatccagggtccagcggctgcacctccacttccggagccaagccttacagatacacaggtccaaaaactcacaccttcgttggagcagaagagcctcatagatgcccatgttccagctgccacacctttacctgagagaggaggctctctagacattcagggcctctcacccaccccagttcagaccaccatggttttgtccaaaccaggaggctccttagcctctcacgttgccaggaatctatgggccttcacagggcccagggggctcctgatgcccccttccacatgtgagccaggacatgaggcttccctgaagcaaggatttcagccagatgccatagaccctcagaacttgacctggaagtccagacactgaacgcaggcctcaaaactgctgcggccttccaactcctggtatctgcatcggcgaatggcccttcttgccttgatccacagggatggggaagggaggaatgtcattaatgttttgtt

SEQ ID NO: 166567 - DNA, 347 bp, Homo sapiens
  Payload ID: 12796
  Gene Symbol: PLEKHG2
  Gene Name: pleckstrin homology domain containing, family G (with RhoGef domain) member 2
  ENST ID: ENST00000594161
  CDS Start-End: 1-125
ggatccccagggcccaggcgacaccctaccacccttgccatgtcacctcccagaccttcagattccaggaatctatgggccttcacagggcccagggggctcctgatgcccccttccacatgtgagccaggacatgaggcttccctgaagcaaggatttcagccagatgccatagaccctcagaacttgacctggaagtccagacactgaacgcaggcctcaaaactgctgcggccttccaactcctggtatctgcatcggcgaatggcccttcttgccttgatccacagggatggggaagggaggaatgtcattaatgttttgttaatactgattctttcatgcaa

SEQ ID NO: 166568 - DNA, 416 bp, Homo sapiens
  Payload ID: 12796
  Gene Symbol: PLEKHG2
  Gene Name: pleckstrin homology domain containing, family G (with RhoGef domain) member 2
  ENST ID: ENST00000594124
  CDS Start-End: 1-254
ctttacctgagagaggaggctctctagacattcagggcctctcacccaccccagttcagaccaccatggttttgtccaaaccaggaggctccttagcctctcacgttgccaggaatctatgggccttcacagggcccagggggctcctgatgcccccttccacatgtgagccaggacatgaggcttccctgaagcaaggatttcagccagatgccatagaccctcagaacttgacctggaagtccagacactgaacgcaggcctcaaaactgctgcggccttccaactcctggctgtgggagatgacaagacaatgaatgggaaggtctgacacagaacaaatcagcggttctgaaagcttggggaatctcagactcctttgagaattattggaaaatggacccactataacttgg

SEQ ID NO: 166569 - DNA, 431 bp, Homo sapiens
  Payload ID: 12796
  Gene Symbol: PLEKHG2
  Gene Name: pleckstrin homology domain containing, family G (with RhoGef domain) member 2
  ENST ID: ENST00000595920
  CDS Start-End: 286-431
cctacctagaagacttaggaatgtgggtccccagcgccgccatctgagactccagagtcgaggctcctagcatcccctacgtagaacactgagaaattccgactgcgggaccccagtctccgagagaccccagattctattcctggagcctgagagcccgaagttcacgcccctgagtctgggctccgcacctccctggggaccgcgtcggggtcgcgcaggagccgggctgcctcgagccggggctggaggctccccgggaggactctgctgggccgctcagccatgcctgagggagcccaaggactgagcctctccaaacctagcccaagcctcgggtgtggccgaagaggtgaagtgtgtgactgtggcaccgtgtgtgagactcggacaggtgagcctagaggcaggggcggcggagcctgtggggc

SEQ ID NO: 166570 - DNA, 422 bp, Homo sapiens
  Payload ID: 12796
  Gene Symbol: PLEKHG2
  Gene Name: pleckstrin homology domain containing, family G (with RhoGef domain) member 2
  ENST ID: ENST00000598238
  CDS Start-End: 1-287
ggttccagggatgttcagggcccagaccctgtctgcagtcaacccatccagcctttgtcttggcatggaagcagcctggatccccagggcccaggcgacaccctaccacccttgccatgtcacctcccagaccttcagattccaggaatctatgggccttcacagggcccagggggctcctgatgcccccttccacatgtgagccaggacatgaggcttccctgaagcaaggatttcagccagatgccatagaccctcagaacttgacctggaagtccagacactgaacgcaggcctcaaaactgctgcggccttccaactcctggtatctgcatcggcgaatggcccttcttgccttgatccacagggatggggaagggaggaatgtcattaatgttttgttaatactgattctttcatgc

SEQ ID NO: 166571 - DNA, 530 bp, Homo sapiens
  Payload ID: 12796
  Gene Symbol: PLEKHG2
  Gene Name: pleckstrin homology domain containing, family G (with RhoGef domain) member 2
  ENST ID: ENST00000600210
  CDS Start-End: 1-312
gaggattcggatctgggtggagacagcgggagcgggaaggcaggagccccgagttcagaaaggacggcgtcccgagtgcgagagctggcccggctttacagcgagcggatccagcagatgcagcgggcggagactcgggcatcagccaatgccccgcgccgccggcctcgggttctggcccaaccccagccatccccctgtctgccccaggagcaggcagagccagggctcctgcctgcctttggacacgtgctggaatctatgggccttcacagggcccagggggctcctgatgcccccttccacatgtgagccaggacatgaggcttccctgaagcaaggatttcagccagatgccatagaccctcagaacttgacctggaagtccagacactgaacgcaggcctcaaaactgctgcggccttccaactcctggtatctgcatcggcgaatggcccttcttgccttgatccacagggatggggaagggaggaatgtcattaatgttttgttaatactgattctttcat

SEQ ID NO: 166572 - DNA, 10351 bp, Homo sapiens
  Payload ID: 12797
  Gene Symbol: PLEKHG3
  Gene Name: pleckstrin homology domain containing, family G (with RhoGef domain) member 3
  Uniprot ID: A1L390
  ENST ID: ENST00000247226
  CDS Start-End: 148-3807
ctcagccccttcagagagcgactttcaaactcgcgcccgcgtcgcggcagcacctgggcagccccgcacgccgtgcgcgtcccgagcccgcggggcagctaccgctcgaatctccctggggtgccctccccaggcagcaatgccaggatgcctgtgtccacctccctccaccaggatggcagccaggagcggccggtgagcctgacctctaccacctcctcgtcgggctcctcctgtgacagtcgcagtgccatggaggagcccagcagctccgaggctcccgccaagaatggggcaggctccctgagaagccggcatctgcccaacagcaacaacaactccagcagctggttgaacgtgaaggggcccctctccccgttcaacagccgggcagcggcagggcctgcacaccacaagctcagctacctgggccgagtggtgcgggagatcgtggagacagagcgcatgtacgtacaggacctgcgcagcatcgtggaggactacctcttgaagatcattgacacacccgggctgctgaagccagaacaggtcagcgccctctttgggaacatagaaaatatctacgcgctgaacagccagctcctcagagacctggacagctgcaatagtgaccccgtggctgtggccagctgctttgtggaaaggagccaagagtttgatatctacactcagtattgcaacaattaccccaactccgtggccgccctgacggaatgcatgcgggacaagcagcaggccaagttctttcgggaccggcaggagctgctacagcactcgctgcccttgggctcctacctgctgaagccagtccagcgcatcctcaagtaccacctgctgctccaggaaattgccaagcattttgatgaagaagaggatggctttgaggtggtggaggatgccattgacaccatgacctgtgtggcctggtacatcaacgacatgaagaggaggcatgagcacgcggtccggctccaggagattcagtcactcctcatcaactggaaggggcccgacctgaccacctacggggagcttgtcctggagggcacattccgcgtgcatcgcgtgcgcaatgaaaggacctttttcctctttgacaaaacactgcttatcaccaagaagcggggcgatcactttgtctacaagggcaacatcccgtgctcctccctgatgctgatcgaaagcaccagagactccctgtgcttcactgtcacccactacaagcacagcaagcagcagtacagcatccaggccaagacagtggaggagaaacggaactggactcaccacatcaagaggctcatcctagagaaccaccatgccaccattccccagaaggccaaggaagccatcttggaaatggattcctattatcccaatcggtaccgctgcagcccagagcggctgaagaaggcttggtcctcccaggatgaggtgtccaccaatgtgcgccaggggcgccggcaatctgagccaaccaaacacctgctcaggcaactcaacgagaaagcccgagcagcaggaatgaagggaaaggggcgcagggagtctgaaagctccaggagcagcagaaggcccagtggccggtctccaaccagtactgagaagcgcatgagcttcgagtccatttcttccctgccagaggttgagccggaccctgaggctgggagtgagcaagaggtattttctgctgtggaagggcccagtgccgaggagacgccttcagacacagaatctccagaagtcctggagacacagcttgatgcccaccagggccttctggggatggaccccccaggtgacatggtggacttcgtggcagctgagagcactgaggaccttaaggccctgagcagcgaggaggaagaagaaatgggaggtgccgcccaggagcctgagagccttctgccaccctctgtgctggaccaggccagcgtcattgcggagcgatttgtcagcagcttctctcggcggagcagcgtggcacaggaggacagcaagtccagtggctttgggagcccgcggctggtcagccggagcagcagcgtgctcagcctggagggcagcgagaagggcctggcccggcatggcagtgccacagactccctcagctgtcagctctccccagaagtggacatcagtgtgggggtggccacagaggacagcccttctgtcaatgggatggagcccccaagcccaggctgcccagtggagcctgaccggtcttcctgcaagaagaaggaatcagcactctccacccgagaccggctgttgctagacaagattaagagctattatgaaaatgcagaacaccatgatgcaggcttcagcgtccgtcgccgggagagcctctcctacatccccaaaggactggtaagaaactccatctccaggttcaacagccttccccggccagacccagagccagtacctccagtggggagcaagagacaggtgggctcccggccgacttcgtgggccctgtttgagctcccaggaccaagccaggcagtcaaaggggacccacctcccatctcagatgctgagttccgcccatcttcagaaattgtgaagatctgggagggaatggagtcttccggagggagccctgggaaggggccaggccagggccaggccaatggctttgacctgcatgagccactcttcatcctggaggagcatgagctgggagccatcacagaggagtcggccactgcctccccggaaagctcctctcccactgaggggcgcagcccggcccacctggcccgggagctgaaagagctggtgaaggagctgagcagcagtacccagggggagctggtggccccactgcacccccgcatcgtgcagctctcccacgtaatggacagccacgtgagcgagcgcgtcaagaacaaggtctaccagctggcccgccagtacagcctccggatcaagagcaacaagccagtgatggccaggccaccactgcagtgggaaaaggtggcccctgagagggatgggaagagccccactgtgccctgtctacaggaagaggctggagagccattaggtggcaaaggtaagaggaagccggtgctgtctctatttgactatgagcagctgatggcccaggagcacagccctcccaagccctcctcggctggggagatgtcaccacagcgtttcttcttcaacccgtctgctgtcagccagaggaccacctcgcctgggggccggccctccgcccggagccccctcagccccacagagaccttcagctggcccgacgtccgtgagctctgctccaagtatgcctcccgcgatgaggcacgccgagcagggggcggccggccccgcggcccacccgtcaacaggagccactcggtgccggagaacatggtagagccacctctgtcgggcagggtgggccgctgccgcagcctgagcaccaagaggggccggggaggcggagaggctgcccaatcccctgggcctctgccccagagcaagccggatggaggcgagaccctgtatgtcactgcagacctcaccctggaggacaaccggcgggtgattgtcatggagaagggaccccttcccagccccactgcagggctggaggagagcagtggccagggaccaagctcaccggtggccctgctggggcaggttcaggacttccagcagtctgcagagtgccagccgaaggaagagggttccagggacccggcagacccgagccagcagggcagagtgagaaaccttagagagaagttccaggccttgaactctgtcggttgatgctgactcctgggggagggaggagtcatgttggaggttggggaagaacctgggcatccttcccctcaagcctgggctcatggagcccctgcccagggccctcaggtgggcggaaagtccatcccctccgcccttcaggaaggatgctcccgtgtgcaggggtctcctgcctgtgccatccactggggctcgagacaatttcccactcacctgtgaggccggtgtggctgcttcccttgtaaatagttgttctctggtaagaagccaaatatttaagctcacttcttcccagagagaggaagctctgctcaggcctccagcgttggctggccatggccacagccagatggaggagcccatccccaggagactcaggcagtggcctggagaggctttgttctgtaacggtgccttttcttagggtccaggcaggaatgaagccaataatttattgctttccattctgtggtatgatgtgcgtgtgcgtgagtgtgtggcccctgtttattcccctcctgtcaagaatgaagtggattcagttcaggtacttttgagggttgttgtgctgaccctgtggttgtcgctgatgtacacacatttcattatttgccaatggtgcaataaccactgctgaccaacccactatgtgtgaactccttcctaggcttggctggggtagggaaggttattcatgggccagggatgtcttagggagatggagacatggaggttgttccttccacactcaattgtcacttgggcttatgaaacataaggcacccgggtactggtgggggaggtggggcaggaggatgtgagggcgggctttttctttctgctgcctagactcccatgggcttctctgtctagcagcagcctgctgtcctgtctagggtagggggtcccgcatgccagccttttgctcttttccccaagggccagagttggaccaagaaaaagggaggtggtgaggtggatagactgtttttctcataagcagatgctcccagtatctggtgccttttgcgtttctctccggtccccaggaaacatcctagaagacaaggattttttttttttttttttttgagacagagtcttattctgtcacccaggctggagtgcaatggcgtgatcttggcttactgcaacctccgcctcccaggttcaagcaattctcgttgtctcagcctcccaggtcgctgggactacaggcatgagccaccacacccagctaattttttgtatttttagtagagacggggtttcgccgtgttgaccaggctggtctcgaacttctgacctcaggtgatccacccacctcggcctcccaaagtgctgggattacaggggtgagccactgcatgcggctgaaggtaaggattctaaactcggagactagaaatgtcctaaaggtgtctgcaacattggatgaggagtacaagtgcatttttctgggatgattcctccctttttatcacattctcagaagtatctttgattcagaagagttaggaatgcctccctatttcagttgggttttctgccctttctccacagaggtccagactcattttgcttaattttttttctagctggggcctgggaggtagaggcttcagggcctgggtggtagagctgcctgacaagtgttcagcagggctgctgggtcagggccctgtgggccttctgacccaacctgaagatgggtctgctaagtctaacaaggtcaagggaagatcagagggacccagattcttttttatcccccacttgaaacggagtcttgctctgtcgcccaggctggagcgcagtggtgcaatcttggctcactgcaacctccgcctccctgaccctcacactgtccagtgcccttgtggttactcagcatcatatcttgagactggcctggcaggagccagtgactgtggaatgaccacagaagattcagggcagctgccagaccaggggctatctctgccctgcgctgcttctgctcaagagaggttgtcactagcctctgatcttcccttgaagaacccgactggggctcttcagagggtggggcccaggaagttgtagttaaccccttccccaggcagtccttacacggccatctaggtatgcctgggaaccttgcaccaggtcggtggttctcactggctgcccattggaattatctggggagccttctggaaacgcagtgcttacattccatctccctagaccaacagaaactgccctctggaggtgaatcccaggcttagagattctgatgattctgcggtccagtgagtgctgagatctgtcctgagctctgtggggaggggcctggactgatcactgcttggaaatgattttgccctacagtaggccttcaagttgatcaaatgcatgaatgagcaagcttttcttggagtttgtgatgaagcccaggaaccgggtgcttgcagtcgtcccataaggctcccagggacaagctagagaatctggctgtccctctgtctccatggtgccagccctcttaggctcagttcaaagggagaggaggctagttaaataagaaactgagagaaacatggagcattattgatttattagaaaaactagtaaatgggtttcctctggttggtggaagcacggttgagcaggtggaggacaggacccagctggccccagggccagccccagattgcatggtctgtgcccaacagggttgcattcctctgcagccgccgcctcctcatttcctccctgagcttgtttgtccaagccaccaagccatgtggtcccgctggcttcatcctcctctggattcctgcccccctcccatgaagggaggaagaggattcagggtcagcctaggggaccctggctccctccgataggcaggaaggaggagggatgcggaggagaggctgagccttccacgggcctcctgttaggggtgttggtggaggccaggttggggagggaagcctaaggaccctccacacctcccacagccagagtcagttgaggctgggacaaaggggaaggagagagggaaggaggaccgcctgaccttgcccagaaggagcttcctctaaactgccctgggaaggaagcctggtatgctggtgtggactggagctgtgtcaacctcgtttgggaatactgtcaaaagactgtagagtagaataaggagagaaaaaaaaaaaaagaccttgctagggcactgggagagcttagccctggtgtggcacacacagggtctcccaaagctggatgcctgcattttcagtctagttggtcgaatgtcttggagcctgggtgacaggagggatgtgtggggagctggcaacagaatggtcacatgcagctggctgccctggaccaggccaggggacctggggtggtgagatgctagctcttccactagagcccttcctttctcgggtctgtggagttgcttgctggaaatgcctcacttcaggtgctgatttggcacacgtggaagggggagggtgggcccttgtccctaggctccctaaagactggcccagggaaacagttgagggagatgtttgccaccatctgcccttcagcaaggaacctgctctctgccccagaggaggacatgcctgcaagtgcaccaaaggcctactttattgctaggtgagtgcagtcacctcactgccttggtttccccagatacagaaagaggctggtgagtgatacacactaggttccctgtatagggtcatatgtaccaaagccaaatgaagaccttgctcaccagggcgggaacctggggatgtcaggctccatcggatgacgtcttccttcctgtggctcctgcctgctgcagttggtgtcaccctgacatatagtgtcagggccacagggtggaactgatttctgccggcactggtcagcactcagggttcctcagggggcctcattctggatgcctgcccctgtggcttctacctgaacctcacccacttcatctccatggaactaaggtccttctcacggggaaggtgatagaaacttgactgcaggccctggggactttcatggtttccttgggggaaaatgcctgctgccctccgccctcccccccacccccgacccgcttgactgctctcttggacctaaccctagtttgatactgggccagaactgtgttgctttcggagtagagtggtggggaaaatatggaatgagctttctcttcctccagaagtatgacctgagcagcaaggggaaggccattcctggggacgttggttgcagagcttctggtgctcagggctggagggtggtagatatttgacctctgtactcatgtgaccccctccccgccaagacctggggccaggacgtggagaagctgatcaaggggtaccacaccttcatggctctggccctgacatttgtcccagttgtgcaggagtagctgtcacatgggtggtgataccaagacatggctgcgtctgccaccccgagaaaacagatgatcaactttactgtctgcccagccattaccctccaaagtcccagctgcagacaggatgcaattgagcatttggctttgggatgctttactgcaggtgcggggggtatccatcttatatctgggggcccacactgtcccgtagggggcctatgtctgttggatattgctggtttggctgccactgggagtggggcgagggtcccagcattgagagggagagccttaggcagtgttgtgacgcacctgtcactccttcagatcagagccctgtgccctagccacggttttcaatgaggaatggtctgaccttgctgcccttcctgggaccgcctgtggtggcacaaagggtgctagaggcactcagccaggccctgccaaccgtgggagggtaccctttgatctggggggagaagcagagaggagggatgtggtggcccctgaagtgagagtcccagttctgcggaagcccagtgggaaggaggctggcagctcccaaggccctgcacccagtctggtcccctcagccccccagagcccctggcccagagctagggctttgtgggccacctgaaggctccttcctcatgcccctagggggctggccatgcatttccagtgtcttcttcctttcccctttccctggctgccaccaggtgggaggtgacccgaagcaagacttgctttaggaacgggcagcgtttgaagaaccccatcagccttctccagctcttttttttttttttttttggttgggggtaaggggcctgtgccccctcggctcaggaggagggtgggagaggagggcgtgtgcctcagagaaccgtttcctgcccccaggcctggaggccccaaaggcgccagaggagctgggagcccctgtccctggagcggagccagcgcgggcgagggcatggagggggcgtcggcccaggacacgcgggcgaaggcagcttttgcagtgcagcgtggggcccgggggcccggcccgcgactcgactcatctcgattcgaccggcgggcggcggcgagaggaggccaaggcctgggctgcccggtctctgcgcgtcccgactccgccgcgcccgccagccccacctgctacttctttttggggaagaagctgaatctcttctccttgtctttcttgccgaggctggcgtcggggccggagagggaaggcaggggcaggctctgcgccttgacgcggatgctctgggactcgttgatggcggtgctcacgccctgcagccaggacagcatctcctcctgcggggcggagggtcacggtggagtctggaggcccacagccccccacctcccgggccaggcaacaatggtgggggctcttgggactgccccttctgagggggcctccagggcaagcggcctggggtcctccacctacccccttcttagccaggtctgggctaggctgcccgcgcttacctcatccttgccatggaagagccactcgctgccattactcagcctaggaggacaaagggtttcctgtcatggagacacctctggagggggcgctgggcagagggctggctctgatcccacaataccctgagccgaacatccagacccctctcaggcagcccagcactttctgagaggtcaaagtctggaccatcagcctctttgatttgaaaaacccctgaggagcagctcaggcctggcactggtcccctacagagggcctctgccctgccactaatgccaaatcaagccatcaacccgagctttcaaaggccaggaaggcctcacctcagcttaaagacgtgcttcttcttcttgtagttggcagcaatctcacagatggcatgtctcagggccaggggttcctccccatggtagggcatccccagggccaggttcttggcatccttgtagaaggttagctcactgttcctgagcacacagtacaggttgttccaggacctgcaaagatgcagacaggcaggtcacccacatcctgatatggtatctctagagtcaattcctatagcttcaccattaaaaaaaattacacca

SEQ ID NO: 166573 - DNA, 4397 bp, Homo sapiens
  Payload ID: 12797
  Gene Symbol: PLEKHG3
  Gene Name: pleckstrin homology domain containing, family G (with RhoGef domain) member 3
  Uniprot ID: A1L390
  ENST ID: ENST00000394691
  CDS Start-End: 270-3761
gctcgacttcctgccgggcgctggcaagccgcgcgctgcctggggtctccgggggccgcgcttgcagctggccgagtccgggccagctgaggggctggcggtgggcgggagcggtcggcggcctcagccccttcagagagcgactttcaaactcgcgcccgcgtcgcggcagcacctgggcagccccgcacgccgtgcgcgtcccgagcccgcggggcagctaccgctcgaatctccctggggtgccctccccaggcagcaatgccaggatgcctgtgtccacctccctccaccaggatggcagccaggagcggccggtgagcctgacctctaccacctcctcgtcgggctcctcctgtgacagtcgcagtgccatggaggagcccagcagctccgaggctcccgccaagaatggggcaggctccctgagaagccggcatctgcccaacagcaacaacaactccagcagctggttgaacgtgaaggggcccctctccccgttcaacagccgggcagcggcagggcctgcacaccacaagctcagctacctgggccgagtggtgcgggagatcgtggagacagagcgcatgtacgtacaggacctgcgcagcatcgtggagagccaagagtttgatatctacactcagtattgcaacaattaccccaactccgtggccgccctgacggaatgcatgcgggacaagcagcaggccaagttctttcgggaccggcaggagctgctacagcactcgctgcccttgggctcctacctgctgaagccagtccagcgcatcctcaagtaccacctgctgctccaggaaattgccaagcattttgatgaagaagaggatggctttgaggtggtggaggatgccattgacaccatgacctgtgtggcctggtacatcaacgacatgaagaggaggcatgagcacgcggtccggctccaggagattcagtcactcctcatcaactggaaggggcccgacctgaccacctacggggagcttgtcctggagggcacattccgcgtgcatcgcgtgcgcaatgaaaggacctttttcctctttgacaaaacactgcttatcaccaagaagcggggcgatcactttgtctacaagggcaacatcccgtgctcctccctgatgctgatcgaaagcaccagagactccctgtgcttcactgtcacccactacaagcacagcaagcagcagtacagcatccaggccaagacagtggaggagaaacggaactggactcaccacatcaagaggctcatcctagagaaccaccatgccaccattccccagaaggccaaggaagccatcttggaaatggattcctattatcccaatcggtaccgctgcagcccagagcggctgaagaaggcttggtcctcccaggatgaggtgtccaccaatgtgcgccaggggcgccggcaatctgagccaaccaaacacctgctcaggcaactcaacgagaaagcccgagcagcaggaatgaagggaaaggggcgcagggagtctgaaagctccaggagcagcagaaggcccagtggccggtctccaaccagtactgagaagcgcatgagcttcgagtccatttcttccctgccagaggttgagccggaccctgaggctgggagtgagcaagaggtattttctgctgtggaagggcccagtgccgaggagacgccttcagacacagaatctccagaagtcctggagacacagcttgatgcccaccagggccttctggggatggaccccccaggtgacatggtggacttcgtggcagctgagagcactgaggaccttaaggccctgagcagcgaggaggaagaagaaatgggaggtgccgcccaggagcctgagagccttctgccaccctctgtgctggaccaggccagcgtcattgcggagcgatttgtcagcagcttctctcggcggagcagcgtggcacaggaggacagcaagtccagtggctttgggagcccgcggctggtcagccggagcagcagcgtgctcagcctggagggcagcgagaagggcctggcccggcatggcagtgccacagactccctcagctgtcagctctccccagaagtggacatcagtgtgggggtggccacagaggacagcccttctgtcaatgggatggagcccccaagcccaggctgcccagtggagcctgaccggtcttcctgcaagaagaaggaatcagcactctccacccgagaccggctgttgctagacaagattaagagctattatgaaaatgcagaacaccatgatgcaggcttcagcgtccgtcgccgggagagcctctcctacatccccaaaggactggtaagaaactccatctccaggttcaacagccttccccggccagacccagagccagtacctccagtggggagcaagagacaggtgggctcccggccgacttcgtgggccctgtttgagctcccaggaccaagccaggcagtcaaaggggacccacctcccatctcagatgctgagttccgcccatcttcagaaattgtgaagatctgggagggaatggagtcttccggagggagccctgggaaggggccaggccagggccaggccaatggctttgacctgcatgagccactcttcatcctggaggagcatgagctgggagccatcacagaggagtcggccactgcctccccggaaagctcctctcccactgaggggcgcagcccggcccacctggcccgggagctgaaagagctggtgaaggagctgagcagcagtacccagggggagctggtggccccactgcacccccgcatcgtgcagctctcccacgtaatggacagccacgtgagcgagcgcgtcaagaacaaggtctaccagctggcccgccagtacagcctccggatcaagagcaacaagccagtgatggccaggccaccactgcagtgggaaaaggtggcccctgagagggatgggaagagccccactgtgccctgtctacaggaagaggctggagagccattaggtggcaaaggtaagaggaagccggtgctgtctctatttgactatgagcagctgatggcccaggagcacagccctcccaagccctcctcggctggggagatgtcaccacagcgtttcttcttcaacccgtctgctgtcagccagaggaccacctcgcctgggggccggccctccgcccggagccccctcagccccacagagaccttcagctggcccgacgtccgtgagctctgctccaagtatgcctcccgcgatgaggcacgccgagcagggggcggccggccccgcggcccacccgtcaacaggagccactcggtgccggagaacatggtagagccacctctgtcgggcagggtgggccgctgccgcagcctgagcaccaagaggggccggggaggcggagaggctgcccaatcccctgggcctctgccccagagcaagccggatggaggcgagaccctgtatgtcactgcagacctcaccctggaggacaaccggcgggtgattgtcatggagaagggaccccttcccagccccactgcagggctggaggagagcagtggccagggaccaagctcaccggtggccctgctggggcaggttcaggacttccagcagtctgcagagtgccagccgaaggaagagggttccagggacccggcagacccgagccagcagggcagagtgagaaaccttagagagaagttccaggccttgaactctgtcggttgatgctgactcctgggggagggaggagtcatgttggaggttggggaagaacctgggcatccttcccctcaagcctgggctcatggagcccctgcccagggccctcaggtgggcggaaagtccatcccctccgcccttcaggaaggatgctcccgtgtgcaggggtctcctgcctgtgccatccactggggctcgagacaatttcccactcacctgtgaggccggtgtggctgcttcccttgtaaatagttgttctctggtaagaagccaaatatttaagctcacttcttcccagagagaggaagctctgctcaggcctccagcgttggctggccatggccacagccagatggaggagcccatccccaggagactcaggcagtggcctggagaggctttgttctgtaacggtgccttttcttagggtccaggcaggaatgaagccaataatttattgctttccattctgtggtatgatgtgcgtgtgcgtgagtgtgtggcccctgtttattcccctcctgtcaagaatgaagtggattcagttcaggtacttttgagggttgttgtgctgaccctgtggttgtcgctgatgtacacacatttcattatttgccaatggtgcaataaccactgctgacc

SEQ ID NO: 166574 - DNA, 635 bp, Homo sapiens
  Payload ID: 12797
  Gene Symbol: PLEKHG3
  Gene Name: pleckstrin homology domain containing, family G (with RhoGef domain) member 3
  ENST ID: ENST00000555982
  CDS Start-End: 70-635
ccatgctgtctcgggaggcggtgatagcagaatctccctggggtgccctccccaggcagcaatgccaggatgcctgtgtccacctccctccaccaggatggcagccaggagcggccggtgagcctgacctctaccacctcctcgtcgggctcctcctgtgacagtcgcagtgccatggaggagcccagcagctccgaggctcccgccaagaatggggcaggctccctgagaagccggcatctgcccaacagcaacaacaactccagcagctggttgaacgtgaaggggcccctctccccgttcaacagccgggcagcggcagggcctgcacaccacaagctcagctacctgggccgagtggtgcgggagatcgtggagacagagcgcatgtacgtacaggacctgcgcagcatcgtggaggactacctcttgaagatcattgacacacccgggctgctgaagccagaacaggtcagcgccctctttgggaacatagaaaatatctacgcgctgaacagccagctcctcagagacctggacagctgcaatagtgaccccgtggctgtggccagctgctttgtggaaaggagccaagagtttgatatctacactcagtattgcaacaattaccccaa

SEQ ID NO: 166575 - DNA, 554 bp, Homo sapiens
  Payload ID: 12797
  Gene Symbol: PLEKHG3
  Gene Name: pleckstrin homology domain containing, family G (with RhoGef domain) member 3
  ENST ID: ENST00000554088
  CDS Start-End: 367-554
agtatcccctgtgcttaattgctggaggtttgtgcaggtcctcagccctgtggcgctcacctcccagggctgtggcctgggtccctacccagcggggacctgcagaattgtgtcgggaagttgcatttcctgggctagggccccccagcaatcaggaatgagagaaatgcagaaagtatgacccacacgcagaactggttctgaatagaacatttattgacgaagttttgcaggaggcggcgggcgctttaattcccgaggctgttggtggcagctcgctgctcaccccaagcctgttaactgctaggttgccggtgctggggacaatgcggctgcccggcccctcgccaccctcgtggtgcccggatgggagctctcctgaggaaagcgaatctccctggggtgccctccccaggcagcaatgccaggatgcctgtgtccacctccctccaccaggatggcagccaggagcggccggtgagcctgacctctaccacctcctcgtcgggctcctcctgtgacagtcgcagtgccatggaggagcccagcagctc

SEQ ID NO: 166576 - DNA, 3106 bp, Homo sapiens
  Payload ID: 12797
  Gene Symbol: PLEKHG3
  Gene Name: pleckstrin homology domain containing, family G (with RhoGef domain) member 3
  Uniprot ID: A1L390
  ENST ID: ENST00000471182
  CDS Start-End: 208-2466
tttcaggtctctctggaggacctgacagggcatgaaggcaacgagaagggggctgggccggagcccccaggctcagaggaggaggaggaggagcaggaggagagcctggcggtggcggagcaggtagccgactttgccagctccctgctggccgccctccactgctggcactatcgggccaacgctttacttttctcccggggcgctatgggaaaggggcgcagggagtctgaaagctccaggagcagcagaaggcccagtggccggtctccaaccagtactgagaagcgcatgagcttcgagtccatttcttccctgccagaggttgagccggaccctgaggctgggagtgagcaagaggtattttctgctgtggaagggcccagtgccgaggagacgccttcagacacagaatctccagaagtcctggagacacagcttgatgcccaccagggccttctggggatggaccccccaggtgacatggtggacttcgtggcagctgagagcactgaggaccttaaggccctgagcagcgaggaggaagaagaaatgggaggtgccgcccaggagcctgagagccttctgccaccctctgtgctggaccaggccagcgtcattgcggagcgatttgtcagcagcttctctcggcggagcagcgtggcacaggaggacagcaagtccagtggctttgggagcccgcggctggtcagccggagcagcagcgtgctcagcctggagggcagcgagaagggcctggcccggcatggcagtgccacagactccctcagctgtcagctctccccagaagtggacatcagtgtgggggtggccacagaggacagcccttctgtcaatgggatggagcccccaagcccaggctgcccagtggagcctgaccggtcttcctgcaagaagaaggaatcagcactctccacccgagaccggctgttgctagacaagattaagagctattatgaaaatgcagaacaccatgatgcaggcttcagcgtccgtcgccgggagagcctctcctacatccccaaaggactggtaagaaactccatctccaggttcaacagccttccccggccagacccagagccagtacctccagtggggagcaagagacaggtgggctcccggccgacttcgtgggccctgtttgagctcccaggaccaagccaggcagtcaaaggggacccacctcccatctcagatgctgagttccgcccatcttcagaaattgtgaagatctgggagggaatggagtcttccggagggagccctgggaaggggccaggccagggccaggccaatggctttgacctgcatgagccactcttcatcctggaggagcatgagctgggagccatcacagaggagtcggccactgcctccccggaaagctcctctcccactgaggggcgcagcccggcccacctggcccgggagctgaaagagctggtgaaggagctgagcagcagtacccagggggagctggtggccccactgcacccccgcatcgtgcagctctcccacgtaatggacagccacgtgagcgagcgcgtcaagaacaaggtctaccagctggcccgccagtacagcctccggatcaagagcaacaagccagtgatggccaggccaccactgcagtgggaaaaggtggcccctgagagggatgggaagagccccactgtgccctgtctacaggaagaggctggagagccattaggtggcaaaggtaagaggaagccggtgctgtctctatttgactatgagcagctgatggcccaggagcacagccctcccaagccctcctcggctggggagatgtcaccacagcgtttcttcttcaacccgtctgctgtcagccagaggaccacctcgcctgggggccggccctccgcccggagccccctcagccccacagagaccttcagctggcccgacgtccgtgagctctgctccaagtatgcctcccgcgatgaggcacgccgagcagggggcggccggccccgcggcccacccgtcaacaggagccactcggtgccggagaacatggtagagccacctctgtcgggcagggtgggccgctgccgcagcctgagcaccaagaggggccggggaggcggagaggctgcccaatcccctgggcctctgccccagagcaagccggatggaggcgagaccctgtatgtcactgcagacctcaccctggaggacaaccggcgggtgattgtcatggagaagggaccccttcccagccccactgcagggctggaggagagcagtggccagggaccaagctcaccggtggccctgctggggcaggttcaggacttccagcagtctgcagagtgccagccgaaggaagagggttccagggacccggcagacccgagccagcagggcagagtgagaaaccttagagagaagttccaggccttgaactctgtcggttgatgctgactcctgggggagggaggagtcatgttggaggttggggaagaacctgggcatccttcccctcaagcctgggctcatggagcccctgcccagggccctcaggtgggcggaaagtccatcccctccgcccttcaggaaggatgctcccgtgtgcaggggtctcctgcctgtgccatccactggggctcgagacaatttcccactcacctgtgaggccggtgtggctgcttcccttgtaaatagttgttctctggtaagaagccaaatatttaagctcacttcttcccagagagaggaagctctgctcaggcctccagcgttggctggccatggccacagccagatggaggagcccatccccaggagactcaggcagtggcctggagaggctttgttctgtaacggtgccttttcttagggtccaggcaggaatgaagccaataatttattgctttccattctgtggtatgatgtgcgtgtgcgtgagtgtgtggcccctgtttattcccctcctgtcaagaatgaagtggattcagttcaggtacttttgagggttgttgtgctgaccctgtggttgtcgctgatgtacacacatttcattatttgccaatggtgcaataaccactgctgaccaacc

SEQ ID NO: 166577 - DNA, 3001 bp, Homo sapiens
  Payload ID: 12797
  Gene Symbol: PLEKHG3
  Gene Name: pleckstrin homology domain containing, family G (with RhoGef domain) member 3
  ENST ID: ENST00000484731
  CDS Start-End: 185-2359
cctgacagggcatgaaggcaacgagaagggggctgggccggagcccccaggctcagaggaggaggaggaggagcaggaggagagcctggcggtggcggagcagggaaaggggcgcagggagtctgaaagctccaggagcagcagaaggcccagtggccggtctccaaccagtactgagaagcgcatgagcttcgagtccatttcttccctgccagaggttgagccggaccctgaggctgggagtgagcaagaggtattttctgctgtggaagggcccagtgccgaggagacgccttcagacacagaatctccagaagtcctggagacacagcttgatgcccaccagggccttctggggatggaccccccaggtgacatggtggacttcgtggcagctgagagcactgaggaccttaaggccctgagcagcgaggaggaagaagaaatgggaggtgccgcccaggagcctgagagccttctgccaccctctgtgctggaccaggccagcgtcattgcggagcgatttgtcagcagcttctctcggcggagcagcgtggcacaggaggacagcaagtccagtggctttgggagcccgcggctggtcagccggagcagcagcgtgctcagcctggagggcagcgagaagggcctggcccggcatggcagtgccacagactccctcagctgtcagctctccccagaagtggacatcagtgtgggggtggccacagaggacagcccttctgtcaatgggatggagcccccaagcccaggctgcccagtggagcctgaccggtcttcctgcaagaagaaggaatcagcactctccacccgagaccggctgttgctagacaagattaagagctattatgaaaatgcagaacaccatgatgcaggcttcagcgtccgtcgccgggagagcctctcctacatccccaaaggactggtaagaaactccatctccaggttcaacagccttccccggccagacccagagccagtacctccagtggggagcaagagacaggtgggctcccggccgacttcgtgggccctgtttgagctcccaggaccaagccaggcagtcaaaggggacccacctcccatctcagatgctgagttccgcccatcttcagaaattgtgaagatctgggagggaatggagtcttccggagggagccctgggaaggggccaggccagggccaggccaatggctttgacctgcatgagccactcttcatcctggaggagcatgagctgggagccatcacagaggagtcggccactgcctccccggaaagctcctctcccactgaggggcgcagcccggcccacctggcccgggagctgaaagagctggtgaaggagctgagcagcagtacccagggggagctggtggccccactgcacccccgcatcgtgcagctctcccacgtaatggacagccacgtgagcgagcgcgtcaagaacaaggtctaccagctggcccgccagtacagcctccggatcaagagcaacaagccagtgatggccaggccaccactgcagtgggaaaaggtggcccctgagagggatgggaagagccccactgtgccctgtctacaggaagaggctggagagccattaggtggcaaaggtaagaggaagccggtgctgtctctatttgactatgagcagctgatggcccaggagcacagccctcccaagccctcctcggctggggagatgtcaccacagcgtttcttcttcaacccgtctgctgtcagccagaggaccacctcgcctgggggccggccctccgcccggagccccctcagccccacagagaccttcagctggcccgacgtccgtgagctctgctccaagtatgcctcccgcgatgaggcacgccgagcagggggcggccggccccgcggcccacccgtcaacaggagccactcggtgccggagaacatggtagagccacctctgtcgggcagggtgggccgctgccgcagcctgagcaccaagaggggccggggaggcggagaggctgcccaatcccctgggcctctgccccagagcaagccggatggaggcgagaccctgtatgtcactgcagacctcaccctggaggacaaccggcgggtgattgtcatggagaagggaccccttcccagccccactgcagggctggaggagagcagtggccagggaccaagctcaccggtggccctgctggggcaggttcaggacttccagcagtctgcagagtgccagccgaaggaagagggttccagggacccggcagacccgagccagcagggcagagtgagaaaccttagagagaagttccaggccttgaactctgtcggttgatgctgactcctgggggagggaggagtcatgttggaggttggggaagaacctgggcatccttcccctcaagcctgggctcatggagcccctgcccagggccctcaggtgggcggaaagtccatcccctccgcccttcaggaaggatgctcccgtgtgcaggggtctcctgcctgtgccatccactggggctcgagacaatttcccactcacctgtgaggccggtgtggctgcttcccttgtaaatagttgttctctggtaagaagccaaatatttaagctcacttcttcccagagagaggaagctctgctcaggcctccagcgttggctggccatggccacagccagatggaggagcccatccccaggagactcaggcagtggcctggagaggctttgttctgtaacggtgccttttcttagggtccaggcaggaatgaagccaataatttattgctttccattctgtggtatgatgtgcgtgtgcgtgagtgtgtggcccctgtttattcccctcctgtcaagaatgaagtggattcagttcaggtacttttgagggttgttgtgctgaccctgtggttgtcgctgatgtacacacatttcattatttgccaatggtgcaataaccactgctgaccaaccca

SEQ ID NO: 166578 - DNA, 658 bp, Homo sapiens
  Payload ID: 12797
  Gene Symbol: PLEKHG3
  Gene Name: pleckstrin homology domain containing, family G (with RhoGef domain) member 3
  ENST ID: ENST00000554499
  CDS Start-End: 174-658
gtgagccatcatgcctggccgagaaagcgagttttctagaagactgattcactgattgatgactgactggattgattcatgttgcaagatggaagaggtcatggctggggcatacttaagagaactggagacccaatctccctggggtgccctccccaggcagcaatgccaggatgcctgtgtccacctccctccaccaggatggcagccaggagcggccggtgagcctgacctctaccacctcctcgtcgggctcctcctgtgacagtcgcagtgccatggaggagcccagcagctccgaggctcccgccaagaatggggcaggctccctgagaagccggcatctgcccaacagcaacaacaactccagcagctggttgaacgtgaaggggcccctctccccgttcaacagccgggcagcggcagggcctgcacaccacaagctcagctacctgggccgagtggtgcgggagatcgtggagacagagcgcatgtacgtacaggacctgcgcagcatcgtggaggactacctcttgaagatcattgacacacccgggctgctgaagccagaacaggtcagcgccctctttgggaacatagaaaatatctacgcgctgaacagccagctcctcagagacctggacagctgcaatagtga

SEQ ID NO: 166579 - DNA, 2118 bp, Homo sapiens
  Payload ID: 12797
  Gene Symbol: PLEKHG3
  Gene Name: pleckstrin homology domain containing, family G (with RhoGef domain) member 3
  ENST ID: ENST00000634379
  CDS Start-End: 309-2118
cctcgctccctcctgccctcccgctgcagctccggctccgctcgacttcctgccgggcgctggcaagccgcgcgctgcctggggtctccgggggccgcgcttgcagctggccgagtccgggccagctgaggggctggcggtgggcgggagcggtcggcggcctcagccccttcagagagcgactttcaaactcgcgcccgcgtcgcggcagcacctgggcagccccgcacgccgtgcgcgtcccgagcccgcggggcagctaccgctcgaatctccctggggtgccctccccaggcagcaatgccaggatgcctgtgtccacctccctccaccaggatggcagccaggagcggccggtgagcctgacctctaccacctcctcgtcgggctcctcctgtgacagtcgcagtgccatggaggagcccagcagctccgaggctcccgccaagaatggggcaggctccctgagaagccggcatctgcccaacagcaacaacaactccagcagctggttgaacgtgaaggggcccctctccccgttcaacagccgggcagcggcagggcctgcacaccacaagctcagctacctgggccgagtggtgcgggagatcgtggagacagagcgcatgtacgtacaggacctgcgcagcatcgtggagagccaagagtttgatatctacactcagtattgcaacaattaccccaactccgtggccgccctgacggaatgcatgcgggacaagcagcaggccaagttctttcgggaccggcaggagctgctacagcactcgctgcccttgggctcctacctgctgaagccagtccagcgcatcctcaagtaccacctgctgctccaggaaattgccaagcattttgatgaagaagaggatggctttgaggtggtggaggatgccattgacaccatgacctgtgtggcctggtacatcaacgacatgaagaggaggcatgagcacgcggtccggctccaggagattcagtcactcctcatcaactggaaggggcccgacctgaccacctacggggagcttgtcctggagggcacattccgcgtgcatcgcgtgcgcaatgaaaggacctttttcctctttgacaaaacactgcttatcaccaagaagcggggcgatcactttgtctacaagggcaacatcccgtgctcctccctgatgctgatcgaaagcaccagagactccctgtgcttcactgtcacccactacaagcacagcaagcagcagtacagcatccaggccaagacagtggaggagaaacggaactggactcaccacatcaagaggctcatcctagagaaccaccatgccaccattccccagaaggccaaggaagccatcttggaaatggattcctattatcccaatcggtaccgctgcagcccagagcggctgaagaaggcttggtcctcccaggatgaggtgtccaccaatgtgcgccaggggcgccggcaatctgagccaaccaaacacctgctcaggcaactcaacgagaaagcccgagcagcaggaatgaagggaaaggggcgcagggagtctgaaagctccaggagcagcagaaggcccagtggccggtctccaaccagtactgagaagcgcatgagcttcgagtccatttcttccctgccagaggttgagccggaccctgaggctgggagtgagcaagaggtattttctgctgtggaagggcccagtgccgaggagacgccttcagacacagaatctccagaagtcctggagacacagcttgatgcccaccagggccttctggggatggaccccccaggtgacatggtggacttcgtggcagctgagagcactgaggaccttaaggccctgagcagcgaggaggaagaagaaatgggaggtgccgcccaggagcctgagagccttctgccaccctctgtgctggaccaggccagcgtcattgcggagcgatttgtcagcagcttctctcggcggagcagcgtggcacaggaggacagcaagtccagtggctttgggagcccgcggctggtcagccggagcagcagcgtgctcagcctggagggcagcgagaagggcctggcccggcatggcagtgccacagact

SEQ ID NO: 166580 - DNA, 6782 bp, Homo sapiens
  Payload ID: 12798
  Gene Symbol: PLEKHG4
  Gene Name: pleckstrin homology domain containing, family G (with RhoGef domain) member 4
  Uniprot ID: Q58EX7
  ENST ID: ENST00000360461
  CDS Start-End: 2536-6111
tggtcagccacccctggctggctccaggcccagctccccaatattccccactaggcctcagtgtgtcctcatttctatctgtacctttgccatcctgggccatgcaacctgtagctctcggcctcttctgtctcctttcaggctgagtctctgaatctgtctccatttgtgactctggtttccatgggatacatagatgtggagcctcaggagggcaggggtagtgtgatcagtgtcaggcgccccaaagcatttattctgtgccaggccctgtgctggatgctgaaagtacggaagtggataacatacagtctctgtttccatgaagcctacaatgcacattctctgtggagtggagaaaccagggcccagccctgcctctatctcagtatggctgtacctcccctgaatctgcctgctgtgcccagggtgccaggtcagctatagcctgtggcttgaggctcttctttgcctctggcattcacaggggtatgtgtgcccgccagcaggtcccccccggctcttagggctcctgggggacttggctggtgggtgctggtgggcagcagaaggggagggagggagcagaaggcagtgactcagtgggggtggccctgggacagaactggggaggaagccaaggttggatgatgcttcctgaagccaggagggtgggaagagaggtctggctgggagttagggatggagcaggacaactccaaggctcccctctggcagccagacctgctcatgaagaaggctcctcggtagctgcctgaaagtctggactctgggggctgggctgggctgggtggggagattgctgttggtcccactgtgcctgttgtaatccccaggttcatgaaagaggtgcctgccttagagccagggaagccgttgcacccggtgccccctctccccagggaccatgggcctgggcacactgtggggctcagggtcttctcctggtcgcagagctgaccttcccacaatcttcccacaaattctggggagtgtcgggccaggcccacatgccctaaagggacctcaaatcgcacagctacccacttgggtagctttcatcagttcaggattccctgactgcgggtgaaatgagggggcagggcaccaacacagcccgagtgctggcagcgggtgaacgtataacacagggagtcttccccagtcctcacggcaaccccaggagaaaaatgactttccatttttacaggtgaggagggtgaggctcaaagagcagagttcctggagcgcccccagcaggtaagtggagaagccaggcctgggctgggggctctggctccagaaccccacctcagcaccagcctcctgcaccggactttgtggagaagggggtaagggggtgccagggatggcaaaggggtagaggatctggtggactctggcaggcctgggtcagctccacccattggtctcactcccacccggatggcagccccatcccacgtgggatcatgcgacctgtctctgggtgcccgcggcgaggcagcaccccgcttccctacacagaaggccttcccctcccgtcggctcattcagccgcggaagcccctgggagaccccgccccgccccgtcccgcggtgccccccgcgcactcaccctcgctcacccacgcggccttcctggcgggagagcgcttccggcgtcctcgccaggcccggggagtgggcacggtggagctgccgaccgttggtcgctgccccaacccacgcactgcgacgccgcgggtgaggcgcgcggtctgcggggcccgggggtgcggcggggcggggctggcgggctgtccgggcccacggagaggacggcggcgggcgggggttgctgcagggcccgcaccttgtcttccgcgccggcagggctgtgccccgtcgagacctgctcgggctgtggctccgtcctccggcctccagggggcggcgcggcgctgcgcggcgccccggcggcactgccctcccttcccagcggccaggaggcggtgtcccgtgacgccgcgcggccgcgctgtagtggccgtcgaggccgccgtctgttcgaaggctgtccgacttcacggttccccgcggctcggcccgggggcgtgagtgtcgccagcgggcgacgggggggcgcgcggtaggccctgcaacaaggccagggcctgggggggccggcaggagagcgaacccgaggcatcgtggtgccatggcggggccgcccccacgggcatgggcctgcagagcgtggccgtgaggacgctgagggtgggcgcgcacggagcagaggcccacgggcgtccgacgggggacctggacagagggacacccttaacgttattccctcttcccaggcctgaattgcagttcctgtgccctggcactaagactggcacctcctgcggcccatgcccttcgcctgcattgcccactgagtcccactcgactgtcttcagcgcggttcacactgagacccagccctctcccgctggccccgagcaggcccacctttaggagggcgtgatggaaaggcccctggagaatggggatgagtccccagactctcagggccatgccaccgactggagatttgctgtgtgcagtttcagggatgcctgggaagaggaggaacctgcttcccagatgcacgttaaggacccaggtcctccaagaccaccagccggggccacccaggatgaggagctacagggcagccccttgtccaggaaattccagttacccccagctgcagatgagtcgggggatgcccagaggggcacagtagaaagctcctcagtcctgtcagaagggccaggcccctctggagtggagagtctcctatgccccatgtcctcccacctcagcttggcacagggtgagagtgacaccccaggggtagggttggtaggggacccaggtccaagcagggcgatgccatctggcttgagccctggggcattggacagcgaccctgtgggccttggagaccctttatcagaaatatcaaagctgctggaggcagcccccagtggatccggcctccctaagcctgctgactgcctcctggcccaagacctctgttgggagctgctggccagtggtatggccaccttgccagggactcgggatgtccaaggccgggcagtgctgcttctgtgtgcccacagcccagcctggcttcagtctgagtgcagcagccaggaactcatccgcctcctgctgtacctgcgaagcatccccaggcccgaagtacaggcactgggactgacagtgctagttgatgcccgaatttgtgctccaagttcttccctcttctctgggctcagccaactacaagaagcagccccaggggccgtgtaccaggtgctgctagtgggaagcacgctgctgaaggaagtgccttccgggctgcagctggagcagttgccttctcagagcctgctgacccacatcccaacggcggggctgcccacttcgctaggaggaggcctgccttactgccaccaggcctggctggatttccgaaggcggctggaagctctactacagaactgccaggcagcttgtgccctgctccagggggccatcgaaagtgtgaaggctgtgccccagcccatggagcctggggaggtcggtcagctgctacagcagacagaggtcctgatgcagcaggtgctagactcgccatggctggcatggctacaatgccaggggggccgggagctgacatggctgaagcaagaggtcccagaggtgaccctgagcccagactacaggacggcaatggacaaggctgacgagctatatgaccgggtggatggattgctgcaccaactgaccctgcagagcaaccagcgaatacaggccctagagttggtccaaacactggaggcccgggaaagcggactgcaccagattgaagtgtggctgcagcaggtgggctggccagcactggaggaggctggggagccctcgctggacatgctgctccaggcccaaggctcttttcaggagctgtaccaggttgcccaggagcaggtcaggcaaggggagaagtttctgcagccgctgactggctgggaggcggctgaactggacccccctggggcacgctttctggccctgcgagcccagctgactgaattctctagggctttggcccagcggtgccagcggctggcggatgctgagaggctgtttcagctcttcagggaggccttgacgtgggctgaggaggggcagcgagtgttggcagagctggagcaggaacgcccgggggttgtgttgcagcagctgcagctgcactggaccaggcaccctgacttgcctcctgcccacttccgaaagatgtgggctctggccacggggctgggctcagaggccatccgccaggagtgccgctgggcctgggcgcggtgccaggacacctggctggccctggaccaaaagcttgaggcttcactgaagctaccaccggtgggcagcacagctagcctgtgtgtcagccaggtccccgctgcacctgcccaccctcccctgaggaaggcctacagcttcgatcggaatctggggcagagtctcagtgaacctgcctgccactgccaccatgcggccactattgctgcctgccgcagaccagaggctggaggaggtgccctgccccaggcatcccctactgtgcctccaccaggcagctctgaccccaggagcctcaacaggctacagctggtgctggcagagatggtggccacggagcgggagtatgtccgggctctagagtacactatggagaactatttccccgagctggatcgccccgatgtgccccagggcctccgcggtcagcgtgcccacctctttggcaacctggagaagctgcgggacttccactgccacttcttcctgcgtgagctggaggcttgcacccggcacccaccacgagtggcctatgccttcctgcgccatagggtgcagtttgggatgtacgcgctctacagcaagaataagcctcgctccgatgccctgatgtcaagctatgggcacaccttcttcaaggacaagcagcaagcactgggggaccacctggacctggcctcctacctgctaaagcccatccagcgcatgggcaagtacgcactgctgctgcaggagctggcacgggcctgcgggggccccacgcaggagctcagtgcgctgcgggaggcccagagccttgtgcacttccagctgcggcacggaaacgacctgctggccatggacgccatccagggctgtgatgttaacctcaaggaacaggggcagctggtgcgacaggatgagtttgtggtgcgcactgggcgccacaagtccgtgcgccgcatcttcctttttgaggagctgctgctcttcagcaagcctcgccatgggcccacaggggttgacacatttgcctacaagcgctccttcaagatggcagaccttggtctcactgagtgctgtgggaacagcaacctgcgcttcgagatctggttccgccgccgcaaggccagggacacctttgtgctgcaggcctccagcctggctatcaagcaggcctggacagctgacatctcccacctgctttggaggcaggccgtccacaacaaggaggtgcgcatggctgagatggtgtccatgggtgtggggaacaaggccttccgagacattgctcccagcgaggaagccatcaacgaccgcaccgtcaactatgtcctgaagtgccgagaagttcgctctcgggcgtccattgccgtagccccgtttgaccatgacagcctctacctgggggcctcgaactcccttcctggagaccctgcctcttgctctgttctggggtccctcaacctgcacctgtacagagacccagctcttctgggtctccgctgtcccctgtatcccagcttcccagaggaagcagcactggaggctgaggcagagctgggcggccagccctctttgactgctgaggactcagagatctcgtcccaatgcccatcagccagtggctccagtggctctgacagcagctgtgtgtcagggcaggccctgggtaggggcctggaggacttaccctgtgtctgagcccgggactggacgagcagtagatccagcagcctgcagctccaaggaacattgcctctctggatctgctgtgaccagggtgtggctgacacctgggctacctccaacctacatgtgcaacgctgttgactaccctttctgatgtgtgtggccattggactaactggcacggggcctctctagggaagtctggttgtagagcctgaataggctcctggccccatgaccccttctcctgtccccagctcccatcccagttgtgggttaagaataggctagagcagacattgggtgtttccatgctgtaggctggtgggggaccatgtgcctctaggcagtgactagggtgcccccacccctcaggaagaacacaggtgggctcctagcagctgatccccaatgcctggccttaaagccgagctcagttaccatagggacaggtccacctctactgggccctcatgcttgcctttcctggcccccaggcccagcccctttttactggggcagtttcgttattttgacttgatgccttttgaataactttcaatagaattgtctaaaattatcttactggttgttaggcctttggtgtctcagagaaggagtctaggtctttgatgtgtgatttaatcttttatttgtttataataaaaaatagactgatatgt

SEQ ID NO: 166581 - DNA, 4513 bp, Homo sapiens
  Payload ID: 12798
  Gene Symbol: PLEKHG4
  Gene Name: pleckstrin homology domain containing, family G (with RhoGef domain) member 4
  Uniprot ID: Q58EX7
  ENST ID: ENST00000379344
  CDS Start-End: 273-3848
ggtgtcccgtgacgccgcgcggccgcgctgtagtggccgtcgaggccgccgtctgttcgaaggctgtccgacttcacggttccccgcggctcggcccgggggcgcctgaattgcagttcctgtgccctggcactaagactggcacctcctgcggcccatgcccttcgcctgcattgcccactgagtcccactcgactgtcttcagcgcggttcacactgagacccagccctctcccgctggccccgagcaggcccacctttaggagggcgtgatggaaaggcccctggagaatggggatgagtccccagactctcagggccatgccaccgactggagatttgctgtgtgcagtttcagggatgcctgggaagaggaggaacctgcttcccagatgcacgttaaggacccaggtcctccaagaccaccagccggggccacccaggatgaggagctacagggcagccccttgtccaggaaattccagttacccccagctgcagatgagtcgggggatgcccagaggggcacagtagaaagctcctcagtcctgtcagaagggccaggcccctctggagtggagagtctcctatgccccatgtcctcccacctcagcttggcacagggtgagagtgacaccccaggggtagggttggtaggggacccaggtccaagcagggcgatgccatctggcttgagccctggggcattggacagcgaccctgtgggccttggagaccctttatcagaaatatcaaagctgctggaggcagcccccagtggatccggcctccctaagcctgctgactgcctcctggcccaagacctctgttgggagctgctggccagtggtatggccaccttgccagggactcgggatgtccaaggccgggcagtgctgcttctgtgtgcccacagcccagcctggcttcagtctgagtgcagcagccaggaactcatccgcctcctgctgtacctgcgaagcatccccaggcccgaagtacaggcactgggactgacagtgctagttgatgcccgaatttgtgctccaagttcttccctcttctctgggctcagccaactacaagaagcagccccaggggccgtgtaccaggtgctgctagtgggaagcacgctgctgaaggaagtgccttccgggctgcagctggagcagttgccttctcagagcctgctgacccacatcccaacggcggggctgcccacttcgctaggaggaggcctgccttactgccaccaggcctggctggatttccgaaggcggctggaagctctactacagaactgccaggcagcttgtgccctgctccagggggccatcgaaagtgtgaaggctgtgccccagcccatggagcctggggaggtcggtcagctgctacagcagacagaggtcctgatgcagcaggtgctagactcgccatggctggcatggctacaatgccaggggggccgggagctgacatggctgaagcaagaggtcccagaggtgaccctgagcccagactacaggacggcaatggacaaggctgacgagctatatgaccgggtggatggattgctgcaccaactgaccctgcagagcaaccagcgaatacaggccctagagttggtccaaacactggaggcccgggaaagcggactgcaccagattgaagtgtggctgcagcaggtgggctggccagcactggaggaggctggggagccctcgctggacatgctgctccaggcccaaggctcttttcaggagctgtaccaggttgcccaggagcaggtcaggcaaggggagaagtttctgcagccgctgactggctgggaggcggctgaactggacccccctggggcacgctttctggccctgcgagcccagctgactgaattctctagggctttggcccagcggtgccagcggctggcggatgctgagaggctgtttcagctcttcagggaggccttgacgtgggctgaggaggggcagcgagtgttggcagagctggagcaggaacgcccgggggttgtgttgcagcagctgcagctgcactggaccaggcaccctgacttgcctcctgcccacttccgaaagatgtgggctctggccacggggctgggctcagaggccatccgccaggagtgccgctgggcctgggcgcggtgccaggacacctggctggccctggaccaaaagcttgaggcttcactgaagctaccaccggtgggcagcacagctagcctgtgtgtcagccaggtccccgctgcacctgcccaccctcccctgaggaaggcctacagcttcgatcggaatctggggcagagtctcagtgaacctgcctgccactgccaccatgcggccactattgctgcctgccgcagaccagaggctggaggaggtgccctgccccaggcatcccctactgtgcctccaccaggcagctctgaccccaggagcctcaacaggctacagctggtgctggcagagatggtggccacggagcgggagtatgtccgggctctagagtacactatggagaactatttccccgagctggatcgccccgatgtgccccagggcctccgcggtcagcgtgcccacctctttggcaacctggagaagctgcgggacttccactgccacttcttcctgcgtgagctggaggcttgcacccggcacccaccacgagtggcctatgccttcctgcgccatagggtgcagtttgggatgtacgcgctctacagcaagaataagcctcgctccgatgccctgatgtcaagctatgggcacaccttcttcaaggacaagcagcaagcactgggggaccacctggacctggcctcctacctgctaaagcccatccagcgcatgggcaagtacgcactgctgctgcaggagctggcacgggcctgcgggggccccacgcaggagctcagtgcgctgcgggaggcccagagccttgtgcacttccagctgcggcacggaaacgacctgctggccatggacgccatccagggctgtgatgttaacctcaaggaacaggggcagctggtgcgacaggatgagtttgtggtgcgcactgggcgccacaagtccgtgcgccgcatcttcctttttgaggagctgctgctcttcagcaagcctcgccatgggcccacaggggttgacacatttgcctacaagcgctccttcaagatggcagaccttggtctcactgagtgctgtgggaacagcaacctgcgcttcgagatctggttccgccgccgcaaggccagggacacctttgtgctgcaggcctccagcctggctatcaagcaggcctggacagctgacatctcccacctgctttggaggcaggccgtccacaacaaggaggtgcgcatggctgagatggtgtccatgggtgtggggaacaaggccttccgagacattgctcccagcgaggaagccatcaacgaccgcaccgtcaactatgtcctgaagtgccgagaagttcgctctcgggcgtccattgccgtagccccgtttgaccatgacagcctctacctgggggcctcgaactcccttcctggagaccctgcctcttgctctgttctggggtccctcaacctgcacctgtacagagacccagctcttctgggtctccgctgtcccctgtatcccagcttcccagaggaagcagcactggaggctgaggcagagctgggcggccagccctctttgactgctgaggactcagagatctcgtcccaatgcccatcagccagtggctccagtggctctgacagcagctgtgtgtcagggcaggccctgggtaggggcctggaggacttaccctgtgtctgagcccgggactggacgagcagtagatccagcagcctgcagctccaaggaacattgcctctctggatctgctgtgaccagggtgtggctgacacctgggctacctccaacctacatgtgcaacgctgttgactaccctttctgatgtgtgtggccattggactaactggcacggggcctctctagggaagtctggttgtagagcctgaataggctcctggccccatgaccccttctcctgtccccagctcccatcccagttgtgggttaagaataggctagagcagacattgggtgtttccatgctgtaggctggtgggggaccatgtgcctctaggcagtgactagggtgcccccacccctcaggaagaacacaggtgggctcctagcagctgatccccaatgcctggccttaaagccgagctcagttaccatagggacaggtccacctctactgggccctcatgcttgcctttcctggcccccaggcccagcccctttttactggggcagtttcgttattttgacttgatgccttttgaataactttcaatagaattgtctaaaattatcttactggttgttaggcctttggtgtctcagagaaggagtctaggtctttgatgtgtgatttaatcttttatttgtttataataaaaaatagactg

SEQ ID NO: 166582 - DNA, 4480 bp, Homo sapiens
  Payload ID: 12798
  Gene Symbol: PLEKHG4
  Gene Name: pleckstrin homology domain containing, family G (with RhoGef domain) member 4
  Uniprot ID: Q58EX7
  ENST ID: ENST00000450733
  CDS Start-End: 457-3789
gtccgacttcacggttccccgcggctcggcccgggggcgtgagtgtcgccagcgggcgacgggggggcgcgcggtaggccctgcaacaaggccagggcctgggggggccggcaggagagcgaacccgaggcatcgtggtgccatggcggggccgcccccacgggcatgggcctgcagagcgtggccgtgaggacgctgagggtgggcgcgcacggagcagaggcccacgggcgtccgacgggggacctggacagagggacacccttaacgttattccctcttcccaggcctgaattgcagttcctgtgccctggcactaagactggcacctcctgcggcccatgcccttcgcctgcattgcccactgagtcccactcgactgtcttcagcgcggttcacactgagacccagccctctcccgctggccccgagcaggcccacctttaggagggcgtgatggaaaggcccctggagaatggggatgagtccccagactctcagggccatgccaccgactggagatttgctgtgtgcagtttcagggatgcctgggaagaggaggaacctgcttcccagatgcacgttaaggacccaggtcctccaagaccaccagccggggccacccaggatgaggagctacagggcagccccttgtccaggaaattccagttacccccagctgcagatgagtcgggggatgcccagaggggcacagtagaaagctcctcagtcctgtcagaagggccaggcccctctggagtggagagtctcctatgccccatgtcctcccacctcagcttggcacaggggactcgggatgtccaaggccgggcagtgctgcttctgtgtgcccacagcccagcctggcttcagtctgagtgcagcagccaggaactcatccgcctcctgctgtacctgcgaagcatccccaggcccgaagtacaggcactgggactgacagtgctagttgatgcccgaatttgtgctccaagttcttccctcttctctgggctcagccaactacaagaagcagccccaggggccgtgtaccaggtgctgctagtgggaagcacgctgctgaaggaagtgccttccgggctgcagctggagcagttgccttctcagagcctgctgacccacatcccaacggcggggctgcccacttcgctaggaggaggcctgccttactgccaccaggcctggctggatttccgaaggcggctggaagctctactacagaactgccaggcagcttgtgccctgctccagggggccatcgaaagtgtgaaggctgtgccccagcccatggagcctggggaggtcggtcagctgctacagcagacagaggtcctgatgcagcaggtgctagactcgccatggctggcatggctacaatgccaggggggccgggagctgacatggctgaagcaagaggtcccagaggtgaccctgagcccagactacaggacggcaatggacaaggctgacgagctatatgaccgggtggatggattgctgcaccaactgaccctgcagagcaaccagcgaatacaggccctagagttggtccaaacactggaggcccgggaaagcggactgcaccagattgaagtgtggctgcagcaggtgggctggccagcactggaggaggctggggagccctcgctggacatgctgctccaggcccaaggctcttttcaggagctgtaccaggttgcccaggagcaggtcaggcaaggggagaagtttctgcagccgctgactggctgggaggcggctgaactggacccccctggggcacgctttctggccctgcgagcccagctgactgaattctctagggctttggcccagcggtgccagcggctggcggatgctgagaggctgtttcagctcttcagggaggccttgacgtgggctgaggaggggcagcgagtgttggcagagctggagcaggaacgcccgggggttgtgttgcagcagctgcagctgcactggaccaggcaccctgacttgcctcctgcccacttccgaaagatgtgggctctggccacggggctgggctcagaggccatccgccaggagtgccgctgggcctgggcgcggtgccaggacacctggctggccctggaccaaaagcttgaggcttcactgaagctaccaccggtgggcagcacagctagcctgtgtgtcagccaggtccccgctgcacctgcccaccctcccctgaggaaggcctacagcttcgatcggaatctggggcagagtctcagtgaacctgcctgccactgccaccatgcggccactattgctgcctgccgcagaccagaggctggaggaggtgccctgccccaggcatcccctactgtgcctccaccaggcagctctgaccccaggagcctcaacaggctacagctggtgctggcagagatggtggccacggagcgggagtatgtccgggctctagagtacactatggagaactatttccccgagctggatcgccccgatgtgccccagggcctccgcggtcagcgtgcccacctctttggcaacctggagaagctgcgggacttccactgccacttcttcctgcgtgagctggaggcttgcacccggcacccaccacgagtggcctatgccttcctgcgccatagggtgcagtttgggatgtacgcgctctacagcaagaataagcctcgctccgatgccctgatgtcaagctatgggcacaccttcttcaaggacaagcagcaagcactgggggaccacctggacctggcctcctacctgctaaagcccatccagcgcatgggcaagtacgcactgctgctgcaggagctggcacgggcctgcgggggccccacgcaggagctcagtgcgctgcgggaggcccagagccttgtgcacttccagctgcggcacggaaacgacctgctggccatggacgccatccagggctgtgatgttaacctcaaggaacaggggcagctggtgcgacaggatgagtttgtggtgcgcactgggcgccacaagtccgtgcgccgcatcttcctttttgaggagctgctgctcttcagcaagcctcgccatgggcccacaggggttgacacatttgcctacaagcgctccttcaagatggcagaccttggtctcactgagtgctgtgggaacagcaacctgcgcttcgagatctggttccgccgccgcaaggccagggacacctttgtgctgcaggcctccagcctggctatcaagcaggcctggacagctgacatctcccacctgctttggaggcaggccgtccacaacaaggaggtgcgcatggctgagatggtgtccatgggtgtggggaacaaggccttccgagacattgctcccagcgaggaagccatcaacgaccgcaccgtcaactatgtcctgaagtgccgagaagttcgctctcgggcgtccattgccgtagccccgtttgaccatgacagcctctacctgggggcctcgaactcccttcctggagaccctgcctcttgctctgttctggggtccctcaacctgcacctgtacagagacccagctcttctgggtctccgctgtcccctgtatcccagcttcccagaggaagcagcactggaggctgaggcagagctgggcggccagccctctttgactgctgaggactcagagatctcgtcccaatgcccatcagccagtggctccagtggctctgacagcagctgtgtgtcagggcaggccctgggtaggggcctggaggacttaccctgtgtctgagcccgggactggacgagcagtagatccagcagcctgcagctccaaggaacattgcctctctggatctgctgtgaccagggtgtggctgacacctgggctacctccaacctacatgtgcaacgctgttgactaccctttctgatgtgtgtggccattggactaactggcacggggcctctctagggaagtctggttgtagagcctgaataggctcctggccccatgaccccttctcctgtccccagctcccatcccagttgtgggttaagaataggctagagcagacattgggtgtttccatgctgtaggctggtgggggaccatgtgcctctaggcagtgactagggtgcccccacccctcaggaagaacacaggtgggctcctagcagctgatccccaatgcctggccttaaagccgagctcagttaccatagggacaggtccacctctactgggccctcatgcttgcctttcctggcccccaggcccagcccctttttactggggcagtttcgttattttgacttgatgccttttgaataactttcaatagaattgtctaaaattatcttactggttgttaggcctttggtgtctcagagaaggagtctaggtctttgatgtgtgatttaatcttttatttgtttataataaaaaatagactgatatgtaccctctgatgggcacatgc

SEQ ID NO: 166583 - DNA, 4455 bp, Homo sapiens
  Payload ID: 12798
  Gene Symbol: PLEKHG4
  Gene Name: pleckstrin homology domain containing, family G (with RhoGef domain) member 4
  Uniprot ID: Q58EX7
  ENST ID: ENST00000427155
  CDS Start-End: 209-3784
gttggtcgctgccccaacccacgcactgcgacgccgcgggcctgaattgcagttcctgtgccctggcactaagactggcacctcctgcggcccatgcccttcgcctgcattgcccactgagtcccactcgactgtcttcagcgcggttcacactgagacccagccctctcccgctggccccgagcaggcccacctttaggagggcgtgatggaaaggcccctggagaatggggatgagtccccagactctcagggccatgccaccgactggagatttgctgtgtgcagtttcagggatgcctgggaagaggaggaacctgcttcccagatgcacgttaaggacccaggtcctccaagaccaccagccggggccacccaggatgaggagctacagggcagccccttgtccaggaaattccagttacccccagctgcagatgagtcgggggatgcccagaggggcacagtagaaagctcctcagtcctgtcagaagggccaggcccctctggagtggagagtctcctatgccccatgtcctcccacctcagcttggcacagggtgagagtgacaccccaggggtagggttggtaggggacccaggtccaagcagggcgatgccatctggcttgagccctggggcattggacagcgaccctgtgggccttggagaccctttatcagaaatatcaaagctgctggaggcagcccccagtggatccggcctccctaagcctgctgactgcctcctggcccaagacctctgttgggagctgctggccagtggtatggccaccttgccagggactcgggatgtccaaggccgggcagtgctgcttctgtgtgcccacagcccagcctggcttcagtctgagtgcagcagccaggaactcatccgcctcctgctgtacctgcgaagcatccccaggcccgaagtacaggcactgggactgacagtgctagttgatgcccgaatttgtgctccaagttcttccctcttctctgggctcagccaactacaagaagcagccccaggggccgtgtaccaggtgctgctagtgggaagcacgctgctgaaggaagtgccttccgggctgcagctggagcagttgccttctcagagcctgctgacccacatcccaacggcggggctgcccacttcgctaggaggaggcctgccttactgccaccaggcctggctggatttccgaaggcggctggaagctctactacagaactgccaggcagcttgtgccctgctccagggggccatcgaaagtgtgaaggctgtgccccagcccatggagcctggggaggtcggtcagctgctacagcagacagaggtcctgatgcagcaggtgctagactcgccatggctggcatggctacaatgccaggggggccgggagctgacatggctgaagcaagaggtcccagaggtgaccctgagcccagactacaggacggcaatggacaaggctgacgagctatatgaccgggtggatggattgctgcaccaactgaccctgcagagcaaccagcgaatacaggccctagagttggtccaaacactggaggcccgggaaagcggactgcaccagattgaagtgtggctgcagcaggtgggctggccagcactggaggaggctggggagccctcgctggacatgctgctccaggcccaaggctcttttcaggagctgtaccaggttgcccaggagcaggtcaggcaaggggagaagtttctgcagccgctgactggctgggaggcggctgaactggacccccctggggcacgctttctggccctgcgagcccagctgactgaattctctagggctttggcccagcggtgccagcggctggcggatgctgagaggctgtttcagctcttcagggaggccttgacgtgggctgaggaggggcagcgagtgttggcagagctggagcaggaacgcccgggggttgtgttgcagcagctgcagctgcactggaccaggcaccctgacttgcctcctgcccacttccgaaagatgtgggctctggccacggggctgggctcagaggccatccgccaggagtgccgctgggcctgggcgcggtgccaggacacctggctggccctggaccaaaagcttgaggcttcactgaagctaccaccggtgggcagcacagctagcctgtgtgtcagccaggtccccgctgcacctgcccaccctcccctgaggaaggcctacagcttcgatcggaatctggggcagagtctcagtgaacctgcctgccactgccaccatgcggccactattgctgcctgccgcagaccagaggctggaggaggtgccctgccccaggcatcccctactgtgcctccaccaggcagctctgaccccaggagcctcaacaggctacagctggtgctggcagagatggtggccacggagcgggagtatgtccgggctctagagtacactatggagaactatttccccgagctggatcgccccgatgtgccccagggcctccgcggtcagcgtgcccacctctttggcaacctggagaagctgcgggacttccactgccacttcttcctgcgtgagctggaggcttgcacccggcacccaccacgagtggcctatgccttcctgcgccatagggtgcagtttgggatgtacgcgctctacagcaagaataagcctcgctccgatgccctgatgtcaagctatgggcacaccttcttcaaggacaagcagcaagcactgggggaccacctggacctggcctcctacctgctaaagcccatccagcgcatgggcaagtacgcactgctgctgcaggagctggcacgggcctgcgggggccccacgcaggagctcagtgcgctgcgggaggcccagagccttgtgcacttccagctgcggcacggaaacgacctgctggccatggacgccatccagggctgtgatgttaacctcaaggaacaggggcagctggtgcgacaggatgagtttgtggtgcgcactgggcgccacaagtccgtgcgccgcatcttcctttttgaggagctgctgctcttcagcaagcctcgccatgggcccacaggggttgacacatttgcctacaagcgctccttcaagatggcagaccttggtctcactgagtgctgtgggaacagcaacctgcgcttcgagatctggttccgccgccgcaaggccagggacacctttgtgctgcaggcctccagcctggctatcaagcaggcctggacagctgacatctcccacctgctttggaggcaggccgtccacaacaaggaggtgcgcatggctgagatggtgtccatgggtgtggggaacaaggccttccgagacattgctcccagcgaggaagccatcaacgaccgcaccgtcaactatgtcctgaagtgccgagaagttcgctctcgggcgtccattgccgtagccccgtttgaccatgacagcctctacctgggggcctcgaactcccttcctggagaccctgcctcttgctctgttctggggtccctcaacctgcacctgtacagagacccagctcttctgggtctccgctgtcccctgtatcccagcttcccagaggaagcagcactggaggctgaggcagagctgggcggccagccctctttgactgctgaggactcagagatctcgtcccaatgcccatcagccagtggctccagtggctctgacagcagctgtgtgtcagggcaggccctgggtaggggcctggaggacttaccctgtgtctgagcccgggactggacgagcagtagatccagcagcctgcagctccaaggaacattgcctctctggatctgctgtgaccagggtgtggctgacacctgggctacctccaacctacatgtgcaacgctgttgactaccctttctgatgtgtgtggccattggactaactggcacggggcctctctagggaagtctggttgtagagcctgaataggctcctggccccatgaccccttctcctgtccccagctcccatcccagttgtgggttaagaataggctagagcagacattgggtgtttccatgctgtaggctggtgggggaccatgtgcctctaggcagtgactagggtgcccccacccctcaggaagaacacaggtgggctcctagcagctgatccccaatgcctggccttaaagccgagctcagttaccatagggacaggtccacctctactgggccctcatgcttgcctttcctggcccccaggcccagcccctttttactggggcagtttcgttattttgacttgatgccttttgaataactttcaatagaattgtctaaaattatcttactggttgttaggcctttggtgtctcagagaaggagtctaggtctttgatgtgtgatttaatcttttatttgtttataataaaaaatagactgatatgt

SEQ ID NO: 166584 - DNA, 574 bp, Homo sapiens
  Payload ID: 12798
  Gene Symbol: PLEKHG4
  Gene Name: pleckstrin homology domain containing, family G (with RhoGef domain) member 4
  ENST ID: ENST00000562144
  CDS Start-End: 346-574
gtctctgtttccatgaagcctacaatgcacattctctgtggagtggagaaaccagggcccagccctgcctctatctcagtatggctgtacctcccctgaatctgcctgctgtgcccagggtgccaggtgaggagggtgaggctcaaagagcagagttcctggagcgcccccagcaggcctgaattgcagttcctgtgccctggcactaagactggcacctcctgcggcccatgcccttcgcctgcattgcccactgagtcccactcgactgtcttcagcgcggttcacactgagacccagccctctcccgctggccccgagcaggcccacctttaggagggcgtgatggaaaggcccctggagaatggggatgagtccccagactctcagggccatgccaccgactggagatttgctgtgtgcagtttcagggatgcctgggaagaggaggaacctgcttcccagatgcacgttaaggacccaggtcctccaagaccaccagccggggccacccaggatgaggagctacagggcagccccttgtccaggaaattccagttacccccagctgcag

SEQ ID NO: 166585 - DNA, 698 bp, Homo sapiens
  Payload ID: 12798
  Gene Symbol: PLEKHG4
  Gene Name: pleckstrin homology domain containing, family G (with RhoGef domain) member 4
  ENST ID: ENST00000567136
  CDS Start-End: 1-319
agacattgctcccagcgaggaagccatcaacgaccgcaccgtcaactatgtcctgaagtgccgagaagttcgctctcgggcgtccattgccgtagccccgtttgaccatgacagcctctacctgggggcctcgaactcccttcctggagaccctgcctcttgctctgttctggggtccctcaacctgcacctgtacagagacccagctcttctgggtctccgctgtcccctgtatcccagcttcccagaggaagcagcactggaggctgaggcagagctgggcggccagccctctttgatctccctccctagctgctgaggactcagagatctcgtcccaatgcccatcagccagtggctccagtggctctgacagcagctgtgtgtcagggcaggccctgggtaggggcctggaggacttaccctgtgtctgagcccgggactggacgagcagtagatccagcagcctgcagctccaaggaacattgcctctctggatctgctgtgaccagggtgtggctgacacctgggctacctccaacctacatgtgcaacgctgttgactaccctttctgatgtgtgtggccattggactaactggcacggggcctctctagggaagtctggttgtagagcctgaataggctcctggccccatgaccccttctcctgtccccagctcccatcccagttgtggg

SEQ ID NO: 166586 - DNA, 560 bp, Homo sapiens
  Payload ID: 12798
  Gene Symbol: PLEKHG4
  Gene Name: pleckstrin homology domain containing, family G (with RhoGef domain) member 4
  ENST ID: ENST00000565899
  CDS Start-End: 340-560
atgatgcttcctgaagccaggagggtgggaagagaggtctggctgggagttagggatggagcaggacaactccaaggctcccctctggcagccagacctgctcatgaagaaggctcctcggtgaggagggtgaggctcaaagagcagagttcctggagcgcccccagcaggcctgaattgcagttcctgtgccctggcactaagactggcacctcctgcggcccatgcccttcgcctgcattgcccactgagtcccactcgactgtcttcagcgcggttcacactgagacccagccctctcccgctggccccgagcaggcccacctttaggagggcgtgatggaaaggcccctggagaatggggatgagtccccagactctcagggccatgccaccgactggagatttgctgtgtgcagtttcagggatgcctgggaagaggaggaacctgcttcccagatgcacgttaaggacccaggtcctccaagaccaccagccggggccacccaggatgaggagctacagggcagccccttgtccaggaaattccagttaccccc

SEQ ID NO: 166587 - DNA, 491 bp, Homo sapiens
  Payload ID: 12798
  Gene Symbol: PLEKHG4
  Gene Name: pleckstrin homology domain containing, family G (with RhoGef domain) member 4
  ENST ID: ENST00000562744
  CDS Start-End: 300-491
accctcgctcacccacgcggccttcctggcgggagagcgcttccggcgtcctcgccaggcccggggagtgggcacggtggagctgccgaccgttggtcgctgccccaacccacgcactgcgacgccgcgggcctgaattgcagttcctgtgccctggcactaagactggcacctcctgcggcccatgcccttcgcctgcattgcccactgagtcccactcgactgtcttcagcgcggttcacactgagacccagccctctcccgctggccccgagcaggcccacctttaggagggcgtgatggaaaggcccctggagaatggggatgagtccccagactctcagggccatgccaccgactggagatttgctgtgtgcagtttcagggatgcctgggaagaggaggaacctgcttcccagatgcacgttaaggacccagggactcgggatgtccaaggccgggcagtgctgcttctgtgtgcccacagccca

SEQ ID NO: 166588 - DNA, 466 bp, Homo sapiens
  Payload ID: 12798
  Gene Symbol: PLEKHG4
  Gene Name: pleckstrin homology domain containing, family G (with RhoGef domain) member 4
  ENST ID: ENST00000567938
  CDS Start-End: 236-466
ttcacggttccccgcggctcggcccgggggcgtgagtgtcgccagcgggcgacgggggggcgcgcggcctgaattgcagttcctgtgccctggcactaagactggcacctcctgcggcccatgcccttcgcctgcattgcccactgagtcccactcgactgtcttcagcgcggttcacactgagacccagccctctcccgctggccccgagcaggcccacctttaggagggcgtgatggaaaggcccctggagaatggggatgagtccccagactctcagggccatgccaccgactggagatttgctgtgtgcagtttcagggatgcctgggaagaggaggaacctgcttcccagatgcacgttaaggacccaggtcctccaagaccaccagccggggccacccaggatgaggagctacagggcagccccttgtccaggaaattccagttacccccagctgcagat

SEQ ID NO: 166589 - DNA, 542 bp, Homo sapiens
  Payload ID: 12798
  Gene Symbol: PLEKHG4
  Gene Name: pleckstrin homology domain containing, family G (with RhoGef domain) member 4
  ENST ID: ENST00000565773
  CDS Start-End: 219-542
aaccccacctcagcaccagcctcctgcaccggactttgtggagaagggggcctgaattgcagttcctgtgccctggcactaagactggcacctcctgcggcccatgcccttcgcctgcattgcccactgagtcccactcgactgtcttcagcgcggttcacactgagacccagccctctcccgctggccccgagcaggcccacctttaggagggcgtgatggaaaggcccctggagaatggggatgagtccccagactctcagggccatgccaccgactggagatttgctgtgtgcagtttcagggatgcctgggaagaggaggaacctgcttcccagatgcacgttaaggacccaggtcctccaagaccaccagccggggccacccaggatgaggagctacagggcagccccttgtccaggaaattccagttacccccagctgcagatgagtcgggggatgcccagaggggcacagtagaaagctcctcagtcctgtcagaagggccaggcccctctggagtggagagtctcctatgcccc

SEQ ID NO: 166590 - DNA, 514 bp, Homo sapiens
  Payload ID: 12798
  Gene Symbol: PLEKHG4
  Gene Name: pleckstrin homology domain containing, family G (with RhoGef domain) member 4
  ENST ID: ENST00000568621
  CDS Start-End: 407-514
gtagtggccgtcgaggccgccgtctgttcgaaggctgtccgacttcacggttccccgcggctcggcccgggggcgtgagtgtcgccagcgggcgacgggggggcgcgcggtaggccctgcaacaaggccagggcctgggggggccggcaggagagcgaacccgaggcatcgtggtgccatggcggggccgcccccacgggcatgggcctgcagagcgtggccgtgaggacgctgagggcctgaattgcagttcctgtgccctggcactaagactggcacctcctgcggcccatgcccttcgcctgcattgcccactgagtcccactcgactgtcttcagcgcggttcacactgagacccagccctctcccgctggccccgagcaggcccacctttaggagggcgtgatggaaaggcccctggagaatggggatgagtccccagactctcagggccatgccaccgactggagatttgctgtgtgcagtttcagggatgcctgggaagaggaggaa

SEQ ID NO: 166591 - DNA, 6949 bp, Homo sapiens
  Payload ID: 12798
  Gene Symbol: PLEKHG4
  Gene Name: pleckstrin homology domain containing, family G (with RhoGef domain) member 4
  Uniprot ID: Q58EX7
  ENST ID: ENST00000563969
  CDS Start-End: 2536-3117
tggtcagccacccctggctggctccaggcccagctccccaatattccccactaggcctcagtgtgtcctcatttctatctgtacctttgccatcctgggccatgcaacctgtagctctcggcctcttctgtctcctttcaggctgagtctctgaatctgtctccatttgtgactctggtttccatgggatacatagatgtggagcctcaggagggcaggggtagtgtgatcagtgtcaggcgccccaaagcatttattctgtgccaggccctgtgctggatgctgaaagtacggaagtggataacatacagtctctgtttccatgaagcctacaatgcacattctctgtggagtggagaaaccagggcccagccctgcctctatctcagtatggctgtacctcccctgaatctgcctgctgtgcccagggtgccaggtcagctatagcctgtggcttgaggctcttctttgcctctggcattcacaggggtatgtgtgcccgccagcaggtcccccccggctcttagggctcctgggggacttggctggtgggtgctggtgggcagcagaaggggagggagggagcagaaggcagtgactcagtgggggtggccctgggacagaactggggaggaagccaaggttggatgatgcttcctgaagccaggagggtgggaagagaggtctggctgggagttagggatggagcaggacaactccaaggctcccctctggcagccagacctgctcatgaagaaggctcctcggtagctgcctgaaagtctggactctgggggctgggctgggctgggtggggagattgctgttggtcccactgtgcctgttgtaatccccaggttcatgaaagaggtgcctgccttagagccagggaagccgttgcacccggtgccccctctccccagggaccatgggcctgggcacactgtggggctcagggtcttctcctggtcgcagagctgaccttcccacaatcttcccacaaattctggggagtgtcgggccaggcccacatgccctaaagggacctcaaatcgcacagctacccacttgggtagctttcatcagttcaggattccctgactgcgggtgaaatgagggggcagggcaccaacacagcccgagtgctggcagcgggtgaacgtataacacagggagtcttccccagtcctcacggcaaccccaggagaaaaatgactttccatttttacaggtgaggagggtgaggctcaaagagcagagttcctggagcgcccccagcaggtaagtggagaagccaggcctgggctgggggctctggctccagaaccccacctcagcaccagcctcctgcaccggactttgtggagaagggggtaagggggtgccagggatggcaaaggggtagaggatctggtggactctggcaggcctgggtcagctccacccattggtctcactcccacccggatggcagccccatcccacgtgggatcatgcgacctgtctctgggtgcccgcggcgaggcagcaccccgcttccctacacagaaggccttcccctcccgtcggctcattcagccgcggaagcccctgggagaccccgccccgccccgtcccgcggtgccccccgcgcactcaccctcgctcacccacgcggccttcctggcgggagagcgcttccggcgtcctcgccaggcccggggagtgggcacggtggagctgccgaccgttggtcgctgccccaacccacgcactgcgacgccgcgggtgaggcgcgcggtctgcggggcccgggggtgcggcggggcggggctggcgggctgtccgggcccacggagaggacggcggcgggcgggggttgctgcagggcccgcaccttgtcttccgcgccggcagggctgtgccccgtcgagacctgctcgggctgtggctccgtcctccggcctccagggggcggcgcggcgctgcgcggcgccccggcggcactgccctcccttcccagcggccaggaggcggtgtcccgtgacgccgcgcggccgcgctgtagtggccgtcgaggccgccgtctgttcgaaggctgtccgacttcacggttccccgcggctcggcccgggggcgtgagtgtcgccagcgggcgacgggggggcgcgcggtaggccctgcaacaaggccagggcctgggggggccggcaggagagcgaacccgaggcatcgtggtgccatggcggggccgcccccacgggcatgggcctgcagagcgtggccgtgaggacgctgagggtgggcgcgcacggagcagaggcccacgggcgtccgacgggggacctggacagagggacacccttaacgttattccctcttcccaggcctgaattgcagttcctgtgccctggcactaagactggcacctcctgcggcccatgcccttcgcctgcattgcccactgagtcccactcgactgtcttcagcgcggttcacactgagacccagccctctcccgctggccccgagcaggcccacctttaggagggcgtgatggaaaggcccctggagaatggggatgagtccccagactctcagggccatgccaccgactggagatttgctgtgtgcagtttcagggatgcctgggaagaggaggaacctgcttcccagatgcacgttaaggacccaggtcctccaagaccaccagccggggccacccaggatgaggagctacagggcagccccttgtccaggaaattccagttacccccagctgcagatgagtcgggggatgcccagaggggcacagtagaaagctcctcagtcctgtcagaagggccaggcccctctggagtggagagtctcctatgccccatgtcctcccacctcagcttggcacagggtgagagtgacaccccaggggtagggttggtaggggacccaggtccaagcagggcgatgccatctggcttgagccctggggcattggacagcgaccctgtgggccttggagaccctttatcagaaatatcaaagctgctggaggcaggtaaggaaggctgggctagggaagtctgggaagggaatggggatgcctggagagatgagtgtcaagactttggaggtctctgaccctactcaggctgaagcccgggtccaagtaggggtctctggataggtggtccaaggcagacccaagtcatttcccttcccaagcccccagtggatccggcctccctaagcctgctgactgcctcctggcccaagacctctgttgggagctgctggccagtggtatggccaccttgccagggactcgggatgtccaaggccgggcagtgctgcttctgtgtgcccacagcccagcctggcttcagtctgagtgcagcagccaggaactcatccgcctcctgctgtacctgcgaagcatccccaggcccgaagtacaggcactgggactgacagtgctagttgatgcccgaatttgtgctccaagttcttccctcttctctgggctcagccaactacaagaagcagccccaggggccgtgtaccaggtgctgctagtgggaagcacgctgctgaaggaagtgccttccgggctgcagctggagcagttgccttctcagagcctgctgacccacatcccaacggcggggctgcccacttcgctaggaggaggcctgccttactgccaccaggcctggctggatttccgaaggcggctggaagctctactacagaactgccaggcagcttgtgccctgctccagggggccatcgaaagtgtgaaggctgtgccccagcccatggagcctggggaggtcggtcagctgctacagcagacagaggtcctgatgcagcaggtgctagactcgccatggctggcatggctacaatgccaggggggccgggagctgacatggctgaagcaagaggtcccagaggtgaccctgagcccagactacaggacggcaatggacaaggctgacgagctatatgaccgggtggatggattgctgcaccaactgaccctgcagagcaaccagcgaatacaggccctagagttggtccaaacactggaggcccgggaaagcggactgcaccagattgaagtgtggctgcagcaggtgggctggccagcactggaggaggctggggagccctcgctggacatgctgctccaggcccaaggctcttttcaggagctgtaccaggttgcccaggagcaggtcaggcaaggggagaagtttctgcagccgctgactggctgggaggcggctgaactggacccccctggggcacgctttctggccctgcgagcccagctgactgaattctctagggctttggcccagcggtgccagcggctggcggatgctgagaggctgtttcagctcttcagggaggccttgacgtgggctgaggaggggcagcgagtgttggcagagctggagcaggaacgcccgggggttgtgttgcagcagctgcagctgcactggaccaggcaccctgacttgcctcctgcccacttccgaaagatgtgggctctggccacggggctgggctcagaggccatccgccaggagtgccgctgggcctgggcgcggtgccaggacacctggctggccctggaccaaaagcttgaggcttcactgaagctaccaccggtgggcagcacagctagcctgtgtgtcagccaggtccccgctgcacctgcccaccctcccctgaggaaggcctacagcttcgatcggaatctggggcagagtctcagtgaacctgcctgccactgccaccatgcggccactattgctgcctgccgcagaccagaggctggaggaggtgccctgccccaggcatcccctactgtgcctccaccaggcagctctgaccccaggagcctcaacaggctacagctggtgctggcagagatggtggccacggagcgggagtatgtccgggctctagagtacactatggagaactatttccccgagctggatcgccccgatgtgccccagggcctccgcggtcagcgtgcccacctctttggcaacctggagaagctgcgggacttccactgccacttcttcctgcgtgagctggaggcttgcacccggcacccaccacgagtggcctatgccttcctgcgccatagggtgcagtttgggatgtacgcgctctacagcaagaataagcctcgctccgatgccctgatgtcaagctatgggcacaccttcttcaaggacaagcagcaagcactgggggaccacctggacctggcctcctacctgctaaagcccatccagcgcatgggcaagtacgcactgctgctgcaggagctggcacgggcctgcgggggccccacgcaggagctcagtgcgctgcgggaggcccagagccttgtgcacttccagctgcggcacggaaacgacctgctggccatggacgccatccagggctgtgatgttaacctcaaggaacaggggcagctggtgcgacaggatgagtttgtggtgcgcactgggcgccacaagtccgtgcgccgcatcttcctttttgaggagctgctgctcttcagcaagcctcgccatgggcccacaggggttgacacatttgcctacaagcgctccttcaagatggcagaccttggtctcactgagtgctgtgggaacagcaacctgcgcttcgagatctggttccgccgccgcaaggccagggacacctttgtgctgcaggcctccagcctggctatcaagcaggcctggacagctgacatctcccacctgctttggaggcaggccgtccacaacaaggaggtgcgcatggctgagatggtgtccatgggtgtggggaacaaggccttccgagacattgctcccagcgaggaagccatcaacgaccgcaccgtcaactatgtcctgaagtgccgagaagttcgctctcgggcgtccattgccgtagccccgtttgaccatgacagcctctacctgggggcctcgaactcccttcctggagaccctgcctcttgctctgttctggggtccctcaacctgcacctgtacagagacccagctcttctgggtctccgctgtcccctgtatcccagcttcccagaggaagcagcactggaggctgaggcagagctgggcggccagccctctttgactgctgaggactcagagatctcgtcccaatgcccatcagccagtggctccagtggctctgacagcagctgtgtgtcagggcaggccctgggtaggggcctggaggacttaccctgtgtctgagcccgggactggacgagcagtagatccagcagcctgcagctccaaggaacattgcctctctggatctgctgtgaccagggtgtggctgacacctgggctacctccaacctacatgtgcaacgctgttgactaccctttctgatgtgtgtggccattggactaactggcacggggcctctctagggaagtctggttgtagagcctgaataggctcctggccccatgaccccttctcctgtccccagctcccatcccagttgtgggttaagaataggctagagcagacattgggtgtttccatgctgtaggctggtgggggaccatgtgcctctaggcagtgactagggtgcccccacccctcaggaagaacacaggtgggctcctagcagctgatccccaatgcctggccttaaagccgagctcagttaccatagggacaggtccacctctactgggccctcatgcttgcctttcctggcccccaggcccagcccctttttactggggcagtttcgttattttgacttgatgccttttgaataactttcaatagaattgtctaaaattatcttactggttgttaggcctttggtgtctcagagaaggagtctaggtctttgatgtgtgatttaatcttttatttgtttataataaaaaatagactgatatgt

SEQ ID NO: 166592 - DNA, 2182 bp, Homo sapiens
  Payload ID: 12798
  Gene Symbol: PLEKHG4
  Gene Name: pleckstrin homology domain containing, family G (with RhoGef domain) member 4
  Uniprot ID: Q58EX7
  ENST ID: ENST00000393966
  CDS Start-End: 150-731
gccctggcactaagactggcacctcctgcggcccatgcccttcgcctgcattgcccactgagtcccactcgactgtcttcagcgcggttcacactgagacccagccctctcccgctggccccgagcaggcccacctttaggagggcgtgatggaaaggcccctggagaatggggatgagtccccagactctcagggccatgccaccgactggagatttgctgtgtgcagtttcagggatgcctgggaagaggaggaacctgcttcccagatgcacgttaaggacccaggtcctccaagaccaccagccggggccacccaggatgaggagctacagggcagccccttgtccaggaaattccagttacccccagctgcagatgagtcgggggatgcccagaggggcacagtagaaagctcctcagtcctgtcagaagggccaggcccctctggagtggagagtctcctatgccccatgtcctcccacctcagcttggcacagggtgagagtgacaccccaggggtagggttggtaggggacccaggtccaagcagggcgatgccatctggcttgagccctggggcattggacagcgaccctgtgggccttggagaccctttatcagaaatatcaaagctgctggaggcaggtaaggaaggctgggctagggaagtctgggaagggaatggggatgcctggagagatgagtgtcaagactttggaggtctctgaccctactcaggctgaagcccgggtccaagtaggggtctctggataggtggtccaaggcagacccaagtcatttcccttcccaagcccccagtggatccggcctccctaagcctgctgactgcctcctggcccaagacctctgttgggagctgctggccagtggtatggccaccttgccagggactcgggatgtccaaggccgggcagtgctgcttctgtgtgcccacagcccagcctggcttcagtctgagtgcagcagccaggaactcatccgcctcctgctgtacctgcgaagcatccccaggcccgaagtacaggcactgggactgacagtgctagttgatgcccgaatttgtgctccaagttcttccctcttctctgggctcagccaactacaagaagcagccccaggggccgtgtaccaggtgctgctagtgggaagcacgctgctgaaggaagtgccttccgggctgcagctggagcagttgccttctcagagcctgctgacccacatcccaacggcggggctgcccacttcgctaggaggaggcctgccttactgccaccaggcctggctggatttccgaaggcttattgccctcaatcacaggaggtcggtcagctgctacagcagacagaggtcctgatgcagcaggtgctagactcgccatggctggcatggctacaatgccaggggggccgggagctgacatggctgaagcaagaggtcccagaggtgaccctgagcccagactacaggacggcaatggacaaggctgacgagctatatgaccgggtggatggattgctgcaccaactgaccctgcagagcaaccagcgaatacaggccctagagttggtccaaacactggaggcccgggaaagcggactgcaccagattgaagtgtggctgcagcaggtgggctggccagcactggaggaggctggggagccctcgctggacatgctgctccaggcccaaggctcttttcaggagctgtaccaggttgcccaggagcaggtcaggcaaggggagaagtttctgcagccgctgactggctgggaggcggctgaactggacccccctggggcacgctttctggccctgcgagcccagctgactgaattctctagggctttggcccagcggtgccagcggctggcggatgctgagaggctgtttcagctcttcagggaggtctgagcccgggactggacgagcagtagatccagcagcctgcagctccaaggaacattgcctctctggatctgctgtgaccagggtgtggctgacacctgggctacctccaacctacatgtgcaacgctgttgactaccctttctgatgtgtgtggccattggactaactggcacggggcctctctagggaagtctggttgtagagcctgaataggctcctggccccatgaccccttctcctgtccccagct

SEQ ID NO: 166593 - DNA, 489 bp, Homo sapiens
  Payload ID: 12798
  Gene Symbol: PLEKHG4
  Gene Name: pleckstrin homology domain containing, family G (with RhoGef domain) member 4
  ENST ID: ENST00000569875
  CDS Start-End: 1-378
gtgcgcatggctgagatggtgtccatgggtgtggggaacaaggccttccgagacattgctcccagcgaggaagccatcaacgaccgcaccgtcaactatgtcctgaagtgccgagaagttcgctctcgggcgtccattgccgtagccccgtttgaccatgacagcctctacctgggggcctcgaactcccttcctggagaccctgcctcttgctctgttctggggtccctcaacctgcacctgtacagagacccagctcttctgggtctccgctgtcccctgtatcccagcttcccagaggaagcagcactggaggctgaggcagagctgggcggccagccctctttgagtctgagcccgggactggacgagcagtagatccagcagcctgcagctccaaggaacattgcctctctggatctgctgtgaccagggtgtggctgacacctgggctacctccaacctacatgtgcaacgctgttgactacc

SEQ ID NO: 166594 - DNA, 11513 bp, Homo sapiens
  Payload ID: 12799
  Gene Symbol: PLEKHG4B
  Gene Name: pleckstrin homology domain containing, family G (with RhoGef domain) member 4B
  Uniprot ID: Q96PX9
  ENST ID: ENST00000283426
  CDS Start-End: 51-3866
cgggggaccccacttgtgtgcagcctagacgctggttcagggagtcgtacatggaagccttgcggaaccccatgcccctgggcagctctgaggaggccctcggggacctggcctgcagctccctgactggagccagcagggacctggggactggggcagtagccagtgggacccaggaggaaacctctggcccccggggagacccccaacagaccccaagtctagagaaggagaggcacacacccagccggacaggtccaggagctgcagggcggactcttcccaggagatctcggtcctgggaaagggcacccagaagctccagaggggcccaggctgcagcctgccacacctcccaccactcagcaggctccaggcctgggggccacctaggaggacaagctgtggggaccccaaactgtgtcccagtagagggtcccggctgcaccaaagaggaagacgttcttgcatcctcagcctgtgtcagcacagacggcggcagcctccattgccacaaccccagcgggccttccgatgtgcctgcccggcagccacaccccgagcaagaagggtggccacccggcacaggagacttccccagccaggtgcccaagcaggtgctggacgtcagtcaggagctgctgcagtccggggtcgtcaccctcccagggacccgagaccgtcatggcagagcagtggtgcaggtccgcaccaggagcctgctctggaccagggaacactcgtcctgtgctgagctgacccgcctgctgctgtacttccatagcatccccaggaaagaggtccgggacctggggctggttgtcctggtggatgcacgcaggagtccagctgcccctgccgtctcccaggccctctcaggattgcagaacaacacatctcctataattcatagtatcttgctgttggtagataaagaatctgcatttaggcctgacaaggatgcaataattcagtgtgaggtcgtgagctccctgaaggccgtgcacaaatttgttgacagctgccagctgaccgcagacctcgacggctcctttccctacagccatggtgactggatctgcttccgtcagaggctggaacacttcgctgcaaactgtgaagaagccatcattttcctacagaattcattctgctccctgaacacccacagaaccccaagaacagcccaggaagtcgccgagttaattgaccagcatgagacgatgatgaagcttgtcctggaagacccactgcttgtgtctctcaggctggaggggggcaccgtcctggcgcggctgaggagagaagagcttggcacagaagacagccgggacaccctggaggccgccacaagcctgtacgaccgagtggatgaggaggtgcacaggctggtcctcacctcgaacaatcgtctccagcagctggagcacctccgggagctggcgtcactcctggaagggaatgaccagcaatcctgccagaaaggactacagctggcgaaggagaacccgcaacgtacagaggaaatggtccaggatttcagaaggggcctgagcgccgtggtcagccaggctgagtgcagggagggagagctggccaggtggacccgctcgtccgagttgtgcgagacggtgagcagctggatggggcccctggacccggaggcttgtccctcctcacccgtggctgagtgtttgaggagctgtcaccaggaggctacctcggtggctgcagaggccttccccggggcaggtgtggcagtgctgaagcctcatgccctggggaaaccgtgggcatcacagcaagacctgtggctgcagtacccccagacccggctccgtctggaagaggccctttctgaggctgccccagaccccagcttaccgccccttgcccagagccccccaaagcatgagcgtgcccaggaggccatgaggaggcaccagaagccaccctcattccccagcacggacagtgggggtggtgcctgggaacctgcgcaaccactgtccggcctccctggacgagcgcttctgtgtggacaggacggggagaccctgcgcccagggctgtgtgctctgtgggacccactgtccctcctcaggggccttccaggggcaggggccaccacggcccacctggaggacagctctgcctgttcctctgagcccacccagaccctggccagccgccccaggaaacatccccagaagaaaatgataaagaaaacgcaaagtttcgagatacctcagcccgacagtggccccagggactcctgccagccagaccatactagtgtcttcagcaagggcctggaggtaaccagcactgtagccacagagaagaagctcccgctgtggcagcatgccaggagccccccggtcactcagagccggagtctgtcctccccctcggggctccaccctgctgaggaggatgggaggcagcaggtgggcagcagccgactgaggcacatcatggccgagatgatcgccacagagagggagtacattcggtgcttaggatacgtcattgacaactattttccagaaatggaaagaatggacttgccccagggccttcgagggaagcaccacgttattttcggcaacttggagaagctccacgacttccaccagcagcacttcctccgggagctggagcgctgccagcactgccccttggccgtgggccgcagtttcctgagacacgaagagcagtttgggatgtacgtgatctacagcaaaaacaagccgcagtcggatgccctgctcagcagccatggcaacgccttcttcaaggacaagcagcgggagctaggtgacaaaatggacctggcctcctacctgctgcggcccgtgcagcgtgtggccaagtacgcgctgctactccaggacctgctcaaggaggccagctgtggcctggcccaggggcaggagctgggcgagctccgagccgccgaggtcgtggtctgcttccagctgcgtcacggcaatgacctgctggccatggacgccatccgcggctgtgacgtgaatttgaaggaacaggggcagctgagatgccgggatgagtttatcgtttgctgcgggaggaagaagtatctgaggcatgtgttcctctttgaagacctcatcctgtttagcaagacccagaaggtggagggcagccacgacgtctacctgtacaagcagtccttcaagacggccgagatcgggatgacagagaacgtcggggacagtggcttgaggtttgagatttggtttcgcaggcggcggaaatctcaggacacctacattctccaagcaagctcggcagaggtcaagagtgcatggaccgatgtcatagggaggatcctgtggcggcaggcactaaagagcagagaactcagaatccaagaaatggcatccatgggtataggcaaccagccattcatggatgtcaagcccagagaccggacccctgactgtgcagtgataagcgaccgggctcccaaatgtgcagtgatgagcgaccgagtccccgacagcatcgtcaagggcacagagtcacaaatgagagggtccacagcggtgtcctcctctgaccacgccgcccccttcaagcgaccacactccaccatctcagacagcagcacctcctcttctagcagccagtcctcctccatcctggggtcgctgggcctgcttgtgtcctccagcccagcccacccgggcctatggagccctgcccacagcccctggtcatctgatatcagagcctgcgtcgaggaagatgagccagagccagaactagagacgggcacccaggctgcagtgtgtgagggggctcctgctgtgctgctgagccgcacacgccaggcctgatgactgtcagggtggcagtgcccatcatgtggctagaacaatacagagggagcagcacgccaggcctgatgactctgggggtggcggtgcccatcgcgtggctggaacgatccagagggaatagcacagcaggtgtccaggtatttcccaggattttagacattccctaacattttcaaacaaatttataattttgtcttatttaaaaaacaaaccttccacttccacccaagacaacagcataggaaacagacctaaaacaagacaaaaaaagactaaacatgaaacaaaagatgtcaagacacaagacatttggcaacaaaggaccgcgatccctgagagacaggaaaacgggaggtgagcccggtgatggcctcagacctccctccgccttgagagtttgcaggcctcagtgcagggaggggcccaggaagagcccagcagcctccgtgagttgaagagaccaagtcagcaggagttggcaggtcagagtgccagagagagatgcctgcatggggaaagactcaccagatcagcccctccagcacctagtgggttgctacccattcgcacactcaaacagggaggctaccaaggctgggagcaacctttgaaaagaccaaagatcaattcctggtactcatgtgggctggggacaggacccgttcccaccagccagactagggaaactctcaatagatcaattcctgatactcatgtgggctggggacaggacccactcccaccagccagactaggaaaactcccaatctgtgagcattaggtggagttctcagaaaatcttgcctcaggaatggggataattagccctagactgagccctgctcctgactcgcctacaaaatcataaaagcaagacctaaaatgatcaaaccattcccagataattcactttatcccagaacaaagctccagatgatctaggggttaccaaagtgtccacaccctgcaaggtaaactcacagtgcctgacctcggagtgccaggcgtgcagaggagcagccaagggcaaacactccaaggagagtcgcctggcaaagccaaccacccagagccagcgtctgtgctagaatcacagaattcaaactgtggctgaaatcgcagcccaggcgtccagaaagttaaagttaagaacctataatcccagcactttgggaggccgaggcaggcggatcacgaggtcaggagatcaagaccatcctggctaacatggtgaaaccccgcctactaaaaatacaaaaaattagccgggcatggtgttggccgcctgtagtcccagctacttgggaggctgaggcaggagaatggcatgaacccgggaggcggagtttgcagtgagctgagatcacgccactgcactccagcctgggcgacagagcaagactctgtctcacaaaaaaggttaagaaatgacttaatggaagagattcagaagacccagaccgaccttacagggatgagaaactacaatattgacagtggaaactatcctggatggggtaacagattggatttcacagaagagaccatgaggcaccttgaagacacatcagtggaaactatttgcatttgttgggcctccagagagacagaaccaataggagatagctagatatatatacagacagatagatagatagatagatcgatagatagatagatagatagatagatagatagatagactgacagacagatgagaggggccttaggggcattggctgacacaattttggcaggtcaagagccccacaataggccatccacaagctggagacccaaggaagctgctagtgtgcccagtccgagtcctaaagcctcagagccagggaagccagtggtgtaattctcagaggccaaaggcctgagaacctgggggccactggtataagtctgagtccatagacccagtgaactccaaacacaagagatacgagtgcacatcataatcaaattgcatataaccagtgataaacagaaaatcctaaaaccagtcagaggacaagggcatgttctgttgggaggcacaaagctgatgaggatggctgactcctcaggagcagcatgggtgagaggcagtggaatgtactaaggagaaaactgccaaattcacattctgtacctgacaaaatctttccgaagcgatggtgacataaagacattttcatacacacagaaactaagagtttcatccccagcagacctgcactacaagaaatgttaaatgatgtgcttcagggaaaagaaaaatgaagagcatgtgcaccatccaggattttcctcgttatttaaatccctttagcccatctcccatttgccccaaggaatgagtgctggcagtgagctgcactttttttttctctaaacgggaaatgggttaaaagatgagtggcttggccgggtgcggtggctcatgtctctaatcccagcactttgggaggctgaggccagaggatcacttgacttgagcccaggaactggggggtcatgctgggaaacatggcaagaccgcatctctattaaaaataaataaaagttaactgactgtttaaacaaaagtattaacgtatctgcggtttgtactatacgcacaggtaaactgtgtgaccacagcagcgtgatggctgggagacgctggatgtgatacgtgaagtgaggggtatcacttgaaggtagattgtggtaagctaaagatgtactgataaacccttgaaacacccactaacaaagaattacagctaatagaccaacagaggagataaaatggaatttttaaaaatccagtccaaaaatacgtagagaaagagggaaagggaagaatggacttgggggcgacacagaagacaagtggagagagactgaagcagccactggccatcacagcaaacacaagcagggcgcaggacgccggcaagccacagacaggcctgctctctgaattggtgaccacatgagtaacttcacgggtctgttctatgtccagagttgtcaaactgcatgctttaaagatgtgcagtggatcgtatgtcgcttaaatcccaacaaagcagtatttttttaaagtacaatcatgcacacagcacttcccctgggaggcaggggctgtgcccacagaagtcgttacctctgcgtcctgagtatggacagccaccatcacacagccccagaggccgcccaggctctagccacactctggcactgcctgggacaggtgccctcaggaacccaaatgccactgcccccgtgaaagccacttcaagcgtgttgcttcaaatcagaaggcatctacgcctgtggaagaggaggctgctgggggcccaggtgtgcagggggcagggccaggtgcaggggcacagcttatgcctgtggccaacccactggggagcaaggctggggatatgcccaggccagcagggccagcaggagtgactgcgccatcctgaacacgtccttgggcctcccaggaccttggtgcctcccatctgggctggcacaagcctccagtcaaaagatgggtctctctctcctgatagcatggagcctggatgtgggaatggagccacaccagccccacgggagccccacgacccatcgggctgtgggatgcatccccacggccgggacccctcagcctgtgacttggtctgggcagatgcaaaggccaccctgcagggctgaggtgtctgtggggaaggaggtgcccagccctgggaggccatcttgctcctgctttttatttaacccatggggctctttggcctcattttctgttttttgagtttctcgtgcactccaaactgtcctggagccagccctggtgtgaaacagaggcttcctgctggcagaagaggcccaccgagttacgtccacaccagctggccctgggcacctctctctctggccttctgtccacactgggatttggctctgatttccagaaggcagggttaggaaacacctgtttccaggcagagtaatgcttctgtctgaatcaggcctcatgggcttcaccagcagacacgaaggtttcatttagatggcgaacacgtgttctcatttctccagggttctggacccgtgagctgaagcaggtgctgagaagtgggagaggcggccactgggtccctcagggtcactcaccccgccacgtgaggccacttccgcccagcactgggggcgctgggagctgaggggcccacaggggacgtgggagacagccccgatgcgtccccatccgcagtgacgctagcgcggagtcgtcgccaagcacgtggagggacagccctggagccctggcctggcccagcatctcccagagtcacttcctgatgcctccccagccctgcccaggaagggtttgtggccacagccccacagcggccccctcgcctcgaccaccagtgcctccttccaagctgcctgagcaatcctgggtggtgagctccaccactcccacccacgcctcagcactgggaccccccagggatggtgtggggattcctgccccccgtccatgcctcagcactgggagctgggaaggtgtgtgatttcctcccccacctcagtactgggacccccaggaagggtgtgtggccccaccatcctgaatgctcagggctggtggtcagcgaggtggtttctaaaccaagccctgggaggagccatcctgggactgtgcttggacaaggttggggctcccgcagtgagctctagccctccccaggaccctcccacggccccagggtgccggccttcagattgaccccattcgtggatgagtctacaaggctccccagtgcccagcaagagtgtttttacattcagaggtgaggaaggggtgccggcatctgccccagacacaaccgggcaggtacagatgtcatccccttgaggacagcagggaggcgactcaggagaggctgatcagacgggagccgcatccccatcaccttccagagagacctcttcttttgccaggtgtcgtgagggctgtggcttagctgggcctgcgtccatccccggttctggggagatgcccgggcccctcctggatggcagcagcagtggaggtttgggttttgagggagccctaagaacctgagagacttagatggagcatggcacgccctggagagtccacgtccccagacccctcatgccaacaccattccacccagcagtttcttccctgtggtcagaacaaaacccccaagcctcaggcctcaggctggttttctgacaggcaaaatgctccttacataaggaaagacctttccttggctgaccctaaagtagccaaggggagctcacatcgcctggcctgccgccaccaccaggctgcctgaccagctcaccgccttgttctagatgcttctgaagcaacagctcgcctggccccacccccatcaagcatctgctgggcagcctccctccccggcccgcctgtagctcccaaaggtctcaagcctcaacatcctggtaaccaagtgcacccagagggctggcagggtcacatggaggcaggggacccttggccccagggtggtcgtcttcccaggaggtccgcctgtcaggtcagagggcagcaggaggccaccccacctccccgggttccctcgagcattcctttgtcaggagcagctcccccaggatccaggcatccctggcccccctttgcccccgccctgctctcaggagccccctgccaggtgctctgaccacaggaaacaggagccctcagggccactgccagaggacggattctgctgccaaccagaggtcctggggctggcggcgctggtgtgcctgccctgggccttcagcagcccccataaggagaaagctccagcctcccgttcagagaaggctccatcctggggacacgcctctcccaaggtcacccacgtgggggctttgttactcatgcttcccagactgcgtgctgtgtcagagttttcacacctgcctgatgtcctgggggggctcacagaggaccgaccctgcagggagatgctgacccaccctgagacccaggagaagaaaacggccagggtccaggctgctcccaccatccctgggggattagcaccttggctgagcccgaactgaccacctggggcgtaggtccaagatttaattacaaaacgataggtgaatgtgggttctgtgtgcctgtgacatagagaatgttttccacaccgcgtgtgaaatgacgagagcttttgtgtcacacatgtagctgctacgagacagacgctcttgttccggatcagagcagcagacagaaccggcacttttagggtccaaaccctgttgcccacagaacgcccatgacaccagctgggtggagctgccgccgagtccacgccccgtctggctgggacctggagctcccctcaagctgcagatccactctgcaccacaaggtggcctcgcagaggagcctcccgagctttggaaccagaggcaggctcagcgatgctctccatccggcctggccccaccgtgtgtatcaggtgtcagaggccttgctgggtgccaggccacgtctgtgctgtcacagctttgaggggccagcgggtcctagggagaggcccgtgcgacgtgagtaacagcagtttttcttctgacagctgggatggaggtgggtcctccagggagtgccccagtcctcgagagccagacttgtgcacgggcctggaaatgaaggtctcaggcaggggctgcgcacaccgatggtcagcattgccgttcggggcctgcagtcgcccataatgggccctgccccctaggcctggcctcttttgctttcctcctggatggttcctctacccctggtccagcagggactcagcagtgcctgccagctgcagacccccatgctcctgcagcctggaaccctcctgccctccaaaggtcatggggtgacccagggtgggaacaccagaccccctcaccccgtgtccaccgcccatggccgggctcacagtgtctcagagccgtggtgagccatcctaggaccagtgtacctcacaacctttcagaccagtgaaggccagtgggctgggtggtccaggcatgtccccaacgcaggtccagccatctctgcacagaactggaatctcggttcatttcggtttcagcaggtcccatgtagttagcaggacagcacttgagttaggtctgagaaagaacgcctgtttgtcatggcatttcctgtaaggagcccagagccgtggccccaggttgggacggcggcgccagagctgggcctgagtctgacccaacctgtgctgagtggtcctgctggaatgggaaccccaagaggaccacccctctctaaaagaagggaaaacagtaagcgagagggaggctgcaggggcccagaccttggctgaccttcctagccatggtctccaccctccgagacccaggggccccgcagtgacagcagggtgttgggccacacagagcccgagtaggtaaaggaaggttctggaaaccacttttcagaacccaaaaggtgtctgggaaatggcgttacctgccactgttgttaagtgtttactttgtatcaatactgaattgttaaaaattttaatcataaaaaccaatggaacatgtttt

SEQ ID NO: 166595 - DNA, 1360 bp, Homo sapiens
  Payload ID: 12799
  Gene Symbol: PLEKHG4B
  Gene Name: pleckstrin homology domain containing, family G (with RhoGef domain) member 4B
  ENST ID: ENST00000502646
  CDS Start-End: 1-1266
gcacccagaagctccagaggggcccaggctgcagcctgccacacctcccaccactcagcaggctccaggcctgggggccacctaggaggacaagctgtggggaccccaaactgtgtcccagtagagggtcccggctgcaccaaagaggaagacgttcttgcatcctcagcctgtgtcagcacagacggcggcagcctccattgccacaaccccagcgggccttccgatgtgcctgcccggcagccacaccccgagcaagaagggtggccacccggcacaggagacttccccagccaggtgcccaagcaggtgctggacgtcagtcaggagctgctgcagtccggggtcgtcaccctcccagggacccgagaccgtcatggcagagcagtggtgcaggtccgcaccaggagcctgctctggaccagggaacactcgtcctgtgctgagctgacccgcctgctgctgtacttccatagcatccccaggaaagaggtccgggacctggggctggttgtcctggtggatgcacgcaggagtccagctgcccctgccgtctcccaggccctctcaggattgcagaacaacacatctcctataattcatagtatcttgctgttggtagataaagaatctgcatttaggcctgacaaggatgcaataattcagtgtgaggtcgtgagctccctgaaggccgtgcacaaatttgttgacagctgccagctgaccgcagacctcgacggctcctttccctacagccatggtgactggatctgcttccgtcagaggctggaacacttcgctgcaaactgtgaagaagccatcattttcctacagaattcattctgctccctgaacacccacagaaccccaagaacagcccaggaagtcgccgagttaattgaccagcatgagacgatgatgaagcttgtcctggaagacccactgcttgtgtctctcaggctggaggggggcaccgtcctggcgcggctgaggagagaagagcttggcacagaagacagccgggacaccctggaggccgccacaagcctgtacgaccgagtggatgaggaggtgcacaggctggtcctcacctcgaacaatcgtctccagcagctggagcacctccgggagctggcgtcactcctggaagggaatgaccaggtcagagctgcaggaggaaggcggcccggtcagcatcccctccaggccaggctggccaaggcaaccctctcaccttcacactgtgtctttagggccttgatctgatttccatttggaatgaaattatgtcaggatagggcatgccttgctgcttgtgtaaaaagaaataaattttattttttacgtgagagatactgga

SEQ ID NO: 166596 - DNA, 4715 bp, Homo sapiens
  Payload ID: 12800
  Gene Symbol: PLEKHG5
  Gene Name: pleckstrin homology domain containing, family G (with RhoGef domain) member 5
  Uniprot ID: O94827
  ENST ID: ENST00000340850
  CDS Start-End: 224-3244
agtttgcgctgagtcgactgagcccgtcccgcggctcccgtccccctctccccgcgcgccccatgaggctttggcagtctcggcccgagccttagagccttagacaccggggaggagaccctggtcctgttcctaggtatgtcaccacgccgactgccagcagctgcaccgccgggggcccctcaacctctgcgaggcctgtgacagcaagttccacagcaccatgcattatgatgggcatgtccgcttcgaccttcccccacaaggctctgtgctggcccggaacgtgtccacccggtcatgcccgccgcgcaccagccccgcagtggacttggaggaggaggaggaggagagctctgtggatggcaaaggggaccggaagagcacaggcctgaaactctccaagaagaaagcaaggaggagacacacggatgacccaagcaaggaatgcttcactctgaaatttgacctgaatgtggacattgagacagagatcgtcccagccatgaagaagaagtcactgggggaggtgctgctgcctgtatttgaaaggaagggcattgcgctgggcaaagtggacatctacctggaccagtccaacacacccctgtccctcaccttcgaggcctacaggttcgggggacactaccttcgtgtcaaagccccagccaagcctggagatgagggcaaggtggagcagggcatgaaggactccaagtccctgagtttgccgattctgcggccagctgggaccgggccccccgccctggagcgtgtggacgcccagagccgccgggagagcctggacatcttggcccctggccgccgccgcaagaacatgtcggagttcctgggggaggcgagcatccccgggcaggagccccccacgccctccagctgctctctgcccagcggcagcagtggcagcaccaacactggcgacagctggaagaaccgggcggccagtcgcttcagcggctttttcagctccggccccagcaccagcgcctttggccgggaggtagacaagatggagcagctggagggcaagctgcacacctacagcctcttcgggctgcccaggctgccccgggggctgcgcttcgaccatgactcctgggaggaggagtacgatgaagacgaggatgaggacaatgcctgcctgaggctggaggacagctggcgggagctcattgatgggcatgagaagctgacccggcggcagtgccaccagcaggaggcggtgtgggagctgctgcacacggaggcctcctacatcaggaaactgcgggtgatcatcaacctgttcctgtgctgcctcctgaacctgcaagagtcagggctgctgtgtgaggtggaggcggagcgcctgttcagcaacatcccggagatcgcgcagctgcaccgcaggctgtgggctagcgtgatggcgccggtgctggagaaggcgcggcgcacgcgagcgctgctacagcccggggacttcctcaaaggcttcaagatgttcggctcgctcttcaagccctacatccgctactgcatggaggaggagggctgcatggagtacatgcgcggcctgctgcgcgacaacgacctcttccgggcctacatcacgtgggcggagaagcacccacagtgccagaggctgaagctgagcgacatgctggccaaaccccaccagcggctcaccaagtacccgctgctgctcaagtcggtgctgaggaagaccgaggagccgcgcgccaaggaggccgtcgtcgccatgatcggctccgtggagcgcttcatccaccacgtgaacgcgtgcatgcggcagcggcaggagcggcagcggctggcggccgtggtgagccgcatcgacgcctacgaggtggtggaaagcagcagcgacgaagtggacaagctcctgaaggaatttctgcacctggacttgacagcgcccatccctggcgcctccccggaggagacgcggcagctgctgctggaggggagcctgaggatgaaggaggggaaggacagcaagatggatgtgtactgcttcctcttcacggatctgctgttggtgaccaaagcagtgaagaaggcagagaggaccagggtcatcaggccacccctgctcgtggacaagattgtgtgccgggagctacgggaccctgggtccttcctccttatctacctgaatgagtttcacagtgctgtaggggcctacacgttccaggccagtggccaggccttgtgccgtggctgggtggacaccatttacaatgcccagaaccagctgcaacagctgcgtgcacaggagcccccaggcagtcagcagcccctgcagagcctggaagaggaggaggatgagcaggaggaggaagaggaggaggaggaggaggaggaggaaggcgaggacagtggcacttcagctgccagctcccctaccatcatgcggaaaagcagcggcagccccgactctcagcactgtgcctcagatggctccacggagaccctggccatggttgtggtagagcctggggacacgctgtcctcccccgagttcgacagcggtcctttcagctcccagtctgatgagacctctctcagcaccactgcctcatctgccacgcccaccagtgagctgctgcccctgggtccggtggacggccgctcctgctccatggactctgcctacggcaccctctccccaacctccttacaagactttgtggccccaggcccaatggcagagctagtgcctcgggccccagagtccccacgagttccttcccctccaccctcgccccgtctccgccgccgcacccctgtccagctgttgagctgcccgccccacctgctcaagtctaagtccgaggccagcctcctccagctgctggcaggggctggcacccatgggacaccctctgcccccagccgcagcctgtcagagctctgcctggctgttccagccccaggtattaggactcagggctcccctcaggaagctgggcccagctgggattgccgaggggcccctagccctggcagcggtcctgggctagtcggctgcctggccggggaacctgcaggctcccacaggaagaggtgtggagacctgccctcgggggcctctcccagggtccagcctgagcccccaccaggggtctctgcccagcacaggaagctgaccctggcccagctctaccgaatcaggaccaccctgctgcttaactccacgctcactgcctcggaggtctgagcagagggaggcccccaagagtgccattgaccaagagacagcagacagcctgcctcctggggcgtgccggcacctgcttcagctactgcctcctgtatgcatgagccggatgctgggcaggatccctgcctacgcccgggcccgatttgcgctttgccggactggatggagtggaggaggcccaggccacagtaccaccccacctgcccaggcagcccctcgtcacctactccccgaagttaccagctcagctcgagtcttcagggctgggctcctaggctgcccatcctacttctaccctcactggcctccagtgggattcactcctgccctgcccccaccttcccagtcccacaggccacccctggcttgggctgggttctgtgaagttacgtatttattgagcttttggttcttttataaagacttgtctagactccactgggaagagtcctttgctttggggcccagtgactcggggcacttgagttcagggcggcctccttgtgttcctgtgctcctccacttgccacggatgggccacggatggagcttgccatgggaagcactgggaagtaatggggtgtggggtgccaccagaccaacacccccagacttccccaccttcagccaccatcagagcctctccccaggtgccccccggggattcagggctgaatctgcccagttcccacactcaggccagccctcttgggaaggtgggtcctccatgggggtcccttcaggaactttttttttttttttaatacagagtctcactctgtcacctaggttggagtgcagtggtgtgatgtcggctcactgcaacctctgcctcccgggttcaaacgattctcctgccccagccactctagtagctggaactgcaggtgtgcaccaccacgccgggctagtttttgtattttaagtagagacggcatttcaccatattggtcaggctggtctcgaactcctgaccccaagtgttccgcccgcctctgcctcccatagtgctagaattacaggcctgagctactgcgcttggccccttgcggtacttttggcccaacctcctccatggctggggacgcggaggccgagagagaagtcacttgccctggctctaccttgaagtggttctcagggttggggcgagagtcggggtggggaccgagatgcagctctatcctgtgcccctggtcgcagcaggcagcccagcgcttcgcgtgttctacttggcctgtccgctgccgcctaatgagctcaggtctaggccgagcagagggggcacctggtcggactcggttgggctcgggcggccccgcctccccccgcccgccaggcgggcccttctcgacggcgcggggcgggccctgcgggcgcggggctgaaggcggaaccacgacgggcagagagcacggagccgggaagcccctgggcgcccgtcggagggctatggagcagcggccgc

SEQ ID NO: 166597 - DNA, 3475 bp, Homo sapiens
  Payload ID: 12800
  Gene Symbol: PLEKHG5
  Gene Name: pleckstrin homology domain containing, family G (with RhoGef domain) member 5
  Uniprot ID: O94827
  ENST ID: ENST00000377725
  CDS Start-End: 214-3006
gagtcgactgagcccgtcccgcggctcccgtccccctctccccgcgcgccccatgaggctttggcagtctcggcccgagccttagagccttagacaccggggaggagaccctggtcctgttcctaggtatgtcaccacgccgactgccagcagctgcaccgccgggggcccctcaacctctgcgaggcctgtgacagcaagttccacagcaccatgcattatgatgggcatgtccgcttcgaccttcccccacaaggctctgtgctggcccggaacgtgtccacccggtcatgcccgccgcgcaccagccccgcagtggacttggaggaggaggaggaggagagctctgtggatggcaaaggggaccggaagagcacaggcctgaaactctccaagaagaaagcaaggaggagacacacggatgacccaagcaaggaatgcttcactctgaaatttgacctgaatgtggacattgagacagagatcgtcccagccatgaagaagaagtcactgggggaggtgctgctgcctgtatttgaaaggaagggcattgcgctgggcaaagtggacatctacctggaccagtccaacacacccctgtccctcaccttcgaggcctacaggttcgggggacactaccttcgtgtcaaagccccagccaagcctggagatgagggcaaggtggagcagggcatgaaggactccaagtccctgagtttgccgattctgcggccagctgggaccgggccccccgccctggagcgtgtggacgcccagagccgccgggagagcctggacatcttggcccctggccgccgccgcaagaacatgtcggagttcctgggggaggcgagcatccccgggcaggagccccccacgccctccagctgctctctgcccagcggcagcagtggcagcaccaacactggcgacagctggaagaaccgggcggccagtcgcttcagcggctttttcagctccggccccagcaccagcgcctttggccgggaggtagacaagatggagcagctggagggcaagctgcacacctacagcctcttcgggctgcccaggctgccccgggggctgcgcttcgaccatgactcctgggaggaggagtacgatgaagacgaggatgaggacaatgcctgcctgaggctggaggacagctggcgggagctcattgatgggcatgagaagctgacccggcggcagtgccaccagcaggaggcggtgtgggagctgctgcacacggaggcctcctacatcaggaaactgcgggtgatcatcaacctgttcctgtgctgcctcctgaacctgcaagagtcagggctgctgtgtgaggtggaggcggagcgcctgttcagcaacatcccggagatcgcgcagctgcaccgcaggctgtgggctagcgtgatggcgccggtgctggagaaggcgcggcgcacgcgagcgctgctacagcccggggacttcctcaaaggcttcaagatgttcggctcgctcttcaagccctacatccgctactgcatggaggaggagggctgcatggagtacatgcgcggcctgctgcgcgacaacgacctcttccgggcctacatcacgtgggcggagaagcacccacagtgccagaggctgaagctgagcgacatgctggccaaaccccaccagcggctcaccaagtacccgctgctgctcaagtcggtgctgaggaagaccgaggagccgcgcgccaaggaggccgtcgtcgccatgatcggctccgtggagcgcttcatccaccacgtgaacgcgtgcatgcggcagcggcaggagcggcagcggctggcggccgtggtgagccgcatcgacgcctacgaggtggtggaaagcagcagcgacgaagtggacaagctcctgaaggaatttctgcacctggacttgacagcgcccatccctggcgcctccccggaggagacgcggcagctgctgctggaggggagcctgaggatgaaggaggggaaggacagcaagatggatgtgtactgcttcctcttcacggatctgctgttggtgaccaaagcagtgaagaaggcagagaggaccagggtcatcaggccacccctgctcgtggacaagattgtgtgccgggagctacgggaccctgggtccttcctccttatctacctgaatgagtttcacagtgctgtaggggcctacacgttccaggccagtggccaggccttgtgccgtggctgggtggacaccatttacaatgcccagaaccagctgcaacagctgcgtgcacaggagcccccaggcagtcagcagcccctgcagagcctggaagaggaggaggatgagcaggaggaggaagaggaggaggaggaggaggaggaggaaggcgaggacagtggcacttcagctgccagctcccctaccatcatgcggaaaagcagcggcagccccgactctcagcactgtgcctcagatggctccacggagaccctggccatggttgtggtagagcctggggacacgctgtcctcccccgagttcgacagcggtcctttcagctcccagtctgatgagacctctctcagcaccactgcctcatctgccacgcccaccagtgagctgctgcccctgggtccggtggacggccgctcctgctccatggactctgcctacggcaccctctccccaacctccttacaagactttgtggccccaggcccaatggcagagctagtgcctcgggccccagagtccccacgagttccttcccctccaccctcgccccgtctccgccgccgcacccctgtccagctgttgagctgcccgccccacctgctcaagtctaagtccgaggccagcctcctccagctgctggcaggggctggcacccatgggacaccctctgcccccagccgcagcctgtcagagctctgcctggctgttccagccccagcacaggaagctgaccctggcccagctctaccgaatcaggaccaccctgctgcttaactccacgctcactgcctcggaggtctgagcagagggaggcccccaagagtgccattgaccaagagacagcagacagcctgcctcctggggcgtgccggcacctgcttcagctactgcctcctgtatgcatgagccggatgctgggcaggatccctgcctacgcccgggcccgatttgcgctttgccggactggatggagtggaggaggcccaggccacagtaccaccccacctgcccaggcagcccctcgtcacctactccccgaagttaccagctcagctcgagtcttcagggctgggctcctaggctgcccatcctacttctaccctcactggcctccagtgggattcactcctgccctgcccccaccttcccagtcccacaggccacccctggcttgggctgggttctgtgaagttacgtatttattgagcttttggttcttttataaagacttgtctagactcca

SEQ ID NO: 166598 - DNA, 3613 bp, Homo sapiens
  Payload ID: 12800
  Gene Symbol: PLEKHG5
  Gene Name: pleckstrin homology domain containing, family G (with RhoGef domain) member 5
  Uniprot ID: O94827
  ENST ID: ENST00000377728
  CDS Start-End: 152-3172
agatgaagaccagggagaggaaagggtggacctgaggcccccatggagaagggacgggcaggatgtatgtcaccacgccgactgccagcagctgcaccgccgggggcccctcaacctctgcgaggcctgtgacagcaagttccacagcaccatgcattatgatgggcatgtccgcttcgaccttcccccacaaggctctgtgctggcccggaacgtgtccacccggtcatgcccgccgcgcaccagccccgcagtggacttggaggaggaggaggaggagagctctgtggatggcaaaggggaccggaagagcacaggcctgaaactctccaagaagaaagcaaggaggagacacacggatgacccaagcaaggaatgcttcactctgaaatttgacctgaatgtggacattgagacagagatcgtcccagccatgaagaagaagtcactgggggaggtgctgctgcctgtatttgaaaggaagggcattgcgctgggcaaagtggacatctacctggaccagtccaacacacccctgtccctcaccttcgaggcctacaggttcgggggacactaccttcgtgtcaaagccccagccaagcctggagatgagggcaaggtggagcagggcatgaaggactccaagtccctgagtttgccgattctgcggccagctgggaccgggccccccgccctggagcgtgtggacgcccagagccgccgggagagcctggacatcttggcccctggccgccgccgcaagaacatgtcggagttcctgggggaggcgagcatccccgggcaggagccccccacgccctccagctgctctctgcccagcggcagcagtggcagcaccaacactggcgacagctggaagaaccgggcggccagtcgcttcagcggctttttcagctccggccccagcaccagcgcctttggccgggaggtagacaagatggagcagctggagggcaagctgcacacctacagcctcttcgggctgcccaggctgccccgggggctgcgcttcgaccatgactcctgggaggaggagtacgatgaagacgaggatgaggacaatgcctgcctgaggctggaggacagctggcgggagctcattgatgggcatgagaagctgacccggcggcagtgccaccagcaggaggcggtgtgggagctgctgcacacggaggcctcctacatcaggaaactgcgggtgatcatcaacctgttcctgtgctgcctcctgaacctgcaagagtcagggctgctgtgtgaggtggaggcggagcgcctgttcagcaacatcccggagatcgcgcagctgcaccgcaggctgtgggctagcgtgatggcgccggtgctggagaaggcgcggcgcacgcgagcgctgctacagcccggggacttcctcaaaggcttcaagatgttcggctcgctcttcaagccctacatccgctactgcatggaggaggagggctgcatggagtacatgcgcggcctgctgcgcgacaacgacctcttccgggcctacatcacgtgggcggagaagcacccacagtgccagaggctgaagctgagcgacatgctggccaaaccccaccagcggctcaccaagtacccgctgctgctcaagtcggtgctgaggaagaccgaggagccgcgcgccaaggaggccgtcgtcgccatgatcggctccgtggagcgcttcatccaccacgtgaacgcgtgcatgcggcagcggcaggagcggcagcggctggcggccgtggtgagccgcatcgacgcctacgaggtggtggaaagcagcagcgacgaagtggacaagctcctgaaggaatttctgcacctggacttgacagcgcccatccctggcgcctccccggaggagacgcggcagctgctgctggaggggagcctgaggatgaaggaggggaaggacagcaagatggatgtgtactgcttcctcttcacggatctgctgttggtgaccaaagcagtgaagaaggcagagaggaccagggtcatcaggccacccctgctcgtggacaagattgtgtgccgggagctacgggaccctgggtccttcctccttatctacctgaatgagtttcacagtgctgtaggggcctacacgttccaggccagtggccaggccttgtgccgtggctgggtggacaccatttacaatgcccagaaccagctgcaacagctgcgtgcacaggagcccccaggcagtcagcagcccctgcagagcctggaagaggaggaggatgagcaggaggaggaagaggaggaggaggaggaggaggaggaaggcgaggacagtggcacttcagctgccagctcccctaccatcatgcggaaaagcagcggcagccccgactctcagcactgtgcctcagatggctccacggagaccctggccatggttgtggtagagcctggggacacgctgtcctcccccgagttcgacagcggtcctttcagctcccagtctgatgagacctctctcagcaccactgcctcatctgccacgcccaccagtgagctgctgcccctgggtccggtggacggccgctcctgctccatggactctgcctacggcaccctctccccaacctccttacaagactttgtggccccaggcccaatggcagagctagtgcctcgggccccagagtccccacgagttccttcccctccaccctcgccccgtctccgccgccgcacccctgtccagctgttgagctgcccgccccacctgctcaagtctaagtccgaggccagcctcctccagctgctggcaggggctggcacccatgggacaccctctgcccccagccgcagcctgtcagagctctgcctggctgttccagccccaggtattaggactcagggctcccctcaggaagctgggcccagctgggattgccgaggggcccctagccctggcagcggtcctgggctagtcggctgcctggccggggaacctgcaggctcccacaggaagaggtgtggagacctgccctcgggggcctctcccagggtccagcctgagcccccaccaggggtctctgcccagcacaggaagctgaccctggcccagctctaccgaatcaggaccaccctgctgcttaactccacgctcactgcctcggaggtctgagcagagggaggcccccaagagtgccattgaccaagagacagcagacagcctgcctcctggggcgtgccggcacctgcttcagctactgcctcctgtatgcatgagccggatgctgggcaggatccctgcctacgcccgggcccgatttgcgctttgccggactggatggagtggaggaggcccaggccacagtaccaccccacctgcccaggcagcccctcgtcacctactccccgaagttaccagctcagctcgagtcttcagggctgggctcctaggctgcccatcctacttctaccctcactggcctccagtgggattcactcctgccctgcccccaccttcccagtcccacaggccacccctggcttgggctgggttctgtgaagttacgtatttattgagcttttggttcttttataaagacttgtctagactcca

SEQ ID NO: 166599 - DNA, 3753 bp, Homo sapiens
  Payload ID: 12800
  Gene Symbol: PLEKHG5
  Gene Name: pleckstrin homology domain containing, family G (with RhoGef domain) member 5
  Uniprot ID: O94827
  ENST ID: ENST00000377732
  CDS Start-End: 181-3312
ggacgctgacctcttttgaagggaggactgaggagatcaccccacccctcctccggttgggaggccagtggggcccaggggagcctgggtgccccgctgactgatgccctctgctcctcccctgcagacgaccagagccccgctgaaaagaagggactgcgctgtcagaaccccgcctgcatggacaaggggcgggcggccaaggtatgtcaccacgccgactgccagcagctgcaccgccgggggcccctcaacctctgcgaggcctgtgacagcaagttccacagcaccatgcattatgatgggcatgtccgcttcgaccttcccccacaaggctctgtgctggcccggaacgtgtccacccggtcatgcccgccgcgcaccagccccgcagtggacttggaggaggaggaggaggagagctctgtggatggcaaaggggaccggaagagcacaggcctgaaactctccaagaagaaagcaaggaggagacacacggatgacccaagcaaggaatgcttcactctgaaatttgacctgaatgtggacattgagacagagatcgtcccagccatgaagaagaagtcactgggggaggtgctgctgcctgtatttgaaaggaagggcattgcgctgggcaaagtggacatctacctggaccagtccaacacacccctgtccctcaccttcgaggcctacaggttcgggggacactaccttcgtgtcaaagccccagccaagcctggagatgagggcaaggtggagcagggcatgaaggactccaagtccctgagtttgccgattctgcggccagctgggaccgggccccccgccctggagcgtgtggacgcccagagccgccgggagagcctggacatcttggcccctggccgccgccgcaagaacatgtcggagttcctgggggaggcgagcatccccgggcaggagccccccacgccctccagctgctctctgcccagcggcagcagtggcagcaccaacactggcgacagctggaagaaccgggcggccagtcgcttcagcggctttttcagctccggccccagcaccagcgcctttggccgggaggtagacaagatggagcagctggagggcaagctgcacacctacagcctcttcgggctgcccaggctgccccgggggctgcgcttcgaccatgactcctgggaggaggagtacgatgaagacgaggatgaggacaatgcctgcctgaggctggaggacagctggcgggagctcattgatgggcatgagaagctgacccggcggcagtgccaccagcaggaggcggtgtgggagctgctgcacacggaggcctcctacatcaggaaactgcgggtgatcatcaacctgttcctgtgctgcctcctgaacctgcaagagtcagggctgctgtgtgaggtggaggcggagcgcctgttcagcaacatcccggagatcgcgcagctgcaccgcaggctgtgggctagcgtgatggcgccggtgctggagaaggcgcggcgcacgcgagcgctgctacagcccggggacttcctcaaaggcttcaagatgttcggctcgctcttcaagccctacatccgctactgcatggaggaggagggctgcatggagtacatgcgcggcctgctgcgcgacaacgacctcttccgggcctacatcacgtgggcggagaagcacccacagtgccagaggctgaagctgagcgacatgctggccaaaccccaccagcggctcaccaagtacccgctgctgctcaagtcggtgctgaggaagaccgaggagccgcgcgccaaggaggccgtcgtcgccatgatcggctccgtggagcgcttcatccaccacgtgaacgcgtgcatgcggcagcggcaggagcggcagcggctggcggccgtggtgagccgcatcgacgcctacgaggtggtggaaagcagcagcgacgaagtggacaagctcctgaaggaatttctgcacctggacttgacagcgcccatccctggcgcctccccggaggagacgcggcagctgctgctggaggggagcctgaggatgaaggaggggaaggacagcaagatggatgtgtactgcttcctcttcacggatctgctgttggtgaccaaagcagtgaagaaggcagagaggaccagggtcatcaggccacccctgctcgtggacaagattgtgtgccgggagctacgggaccctgggtccttcctccttatctacctgaatgagtttcacagtgctgtaggggcctacacgttccaggccagtggccaggccttgtgccgtggctgggtggacaccatttacaatgcccagaaccagctgcaacagctgcgtgcacaggagcccccaggcagtcagcagcccctgcagagcctggaagaggaggaggatgagcaggaggaggaagaggaggaggaggaggaggaggaggaaggcgaggacagtggcacttcagctgccagctcccctaccatcatgcggaaaagcagcggcagccccgactctcagcactgtgcctcagatggctccacggagaccctggccatggttgtggtagagcctggggacacgctgtcctcccccgagttcgacagcggtcctttcagctcccagtctgatgagacctctctcagcaccactgcctcatctgccacgcccaccagtgagctgctgcccctgggtccggtggacggccgctcctgctccatggactctgcctacggcaccctctccccaacctccttacaagactttgtggccccaggcccaatggcagagctagtgcctcgggccccagagtccccacgagttccttcccctccaccctcgccccgtctccgccgccgcacccctgtccagctgttgagctgcccgccccacctgctcaagtctaagtccgaggccagcctcctccagctgctggcaggggctggcacccatgggacaccctctgcccccagccgcagcctgtcagagctctgcctggctgttccagccccaggtattaggactcagggctcccctcaggaagctgggcccagctgggattgccgaggggcccctagccctggcagcggtcctgggctagtcggctgcctggccggggaacctgcaggctcccacaggaagaggtgtggagacctgccctcgggggcctctcccagggtccagcctgagcccccaccaggggtctctgcccagcacaggaagctgaccctggcccagctctaccgaatcaggaccaccctgctgcttaactccacgctcactgcctcggaggtctgagcagagggaggcccccaagagtgccattgaccaagagacagcagacagcctgcctcctggggcgtgccggcacctgcttcagctactgcctcctgtatgcatgagccggatgctgggcaggatccctgcctacgcccgggcccgatttgcgctttgccggactggatggagtggaggaggcccaggccacagtaccaccccacctgcccaggcagcccctcgtcacctactccccgaagttaccagctcagctcgagtcttcagggctgggctcctaggctgcccatcctacttctaccctcactggcctccagtgggattcactcctgccctgcccccaccttcccagtcccacaggccacccctggcttgggctgggttctgtgaagttacgtatttattgagcttttggttcttttataaagacttgtctagactcca

SEQ ID NO: 166600 - DNA, 3550 bp, Homo sapiens
  Payload ID: 12800
  Gene Symbol: PLEKHG5
  Gene Name: pleckstrin homology domain containing, family G (with RhoGef domain) member 5
  ENST ID: ENST00000377740
  CDS Start-End: 551-3109
cttgatctcccgctgtgaccagcccctctctgcctggcaggggaaagccaccaaactaaggccttcctggtagccaaggagcccagcagaggggctgctgctggctgctgggattgcagaggccggggtctctgtggtgttgctttcctggaaaggagggacggcacctccagggcagccagcagtgtgggagcccattccagggcgcaaatgggcactcaggaatggaaaatccaagaaggaaccaaccaccaacaaggaaatgcagtgtgagcggcggctgcgaagtctgtgccttcaaatatacagcgcccaggggacctgtgttggacggggagcaaattggcagggctgagagcgccttggttttctgtgcagacaggtccagctgcagaaattaagactggggctgagtcggggagaagccttccatgttgagatggcaactgggcaaagcaggacggagacctgtgtgtctgattagagaggcctgtggcattggcatgtggctggaggtccaggcagggtgccaccaccgcagaggtcaagcatgaattcagtcctgacaaaacatgggtctccacctcgaagctggctcagcctttgttcaggaaccgacgaccagagccccgctgaaaagaagggactgcgctgtcagaaccccgcctgcatggacaaggggcgggcggccaaggtatgtcaccacgccgactgccagcagctgcaccgccgggggcccctcaacctctgcgaggcctgtgacagcaagttccacagcaccatgcattatgatgggcatgtccgcttcgaccttcccccacaaggctctgtgctggcccggaacgtgtccacccggtcatgcccgccgcgcaccagccccgcagtggacttggaggaggaggaggaggagagctctgtggatggcaaaggggaccggaagagcacaggcctgaaactctccaagaagaaagcaaggaggagacacacggatgacccaagcaaggaatgcttcactctgaaatttgacctgaatgtggacattgagacagagatcgtcccagccatgaagaagaagtcactgggggaggtgctgctgcctgtatttgaaaggaagggcattgcgctgggcaaagtggacatctacctggaccagtccaacacacccctgtccctcaccttcgaggcctacaggttcgggggacactaccttcgtgtcaaagccccagccaagcctggagatgagggcaaggtggagcagggcatgaaggactccaagtccctgagtttgccgattctgcggccagctgggaccgggccccccgccctggagcgtgtggacgcccagagccgccgggagagcctggacatcttggcccctggccgccgccgcaagaacatgtcggagttcctgggggaggcgagcatccccgggcaggagccccccacgccctccagctgctctctgcccagcggcagcagtggcagcaccaacactggcgacagctggaagaaccgggcggccagtcgcttcagcggctttttcagctccggccccagcaccagcgcctttggccgggaggtagacaagatggagcagctggagggcaagctgcacacctacagcctcttcgggctgcccaggctgccccgggggctgcgcttcgaccatgactcctgggaggaggagtacgatgaagacgaggatgaggacaatgcctgcctgaggctggaggacagctggcgggagctcattgatgggcatgagaagctgacccggcggcagtgccaccagcaggaggcggtgtgggagctgctgcacacggaggcctcctacatcaggaaactgcgggtgatcatcaacctgttcctgtgctgcctcctgaacctgcaagagtcagggctgctgtgtgaggtggaggcggagcgcctgttcagcaacatcccggagatcgcgcagctgcaccgcaggctgtgggctagcgtgatggcgccggtgctggagaaggcgcggcgcacgcgagcgctgctacagcccggggacttcctcaaaggcttcaagatgttcggctcgctcttcaagccctacatccgctactgcatggaggaggagggctgcatggagtacatgcgcggcctgctgcgcgacaacgacctcttccgggcctacatcacgtgggcggagaagcacccacagtgccagaggctgaagctgagcgacatgctggccaaaccccaccagcggctcaccaagtacccgctgctgctcaagtcggtgctgaggaagaccgaggagccgcgcgccaaggaggccgtcgtcgccatgatcggctccgtggagcgcttcatccaccacgtgaacgcgtgcatgcggcagcggcaggagcggcagcggctggcggccgtggtgagccgcatcgacgcctacgaggtggtggaaagcagcagcgacgaagtggacaagctcctgaaggaatttctgcacctggacttgacagcgcccatccctggcgcctccccggaggagacgcggcagctgctgctggaggggagcctgaggatgaaggaggggaaggacagcaagatggatgtgtactgcttcctcttcacggatctgctgttggtgaccaaagcagtgaagaaggcagagaggaccagggtcatcaggccacccctgctcgtggacaagattgtgtgccgggagctacgggaccctgggtccttcctccttatctacctgaatgagtttcacagtgctgtaggggcctacacgttccaggccagtggccaggccttgtgccgtggctgggtggacaccatttacaatgcccagaaccagctgcaacagctgcgtgcacaggagcccccaggcagtcagcagcccctgcagagcctggaagaggaggaggatgagcaggaggaggaagaggaggaggaggaggaggaggaggaaggcgaggacagtggcacttcagctgccagctcccctaccatcatgcggaaaagcagcggcagccccgactctcagcactggaagctgaccctggcccagctctaccgaatcaggaccaccctgctgcttaactccacgctcactgcctcggaggtctgagcagagggaggcccccaagagtgccattgaccaagagacagcagacagcctgcctcctggggcgtgccggcacctgcttcagctactgcctcctgtatgcatgagccggatgctgggcaggatccctgcctacgcccgggcccgatttgcgctttgccggactggatggagtggaggaggcccaggccacagtaccaccccacctgcccaggcagcccctcgtcacctactccccgaagttaccagctcagctcgagtcttcagggctgggctcctaggctgcccatcctacttctaccctcactggcctccagtgggattcactcctgccctgcccccaccttcccagtcccacaggccacccctggcttgggctgggttctgtgaagttacgtatttattgagcttttggttcttttataaagacttgtctagactcca

SEQ ID NO: 166601 - DNA, 5221 bp, Homo sapiens
  Payload ID: 12800
  Gene Symbol: PLEKHG5
  Gene Name: pleckstrin homology domain containing, family G (with RhoGef domain) member 5
  Uniprot ID: O94827
  ENST ID: ENST00000377748
  CDS Start-End: 499-3750
aaactaaggccttcctggtagccaaggagcccagcagaggggctgctgctggctgctgggattgcagaggccggggtctctgtggtgttgctttcctggaaaggagggacggcacctccagggcagccagcagtgtgggagcccattccagggcgcaaatgggcactcaggaatggaaaatccaagaaggaaccaaccaccaacaaggaaatgcagtgtgagcggcggctgcgaagtctgtgccttcaaatatacagcgcccaggggacctgtgttggacggggagcaaattggcagggctgagagcgccttggttttctgtgcagacaggtccagctgcagaaattaagactggggctgagtcggggagaagccttccatgttgagatggcaactgggcaaagcaggacggagacctgtgtgtctgattagagaggcctgtggcattggcatgtggctggaggtccaggcagggtgccaccaccgcagaggtcaagcatgaattcagtcctgacaaaacatgggtctccacctcgaagctggctcagcctttgttcaggaaccgacgaccagagccccgctgaaaagaagggactgcgctgtcagaaccccgcctgcatggacaaggggcgggcggccaaggtatgtcaccacgccgactgccagcagctgcaccgccgggggcccctcaacctctgcgaggcctgtgacagcaagttccacagcaccatgcattatgatgggcatgtccgcttcgaccttcccccacaaggctctgtgctggcccggaacgtgtccacccggtcatgcccgccgcgcaccagccccgcagtggacttggaggaggaggaggaggagagctctgtggatggcaaaggggaccggaagagcacaggcctgaaactctccaagaagaaagcaaggaggagacacacggatgacccaagcaaggaatgcttcactctgaaatttgacctgaatgtggacattgagacagagatcgtcccagccatgaagaagaagtcactgggggaggtgctgctgcctgtatttgaaaggaagggcattgcgctgggcaaagtggacatctacctggaccagtccaacacacccctgtccctcaccttcgaggcctacaggttcgggggacactaccttcgtgtcaaagccccagccaagcctggagatgagggcaaggtggagcagggcatgaaggactccaagtccctgagtttgccgattctgcggccagctgggaccgggccccccgccctggagcgtgtggacgcccagagccgccgggagagcctggacatcttggcccctggccgccgccgcaagaacatgtcggagttcctgggggaggcgagcatccccgggcaggagccccccacgccctccagctgctctctgcccagcggcagcagtggcagcaccaacactggcgacagctggaagaaccgggcggccagtcgcttcagcggctttttcagctccggccccagcaccagcgcctttggccgggaggtagacaagatggagcagctggagggcaagctgcacacctacagcctcttcgggctgcccaggctgccccgggggctgcgcttcgaccatgactcctgggaggaggagtacgatgaagacgaggatgaggacaatgcctgcctgaggctggaggacagctggcgggagctcattgatgggcatgagaagctgacccggcggcagtgccaccagcaggaggcggtgtgggagctgctgcacacggaggcctcctacatcaggaaactgcgggtgatcatcaacctgttcctgtgctgcctcctgaacctgcaagagtcagggctgctgtgtgaggtggaggcggagcgcctgttcagcaacatcccggagatcgcgcagctgcaccgcaggctgtgggctagcgtgatggcgccggtgctggagaaggcgcggcgcacgcgagcgctgctacagcccggggacttcctcaaaggcttcaagatgttcggctcgctcttcaagccctacatccgctactgcatggaggaggagggctgcatggagtacatgcgcggcctgctgcgcgacaacgacctcttccgggcctacatcacgtgggcggagaagcacccacagtgccagaggctgaagctgagcgacatgctggccaaaccccaccagcggctcaccaagtacccgctgctgctcaagtcggtgctgaggaagaccgaggagccgcgcgccaaggaggccgtcgtcgccatgatcggctccgtggagcgcttcatccaccacgtgaacgcgtgcatgcggcagcggcaggagcggcagcggctggcggccgtggtgagccgcatcgacgcctacgaggtggtggaaagcagcagcgacgaagtggacaagctcctgaaggaatttctgcacctggacttgacagcgcccatccctggcgcctccccggaggagacgcggcagctgctgctggaggggagcctgaggatgaaggaggggaaggacagcaagatggatgtgtactgcttcctcttcacggatctgctgttggtgaccaaagcagtgaagaaggcagagaggaccagggtcatcaggccacccctgctcgtggacaagattgtgtgccgggagctacgggaccctgggtccttcctccttatctacctgaatgagtttcacagtgctgtaggggcctacacgttccaggccagtggccaggccttgtgccgtggctgggtggacaccatttacaatgcccagaaccagctgcaacagctgcgtgcacaggagcccccaggcagtcagcagcccctgcagagcctggaagaggaggaggatgagcaggaggaggaagaggaggaggaggaggaggaggaggaaggcgaggacagtggcacttcagctgccagctcccctaccatcatgcggaaaagcagcggcagccccgactctcagcactgtgcctcagatggctccacggagaccctggccatggttgtggtagagcctggggacacgctgtcctcccccgagttcgacagcggtcctttcagctcccagtctgatgagacctctctcagcaccactgcctcatctgccacgcccaccagtgagctgctgcccctgggtccggtggacggccgctcctgctccatggactctgcctacggcaccctctccccaacctccttacaagactttgtggccccaggcccaatggcagagctagtgcctcgggccccagagtccccacgagttccttcccctccaccctcgccccgtctccgccgccgcacccctgtccagctgttgagctgcccgccccacctgctcaagtctaagtccgaggccagcctcctccagctgctggcaggggctggcacccatgggacaccctctgcccccagccgcagcctgtcagagctctgcctggctgttccagccccaggtattaggactcagggctcccctcaggaagctgggcccagctgggattgccgaggggcccctagccctggcagcggtcctgggctagtcggctgcctggccggggaacctgcaggctcccacaggaagaggtgtggagacctgccctcgggggcctctcccagggtccagcctgagcccccaccaggggtctctgcccagcacaggaagctgaccctggcccagctctaccgaatcaggaccaccctgctgcttaactccacgctcactgcctcggaggtctgagcagagggaggcccccaagagtgccattgaccaagagacagcagacagcctgcctcctggggcgtgccggcacctgcttcagctactgcctcctgtatgcatgagccggatgctgggcaggatccctgcctacgcccgggcccgatttgcgctttgccggactggatggagtggaggaggcccaggccacagtaccaccccacctgcccaggcagcccctcgtcacctactccccgaagttaccagctcagctcgagtcttcagggctgggctcctaggctgcccatcctacttctaccctcactggcctccagtgggattcactcctgccctgcccccaccttcccagtcccacaggccacccctggcttgggctgggttctgtgaagttacgtatttattgagcttttggttcttttataaagacttgtctagactccactgggaagagtcctttgctttggggcccagtgactcggggcacttgagttcagggcggcctccttgtgttcctgtgctcctccacttgccacggatgggccacggatggagcttgccatgggaagcactgggaagtaatggggtgtggggtgccaccagaccaacacccccagacttccccaccttcagccaccatcagagcctctccccaggtgccccccggggattcagggctgaatctgcccagttcccacactcaggccagccctcttgggaaggtgggtcctccatgggggtcccttcaggaactttttttttttttttaatacagagtctcactctgtcacctaggttggagtgcagtggtgtgatgtcggctcactgcaacctctgcctcccgggttcaaacgattctcctgccccagccactctagtagctggaactgcaggtgtgcaccaccacgccgggctagtttttgtattttaagtagagacggcatttcaccatattggtcaggctggtctcgaactcctgaccccaagtgttccgcccgcctctgcctcccatagtgctagaattacaggcctgagctactgcgcttggccccttgcggtacttttggcccaacctcctccatggctggggacgcggaggccgagagagaagtcacttgccctggctctaccttgaagtggttctcagggttggggcgagagtcggggtggggaccgagatgcagctctatcctgtgcccctggtcgcagcaggcagcccagcgcttcgcgtgttctacttggcctgtccgctgccgcctaatgagctcaggtctaggccgagcagagggggcacctggtcggactcggttgggctcgggcggccccgcctccccccgcccgccaggcgggcccttctcgacggcgcggggcgggccctgcgggcgcggggctgaaggcggaaccacgacgggcagagagcacggagccgggaagcccctgggcgcccgtcggagggctatggagcagcggccgc

SEQ ID NO: 166602 - DNA, 4698 bp, Homo sapiens
  Payload ID: 12800
  Gene Symbol: PLEKHG5
  Gene Name: pleckstrin homology domain containing, family G (with RhoGef domain) member 5
  Uniprot ID: O94827
  ENST ID: ENST00000400913
  CDS Start-End: 207-3227
agcattcaaggagctccccaggagaaagagcaagttctgaggagccctctgagcccggcattggtgttgaggagggagtcagagaagagaggggcccggggccgcgcagaggcgcagaggtatgtcaccacgccgactgccagcagctgcaccgccgggggcccctcaacctctgcgaggcctgtgacagcaagttccacagcaccatgcattatgatgggcatgtccgcttcgaccttcccccacaaggctctgtgctggcccggaacgtgtccacccggtcatgcccgccgcgcaccagccccgcagtggacttggaggaggaggaggaggagagctctgtggatggcaaaggggaccggaagagcacaggcctgaaactctccaagaagaaagcaaggaggagacacacggatgacccaagcaaggaatgcttcactctgaaatttgacctgaatgtggacattgagacagagatcgtcccagccatgaagaagaagtcactgggggaggtgctgctgcctgtatttgaaaggaagggcattgcgctgggcaaagtggacatctacctggaccagtccaacacacccctgtccctcaccttcgaggcctacaggttcgggggacactaccttcgtgtcaaagccccagccaagcctggagatgagggcaaggtggagcagggcatgaaggactccaagtccctgagtttgccgattctgcggccagctgggaccgggccccccgccctggagcgtgtggacgcccagagccgccgggagagcctggacatcttggcccctggccgccgccgcaagaacatgtcggagttcctgggggaggcgagcatccccgggcaggagccccccacgccctccagctgctctctgcccagcggcagcagtggcagcaccaacactggcgacagctggaagaaccgggcggccagtcgcttcagcggctttttcagctccggccccagcaccagcgcctttggccgggaggtagacaagatggagcagctggagggcaagctgcacacctacagcctcttcgggctgcccaggctgccccgggggctgcgcttcgaccatgactcctgggaggaggagtacgatgaagacgaggatgaggacaatgcctgcctgaggctggaggacagctggcgggagctcattgatgggcatgagaagctgacccggcggcagtgccaccagcaggaggcggtgtgggagctgctgcacacggaggcctcctacatcaggaaactgcgggtgatcatcaacctgttcctgtgctgcctcctgaacctgcaagagtcagggctgctgtgtgaggtggaggcggagcgcctgttcagcaacatcccggagatcgcgcagctgcaccgcaggctgtgggctagcgtgatggcgccggtgctggagaaggcgcggcgcacgcgagcgctgctacagcccggggacttcctcaaaggcttcaagatgttcggctcgctcttcaagccctacatccgctactgcatggaggaggagggctgcatggagtacatgcgcggcctgctgcgcgacaacgacctcttccgggcctacatcacgtgggcggagaagcacccacagtgccagaggctgaagctgagcgacatgctggccaaaccccaccagcggctcaccaagtacccgctgctgctcaagtcggtgctgaggaagaccgaggagccgcgcgccaaggaggccgtcgtcgccatgatcggctccgtggagcgcttcatccaccacgtgaacgcgtgcatgcggcagcggcaggagcggcagcggctggcggccgtggtgagccgcatcgacgcctacgaggtggtggaaagcagcagcgacgaagtggacaagctcctgaaggaatttctgcacctggacttgacagcgcccatccctggcgcctccccggaggagacgcggcagctgctgctggaggggagcctgaggatgaaggaggggaaggacagcaagatggatgtgtactgcttcctcttcacggatctgctgttggtgaccaaagcagtgaagaaggcagagaggaccagggtcatcaggccacccctgctcgtggacaagattgtgtgccgggagctacgggaccctgggtccttcctccttatctacctgaatgagtttcacagtgctgtaggggcctacacgttccaggccagtggccaggccttgtgccgtggctgggtggacaccatttacaatgcccagaaccagctgcaacagctgcgtgcacaggagcccccaggcagtcagcagcccctgcagagcctggaagaggaggaggatgagcaggaggaggaagaggaggaggaggaggaggaggaggaaggcgaggacagtggcacttcagctgccagctcccctaccatcatgcggaaaagcagcggcagccccgactctcagcactgtgcctcagatggctccacggagaccctggccatggttgtggtagagcctggggacacgctgtcctcccccgagttcgacagcggtcctttcagctcccagtctgatgagacctctctcagcaccactgcctcatctgccacgcccaccagtgagctgctgcccctgggtccggtggacggccgctcctgctccatggactctgcctacggcaccctctccccaacctccttacaagactttgtggccccaggcccaatggcagagctagtgcctcgggccccagagtccccacgagttccttcccctccaccctcgccccgtctccgccgccgcacccctgtccagctgttgagctgcccgccccacctgctcaagtctaagtccgaggccagcctcctccagctgctggcaggggctggcacccatgggacaccctctgcccccagccgcagcctgtcagagctctgcctggctgttccagccccaggtattaggactcagggctcccctcaggaagctgggcccagctgggattgccgaggggcccctagccctggcagcggtcctgggctagtcggctgcctggccggggaacctgcaggctcccacaggaagaggtgtggagacctgccctcgggggcctctcccagggtccagcctgagcccccaccaggggtctctgcccagcacaggaagctgaccctggcccagctctaccgaatcaggaccaccctgctgcttaactccacgctcactgcctcggaggtctgagcagagggaggcccccaagagtgccattgaccaagagacagcagacagcctgcctcctggggcgtgccggcacctgcttcagctactgcctcctgtatgcatgagccggatgctgggcaggatccctgcctacgcccgggcccgatttgcgctttgccggactggatggagtggaggaggcccaggccacagtaccaccccacctgcccaggcagcccctcgtcacctactccccgaagttaccagctcagctcgagtcttcagggctgggctcctaggctgcccatcctacttctaccctcactggcctccagtgggattcactcctgccctgcccccaccttcccagtcccacaggccacccctggcttgggctgggttctgtgaagttacgtatttattgagcttttggttcttttataaagacttgtctagactccactgggaagagtcctttgctttggggcccagtgactcggggcacttgagttcagggcggcctccttgtgttcctgtgctcctccacttgccacggatgggccacggatggagcttgccatgggaagcactgggaagtaatggggtgtggggtgccaccagaccaacacccccagacttccccaccttcagccaccatcagagcctctccccaggtgccccccggggattcagggctgaatctgcccagttcccacactcaggccagccctcttgggaaggtgggtcctccatgggggtcccttcaggaactttttttttttttttaatacagagtctcactctgtcacctaggttggagtgcagtggtgtgatgtcggctcactgcaacctctgcctcccgggttcaaacgattctcctgccccagccactctagtagctggaactgcaggtgtgcaccaccacgccgggctagtttttgtattttaagtagagacggcatttcaccatattggtcaggctggtctcgaactcctgaccccaagtgttccgcccgcctctgcctcccatagtgctagaattacaggcctgagctactgcgcttggccccttgcggtacttttggcccaacctcctccatggctggggacgcggaggccgagagagaagtcacttgccctggctctaccttgaagtggttctcagggttggggcgagagtcggggtggggaccgagatgcagctctatcctgtgcccctggtcgcagcaggcagcccagcgcttcgcgtgttctacttggcctgtccgctgccgcctaatgagctcaggtctaggccgagcagagggggcacctggtcggactcggttgggctcgggcggccccgcctccccccgcccgccaggcgggcccttctcgacggcgcggggcgggccctgcgggcgcggggctgaaggcggaaccacgacgggcagagagcacggagccgggaagcccctgggcgcccgtcggagggctatggagcagcggccgc

SEQ ID NO: 166603 - DNA, 3697 bp, Homo sapiens
  Payload ID: 12800
  Gene Symbol: PLEKHG5
  Gene Name: pleckstrin homology domain containing, family G (with RhoGef domain) member 5
  Uniprot ID: O94827
  ENST ID: ENST00000400915
  CDS Start-End: 68-3256
cccagtccccggcgtccccggcgcccccgcccgccgcccgccccccgcgcggcacggggcctgctccatggacgaccagagccccgctgaaaagaagggactgcgctgtcagaaccccgcctgcatggacaaggggcgggcggccaaggtatgtcaccacgccgactgccagcagctgcaccgccgggggcccctcaacctctgcgaggcctgtgacagcaagttccacagcaccatgcattatgatgggcatgtccgcttcgaccttcccccacaaggctctgtgctggcccggaacgtgtccacccggtcatgcccgccgcgcaccagccccgcagtggacttggaggaggaggaggaggagagctctgtggatggcaaaggggaccggaagagcacaggcctgaaactctccaagaagaaagcaaggaggagacacacggatgacccaagcaaggaatgcttcactctgaaatttgacctgaatgtggacattgagacagagatcgtcccagccatgaagaagaagtcactgggggaggtgctgctgcctgtatttgaaaggaagggcattgcgctgggcaaagtggacatctacctggaccagtccaacacacccctgtccctcaccttcgaggcctacaggttcgggggacactaccttcgtgtcaaagccccagccaagcctggagatgagggcaaggtggagcagggcatgaaggactccaagtccctgagtttgccgattctgcggccagctgggaccgggccccccgccctggagcgtgtggacgcccagagccgccgggagagcctggacatcttggcccctggccgccgccgcaagaacatgtcggagttcctgggggaggcgagcatccccgggcaggagccccccacgccctccagctgctctctgcccagcggcagcagtggcagcaccaacactggcgacagctggaagaaccgggcggccagtcgcttcagcggctttttcagctccggccccagcaccagcgcctttggccgggaggtagacaagatggagcagctggagggcaagctgcacacctacagcctcttcgggctgcccaggctgccccgggggctgcgcttcgaccatgactcctgggaggaggagtacgatgaagacgaggatgaggacaatgcctgcctgaggctggaggacagctggcgggagctcattgatgggcatgagaagctgacccggcggcagtgccaccagcaggaggcggtgtgggagctgctgcacacggaggcctcctacatcaggaaactgcgggtgatcatcaacctgttcctgtgctgcctcctgaacctgcaagagtcagggctgctgtgtgaggtggaggcggagcgcctgttcagcaacatcccggagatcgcgcagctgcaccgcaggctgtgggctagcgtgatggcgccggtgctggagaaggcgcggcgcacgcgagcgctgctacagcccggggacttcctcaaaggcttcaagatgttcggctcgctcttcaagccctacatccgctactgcatggaggaggagggctgcatggagtacatgcgcggcctgctgcgcgacaacgacctcttccgggcctacatcacgtgggcggagaagcacccacagtgccagaggctgaagctgagcgacatgctggccaaaccccaccagcggctcaccaagtacccgctgctgctcaagtcggtgctgaggaagaccgaggagccgcgcgccaaggaggccgtcgtcgccatgatcggctccgtggagcgcttcatccaccacgtgaacgcgtgcatgcggcagcggcaggagcggcagcggctggcggccgtggtgagccgcatcgacgcctacgaggtggtggaaagcagcagcgacgaagtggacaagctcctgaaggaatttctgcacctggacttgacagcgcccatccctggcgcctccccggaggagacgcggcagctgctgctggaggggagcctgaggatgaaggaggggaaggacagcaagatggatgtgtactgcttcctcttcacggatctgctgttggtgaccaaagcagtgaagaaggcagagaggaccagggtcatcaggccacccctgctcgtggacaagattgtgtgccgggagctacgggaccctgggtccttcctccttatctacctgaatgagtttcacagtgctgtaggggcctacacgttccaggccagtggccaggccttgtgccgtggctgggtggacaccatttacaatgcccagaaccagctgcaacagctgcgtgcacaggagcccccaggcagtcagcagcccctgcagagcctggaagaggaggaggatgagcaggaggaggaagaggaggaggaggaggaggaggaggaaggcgaggacagtggcacttcagctgccagctcccctaccatcatgcggaaaagcagcggcagccccgactctcagcactgtgcctcagatggctccacggagaccctggccatggttgtggtagagcctggggacacgctgtcctcccccgagttcgacagcggtcctttcagctcccagtctgatgagacctctctcagcaccactgcctcatctgccacgcccaccagtgagctgctgcccctgggtccggtggacggccgctcctgctccatggactctgcctacggcaccctctccccaacctccttacaagactttgtggccccaggcccaatggcagagctagtgcctcgggccccagagtccccacgagttccttcccctccaccctcgccccgtctccgccgccgcacccctgtccagctgttgagctgcccgccccacctgctcaagtctaagtccgaggccagcctcctccagctgctggcaggggctggcacccatgggacaccctctgcccccagccgcagcctgtcagagctctgcctggctgttccagccccaggtattaggactcagggctcccctcaggaagctgggcccagctgggattgccgaggggcccctagccctggcagcggtcctgggctagtcggctgcctggccggggaacctgcaggctcccacaggaagaggtgtggagacctgccctcgggggcctctcccagggtccagcctgagcccccaccaggggtctctgcccagcacaggaagctgaccctggcccagctctaccgaatcaggaccaccctgctgcttaactccacgctcactgcctcggaggtctgagcagagggaggcccccaagagtgccattgaccaagagacagcagacagcctgcctcctggggcgtgccggcacctgcttcagctactgcctcctgtatgcatgagccggatgctgggcaggatccctgcctacgcccgggcccgatttgcgctttgccggactggatggagtggaggaggcccaggccacagtaccaccccacctgcccaggcagcccctcgtcacctactccccgaagttaccagctcagctcgagtcttcagggctgggctcctaggctgcccatcctacttctaccctcactggcctccagtgggattcactcctgccctgcccccaccttcccagtcccacaggccacccctggcttgggctgggttctgtgaagttacgtatttattgagcttttggttcttttataaagacttgtctagactcca

SEQ ID NO: 166604 - DNA, 4794 bp, Homo sapiens
  Payload ID: 12800
  Gene Symbol: PLEKHG5
  Gene Name: pleckstrin homology domain containing, family G (with RhoGef domain) member 5
  Uniprot ID: O94827
  ENST ID: ENST00000537245
  CDS Start-End: 66-3323
accgcggtgcactccagcccccaggaagagaggcagcttggagggggccaaattcagggtcaaagatgagtcttggggaacgggggtcgccccagaccttcgggggctcctctgtctctaaagggagcgatgcagggcacgaccagagccccgctgaaaagaagggactgcgctgtcagaaccccgcctgcatggacaaggggcgggcggccaaggtatgtcaccacgccgactgccagcagctgcaccgccgggggcccctcaacctctgcgaggcctgtgacagcaagttccacagcaccatgcattatgatgggcatgtccgcttcgaccttcccccacaaggctctgtgctggcccggaacgtgtccacccggtcatgcccgccgcgcaccagccccgcagtggacttggaggaggaggaggaggagagctctgtggatggcaaaggggaccggaagagcacaggcctgaaactctccaagaagaaagcaaggaggagacacacggatgacccaagcaaggaatgcttcactctgaaatttgacctgaatgtggacattgagacagagatcgtcccagccatgaagaagaagtcactgggggaggtgctgctgcctgtatttgaaaggaagggcattgcgctgggcaaagtggacatctacctggaccagtccaacacacccctgtccctcaccttcgaggcctacaggttcgggggacactaccttcgtgtcaaagccccagccaagcctggagatgagggcaaggtggagcagggcatgaaggactccaagtccctgagtttgccgattctgcggccagctgggaccgggccccccgccctggagcgtgtggacgcccagagccgccgggagagcctggacatcttggcccctggccgccgccgcaagaacatgtcggagttcctgggggaggcgagcatccccgggcaggagccccccacgccctccagctgctctctgcccagcggcagcagtggcagcaccaacactggcgacagctggaagaaccgggcggccagtcgcttcagcggctttttcagctccggccccagcaccagcgcctttggccgggaggtagacaagatggagcagctggagggcaagctgcacacctacagcctcttcgggctgcccaggctgccccgggggctgcgcttcgaccatgactcctgggaggaggagtacgatgaagacgaggatgaggacaatgcctgcctgaggctggaggacagctggcgggagctcattgatgggcatgagaagctgacccggcggcagtgccaccagcaggaggcggtgtgggagctgctgcacacggaggcctcctacatcaggaaactgcgggtgatcatcaacctgttcctgtgctgcctcctgaacctgcaagagtcagggctgctgtgtgaggtggaggcggagcgcctgttcagcaacatcccggagatcgcgcagctgcaccgcaggctgtgggctagcgtgatggcgccggtgctggagaaggcgcggcgcacgcgagcgctgctacagcccggggacttcctcaaaggcttcaagatgttcggctcgctcttcaagccctacatccgctactgcatggaggaggagggctgcatggagtacatgcgcggcctgctgcgcgacaacgacctcttccgggcctacatcacgtgggcggagaagcacccacagtgccagaggctgaagctgagcgacatgctggccaaaccccaccagcggctcaccaagtacccgctgctgctcaagtcggtgctgaggaagaccgaggagccgcgcgccaaggaggccgtcgtcgccatgatcggctccgtggagcgcttcatccaccacgtgaacgcgtgcatgcggcagcggcaggagcggcagcggctggcggccgtggtgagccgcatcgacgcctacgaggtggtggaaagcagcagcgacgaagtggacaagctcctgaaggaatttctgcacctggacttgacagcgcccatccctggcgcctccccggaggagacgcggcagctgctgctggaggggagcctgaggatgaaggaggggaaggacagcaagatggatgtgtactgcttcctcttcacggatctgctgttggtgaccaaagcagtgaagaaggcagagaggaccagggtcatcaggccacccctgctcgtggacaagattgtgtgccgggagctacgggaccctgggtccttcctccttatctacctgaatgagtttcacagtgctgtaggggcctacacgttccaggccagtggccaggccttgtgccgtggctgggtggacaccatttacaatgcccagaaccagctgcaacagctgcgtgcacaggagcccccaggcagtcagcagcccctgcagagcctggaagaggaggaggatgagcaggaggaggaagaggaggaggaggaggaggaggaggaaggcgaggacagtggcacttcagctgccagctcccctaccatcatgcggaaaagcagcggcagccccgactctcagcactgtgcctcagatggctccacggagaccctggccatggttgtggtagagcctggggacacgctgtcctcccccgagttcgacagcggtcctttcagctcccagtctgatgagacctctctcagcaccactgcctcatctgccacgcccaccagtgagctgctgcccctgggtccggtggacggccgctcctgctccatggactctgcctacggcaccctctccccaacctccttacaagactttgtggccccaggcccaatggcagagctagtgcctcgggccccagagtccccacgagttccttcccctccaccctcgccccgtctccgccgccgcacccctgtccagctgttgagctgcccgccccacctgctcaagtctaagtccgaggccagcctcctccagctgctggcaggggctggcacccatgggacaccctctgcccccagccgcagcctgtcagagctctgcctggctgttccagccccaggtattaggactcagggctcccctcaggaagctgggcccagctgggattgccgaggggcccctagccctggcagcggtcctgggctagtcggctgcctggccggggaacctgcaggctcccacaggaagaggtgtggagacctgccctcgggggcctctcccagggtccagcctgagcccccaccaggggtctctgcccagcacaggaagctgaccctggcccagctctaccgaatcaggaccaccctgctgcttaactccacgctcactgcctcggaggtctgagcagagggaggcccccaagagtgccattgaccaagagacagcagacagcctgcctcctggggcgtgccggcacctgcttcagctactgcctcctgtatgcatgagccggatgctgggcaggatccctgcctacgcccgggcccgatttgcgctttgccggactggatggagtggaggaggcccaggccacagtaccaccccacctgcccaggcagcccctcgtcacctactccccgaagttaccagctcagctcgagtcttcagggctgggctcctaggctgcccatcctacttctaccctcactggcctccagtgggattcactcctgccctgcccccaccttcccagtcccacaggccacccctggcttgggctgggttctgtgaagttacgtatttattgagcttttggttcttttataaagacttgtctagactccactgggaagagtcctttgctttggggcccagtgactcggggcacttgagttcagggcggcctccttgtgttcctgtgctcctccacttgccacggatgggccacggatggagcttgccatgggaagcactgggaagtaatggggtgtggggtgccaccagaccaacacccccagacttccccaccttcagccaccatcagagcctctccccaggtgccccccggggattcagggctgaatctgcccagttcccacactcaggccagccctcttgggaaggtgggtcctccatgggggtcccttcaggaactttttttttttttttaatacagagtctcactctgtcacctaggttggagtgcagtggtgtgatgtcggctcactgcaacctctgcctcccgggttcaaacgattctcctgccccagccactctagtagctggaactgcaggtgtgcaccaccacgccgggctagtttttgtattttaagtagagacggcatttcaccatattggtcaggctggtctcgaactcctgaccccaagtgttccgcccgcctctgcctcccatagtgctagaattacaggcctgagctactgcgcttggccccttgcggtacttttggcccaacctcctccatggctggggacgcggaggccgagagagaagtcacttgccctggctctaccttgaagtggttctcagggttggggcgagagtcggggtggggaccgagatgcagctctatcctgtgcccctggtcgcagcaggcagcccagcgcttcgcgtgttctacttggcctgtccgctgccgcctaatgagctcaggtctaggccgagcagagggggcacctggtcggactcggttgggctcgggcggccccgcctccccccgcccgccaggcgggcccttctcgacggcgcggggcgggccctgcgggcgcggggctgaaggcggaaccacgacgggcagagagcacggagccgggaagcccctgggcgcccgtcggagggctatggagcagcggccgc

SEQ ID NO: 166605 - DNA, 4725 bp, Homo sapiens
  Payload ID: 12800
  Gene Symbol: PLEKHG5
  Gene Name: pleckstrin homology domain containing, family G (with RhoGef domain) member 5
  Uniprot ID: O94827
  ENST ID: ENST00000535355
  CDS Start-End: 27-3254
gcagaccgcggcttcctccggccgccatggggacaggacccggtgtctccggacgcctagcagcctccaggccgggcccggggctgcccctccgggactcggagccctcctgggccgggggtcgtgcccgcgacggtgatagccaggtatgtcaccacgccgactgccagcagctgcaccgccgggggcccctcaacctctgcgaggcctgtgacagcaagttccacagcaccatgcattatgatgggcatgtccgcttcgaccttcccccacaaggctctgtgctggcccggaacgtgtccacccggtcatgcccgccgcgcaccagccccgcagtggacttggaggaggaggaggaggagagctctgtggatggcaaaggggaccggaagagcacaggcctgaaactctccaagaagaaagcaaggaggagacacacggatgacccaagcaaggaatgcttcactctgaaatttgacctgaatgtggacattgagacagagatcgtcccagccatgaagaagaagtcactgggggaggtgctgctgcctgtatttgaaaggaagggcattgcgctgggcaaagtggacatctacctggaccagtccaacacacccctgtccctcaccttcgaggcctacaggttcgggggacactaccttcgtgtcaaagccccagccaagcctggagatgagggcaaggtggagcagggcatgaaggactccaagtccctgagtttgccgattctgcggccagctgggaccgggccccccgccctggagcgtgtggacgcccagagccgccgggagagcctggacatcttggcccctggccgccgccgcaagaacatgtcggagttcctgggggaggcgagcatccccgggcaggagccccccacgccctccagctgctctctgcccagcggcagcagtggcagcaccaacactggcgacagctggaagaaccgggcggccagtcgcttcagcggctttttcagctccggccccagcaccagcgcctttggccgggaggtagacaagatggagcagctggagggcaagctgcacacctacagcctcttcgggctgcccaggctgccccgggggctgcgcttcgaccatgactcctgggaggaggagtacgatgaagacgaggatgaggacaatgcctgcctgaggctggaggacagctggcgggagctcattgatgggcatgagaagctgacccggcggcagtgccaccagcaggaggcggtgtgggagctgctgcacacggaggcctcctacatcaggaaactgcgggtgatcatcaacctgttcctgtgctgcctcctgaacctgcaagagtcagggctgctgtgtgaggtggaggcggagcgcctgttcagcaacatcccggagatcgcgcagctgcaccgcaggctgtgggctagcgtgatggcgccggtgctggagaaggcgcggcgcacgcgagcgctgctacagcccggggacttcctcaaaggcttcaagatgttcggctcgctcttcaagccctacatccgctactgcatggaggaggagggctgcatggagtacatgcgcggcctgctgcgcgacaacgacctcttccgggcctacatcacgtgggcggagaagcacccacagtgccagaggctgaagctgagcgacatgctggccaaaccccaccagcggctcaccaagtacccgctgctgctcaagtcggtgctgaggaagaccgaggagccgcgcgccaaggaggccgtcgtcgccatgatcggctccgtggagcgcttcatccaccacgtgaacgcgtgcatgcggcagcggcaggagcggcagcggctggcggccgtggtgagccgcatcgacgcctacgaggtggtggaaagcagcagcgacgaagtggacaagctcctgaaggaatttctgcacctggacttgacagcgcccatccctggcgcctccccggaggagacgcggcagctgctgctggaggggagcctgaggatgaaggaggggaaggacagcaagatggatgtgtactgcttcctcttcacggatctgctgttggtgaccaaagcagtgaagaaggcagagaggaccagggtcatcaggccacccctgctcgtggacaagattgtgtgccgggagctacgggaccctgggtccttcctccttatctacctgaatgagtttcacagtgctgtaggggcctacacgttccaggccagtggccaggccttgtgccgtggctgggtggacaccatttacaatgcccagaaccagctgcaacagctgcgtgcacaggagcccccaggcagtcagcagcccctgcagagcctggaagaggaggaggatgagcaggaggaggaagaggaggaggaggaggaggaggaggaaggcgaggacagtggcacttcagctgccagctcccctaccatcatgcggaaaagcagcggcagccccgactctcagcactgtgcctcagatggctccacggagaccctggccatggttgtggtagagcctggggacacgctgtcctcccccgagttcgacagcggtcctttcagctcccagtctgatgagacctctctcagcaccactgcctcatctgccacgcccaccagtgagctgctgcccctgggtccggtggacggccgctcctgctccatggactctgcctacggcaccctctccccaacctccttacaagactttgtggccccaggcccaatggcagagctagtgcctcgggccccagagtccccacgagttccttcccctccaccctcgccccgtctccgccgccgcacccctgtccagctgttgagctgcccgccccacctgctcaagtctaagtccgaggccagcctcctccagctgctggcaggggctggcacccatgggacaccctctgcccccagccgcagcctgtcagagctctgcctggctgttccagccccaggtattaggactcagggctcccctcaggaagctgggcccagctgggattgccgaggggcccctagccctggcagcggtcctgggctagtcggctgcctggccggggaacctgcaggctcccacaggaagaggtgtggagacctgccctcgggggcctctcccagggtccagcctgagcccccaccaggggtctctgcccagcacaggaagctgaccctggcccagctctaccgaatcaggaccaccctgctgcttaactccacgctcactgcctcggaggtctgagcagagggaggcccccaagagtgccattgaccaagagacagcagacagcctgcctcctggggcgtgccggcacctgcttcagctactgcctcctgtatgcatgagccggatgctgggcaggatccctgcctacgcccgggcccgatttgcgctttgccggactggatggagtggaggaggcccaggccacagtaccaccccacctgcccaggcagcccctcgtcacctactccccgaagttaccagctcagctcgagtcttcagggctgggctcctaggctgcccatcctacttctaccctcactggcctccagtgggattcactcctgccctgcccccaccttcccagtcccacaggccacccctggcttgggctgggttctgtgaagttacgtatttattgagcttttggttcttttataaagacttgtctagactccactgggaagagtcctttgctttggggcccagtgactcggggcacttgagttcagggcggcctccttgtgttcctgtgctcctccacttgccacggatgggccacggatggagcttgccatgggaagcactgggaagtaatggggtgtggggtgccaccagaccaacacccccagacttccccaccttcagccaccatcagagcctctccccaggtgccccccggggattcagggctgaatctgcccagttcccacactcaggccagccctcttgggaaggtgggtcctccatgggggtcccttcaggaactttttttttttttttaatacagagtctcactctgtcacctaggttggagtgcagtggtgtgatgtcggctcactgcaacctctgcctcccgggttcaaacgattctcctgccccagccactctagtagctggaactgcaggtgtgcaccaccacgccgggctagtttttgtattttaagtagagacggcatttcaccatattggtcaggctggtctcgaactcctgaccccaagtgttccgcccgcctctgcctcccatagtgctagaattacaggcctgagctactgcgcttggccccttgcggtacttttggcccaacctcctccatggctggggacgcggaggccgagagagaagtcacttgccctggctctaccttgaagtggttctcagggttggggcgagagtcggggtggggaccgagatgcagctctatcctgtgcccctggtcgcagcaggcagcccagcgcttcgcgtgttctacttggcctgtccgctgccgcctaatgagctcaggtctaggccgagcagagggggcacctggtcggactcggttgggctcgggcggccccgcctccccccgcccgccaggcgggcccttctcgacggcgcggggcgggccctgcgggcgcggggctgaaggcggaaccacgacgggcagagagcacggagccgggaagcccctgggcgcccgtcggagggctatggagcagcggccgc

SEQ ID NO: 166606 - DNA, 2881 bp, Homo sapiens
  Payload ID: 12801
  Gene Symbol: PLEKHG6
  Gene Name: pleckstrin homology domain containing, family G (with RhoGef domain) member 6
  Uniprot ID: Q3KR16
  ENST ID: ENST00000011684
  CDS Start-End: 149-2521
agcgcctcgcgggggtctggcccggagtggagggcgcgcggtcccagccctcccgctcggccggcgggtgtcgagttcagccctaggggacctctttctcctggacattgaagatatggccctttggaggtgacccaggagagaagggatgaaggcctttggtcctccacatgagggccccctccaaggactcgtggcctcccgcattgagacttatgggggccggcatcgagcctctgctcagagcactgctggcagactctatccccgaggataccctgtgctggatcccagtcgccgacgcctccagcagtatgtcccctttgccaggggttctggccaggcccgaggcctgtcacccatgagactgcgagatccagagcccgagaagaggcacgggggccatgtgggggctggcctgcttcactcccccaaactcaaggaactcaccaaggcccatgagctggaggtgaggctgcacactttcagcatgtttgggatgccccggctgccccctgaggaccggcggcactgggagataggagagggtggcgacagtggcctgaccatcgagaagtcctggagggagctggtgcctgggcacaaggagatgagccaggagctctgccaccaacaggaggccctgtgggagctcctgaccaccgagctgatctacgtgagaaagctcaagatcatgactgatctgctagccgccggcctgctgaacctgcagcgagtgggactgctgatggaagtgtcagctgagaccctgtttggaaatgtccccagcctgattcgaacccaccggagcttttgggatgaggtgctggggcccaccctggaggagactcgggcctcgggccagcctctggaccccattggtctgcaaagtggcttcctgacgtttggccagcggttccacccctatgtccagtactgcctccgagtgaagcagaccatggcttacgcccgagaacagcaagaaactaaccctctcttccatgccttcgtgcagtggtgtgagaagcacaagcgctctgggaggcagatgctctgtgacttgcttatcaagccccaccagcgcatcaccaagtacccactgctgctccatgctgtgctcaagaggagccccgaggcacgagcccaagaggccctgaatgccatgattgaagccgtggagtcattcctgcgacacatcaatgggcaggtccgccagggcgaagagcaagagagcttggcggctgcagcacaacgcatcgggccctacgaggtgctggagccacccagtgatgaggtggagaagaacctgcgcccattctccaccctggacctgacgtcccccatgctgggggttgcatctgagcacaccagacagctgctgctggaggggcctgtgcgagtgaaggagggacgagaagggaagctggacgtgtacctgttcctcttctctgatgtgctccttgtgaccaagccccagcgcaaggcggacaaagccaaggtcatccgaccccctctcatgctggagaagctcgtgtgccaacccctgcgagaccccaacagcttcctgctgatccacctcactgaattccagtgtgtctccagcgccctccttgtgcactgtcccagtcctacagaccgtgcccagtggctggagaagacccagcaggcccaggccgccctacagaagctgaaggcagaggagtatgttcaacagaagagggagctcctgaccctctatcgggaccaggacagggagtcccccagcaccaggccctccacgccttccctggagggctctcagagcagcgcagaggggaggactcctgagttctcgaccattatcccccacctggtggtgacagaagacacagatgaagatgctccccttgtgccagatgatacctcagactctggctacggcactttgatcccaggcacccccacggggtcccgctccccactgagccgtctacgccaaagagcccttcggcgggaccctcgcctcaccttctccaccctggaactccgggacatccctctgcgtccccaccctcccgacccccaagctcctcaacgccgaagcgcccccgaactgccggaaggaatcctaaaaggaggcagtcttccccaggaagacccaccaacctggtctgaggaagaagatggggcctccgagcgagggaatgtggtggtggaaacactccacagggcccggcttcggggccagcttccctcctccccaacccatgctgactctgccggggaaagcccctgggagtcctcaggggaggaggaagaagaggggcctctgttcctgaaagctggccacacatccctgcgcccaatgcgggctgaggacatgctcagagagatccgggaggagctggccagccaaaggattgagggggccgaggagccccgggacagcaggccacggaagctgactcgggcccagctgcagaggatgcgggggccccacatcattcagctggacacccctctgtccgcatcagaggtatgaggaatgcagaggacctttggcatgcatctctcccagaggagatctctccccagtagtgctggtcaccctccggcatctgtgactctacctcaaggaccacatttcccaaaggaagcctggcccaggcaccctgcctcctgctctgtttggggatcaagaactgtaaatttatgtatcataggtgcacctgagccccacagaaagttgtgcataaaaatgactgccctggctgggcatggctgcctgtaatcccagcactttgggaggctgaggtgggaggatcccttgagcccaggagttccagaccagcctgggcaatatagggaaaccctgtctttacaaaaaaaaattttaaaaatt

SEQ ID NO: 166607 - DNA, 1424 bp, Homo sapiens
  Payload ID: 12801
  Gene Symbol: PLEKHG6
  Gene Name: pleckstrin homology domain containing, family G (with RhoGef domain) member 6
  Uniprot ID: Q3KR16
  ENST ID: ENST00000304581
  CDS Start-End: 101-1063
aaaagaatgtaggaaggaaggaaggaacgaatgaacatgggagcgcagaggggaggaggagagaggctggggtggattcagtttcagactggacaatctgatgtgccccagagagggaggcagagcctccaccatccatcagaagacagaaaaagcctttggccagctactgtgccagccactgggagagcccaagatacagcatcccctgaaggccgccctacagaagctgaaggcagaggagtatgttcaacagaagagggagctcctgaccctctatcgggaccaggacagggagtcccccagcaccaggccctccacgccttccctggagggctctcagagcagcgcagaggggaggactcctgagttctcgaccattatcccccacctggtggtgacagaagacacagatgaagatgctccccttgtgccagatgatacctcagactctggctacggcactttgatcccaggcacccccacggggtcccgctccccactgagccgtctacgccaaagagcccttcggcgggaccctcgcctcaccttctccaccctggaactccgggacatccctctgcgtccccaccctcccgacccccaagctcctcaacgccgaagcgcccccgaactgccggaaggaatcctaaaaggaggcagtcttccccaggaagacccaccaacctggtctgaggaagaagatggggcctccgagcgagggaatgtggtggtggaaacactccacagggcccggcttcggggccagcttccctcctccccaacccatgctgactctgccggggaaagcccctgggagtcctcaggggaggaggaagaagaggggcctctgttcctgaaagctggccacacatccctgcgcccaatgcgggctgaggacatgctcagagagatccgggaggagctggccagccaaaggattgagggggccgaggagccccgggacagcaggccacggaagctgactcgggcccagctgcagaggatgcgggggccccacatcattcagctggacacccctctgtccgcatcagaggtatgaggaatgcagaggacctttggcatgcatctctcccagaggagatctctccccagtagtgctggtcaccctccggcatctgtgactctacctcaaggaccacatttcccaaaggaagcctggcccaggcaccctgcctcctgctctgtttggggatcaagaactgtaaatttatgtatcataggtgcacctgagccccacagaaagttgtgcataaaaatgactgccctggctgggcatggctgcctgtaatcccagcactttgggaggctgaggtgggaggatcccttgagcccaggagttccagaccagcctgggcaatatagggaaaccctgtctttacaaaaaaaaattttaaaaatta

SEQ ID NO: 166608 - DNA, 2963 bp, Homo sapiens
  Payload ID: 12801
  Gene Symbol: PLEKHG6
  Gene Name: pleckstrin homology domain containing, family G (with RhoGef domain) member 6
  Uniprot ID: Q3KR16
  ENST ID: ENST00000396988
  CDS Start-End: 231-2603
ctggcctcccgaaggcgggaggaggggagccgggggctgggctgagacaggaccctgggtagggagcagtgcgagggagacagcgccctcagagggaggactattgggaggcggcaggagggacagcgaacgtttcctcctctgctcctgaatcggaggaagccctaggggacctctttctcctggacattgaagatatggccctttggaggtgacccaggagagaagggatgaaggcctttggtcctccacatgagggccccctccaaggactcgtggcctcccgcattgagacttatgggggccggcatcgagcctctgctcagagcactgctggcagactctatccccgaggataccctgtgctggatcccagtcgccgacgcctccagcagtatgtcccctttgccaggggttctggccaggcccgaggcctgtcacccatgagactgcgagatccagagcccgagaagaggcacgggggccatgtgggggctggcctgcttcactcccccaaactcaaggaactcaccaaggcccatgagctggaggtgaggctgcacactttcagcatgtttgggatgccccggctgccccctgaggaccggcggcactgggagataggagagggtggcgacagtggcctgaccatcgagaagtcctggagggagctggtgcctgggcacaaggagatgagccaggagctctgccaccaacaggaggccctgtgggagctcctgaccaccgagctgatctacgtgagaaagctcaagatcatgactgatctgctagccgccggcctgctgaacctgcagcgagtgggactgctgatggaagtgtcagctgagaccctgtttggaaatgtccccagcctgattcgaacccaccggagcttttgggatgaggtgctggggcccaccctggaggagactcgggcctcgggccagcctctggaccccattggtctgcaaagtggcttcctgacgtttggccagcggttccacccctatgtccagtactgcctccgagtgaagcagaccatggcttacgcccgagaacagcaagaaactaaccctctcttccatgccttcgtgcagtggtgtgagaagcacaagcgctctgggaggcagatgctctgtgacttgcttatcaagccccaccagcgcatcaccaagtacccactgctgctccatgctgtgctcaagaggagccccgaggcacgagcccaagaggccctgaatgccatgattgaagccgtggagtcattcctgcgacacatcaatgggcaggtccgccagggcgaagagcaagagagcttggcggctgcagcacaacgcatcgggccctacgaggtgctggagccacccagtgatgaggtggagaagaacctgcgcccattctccaccctggacctgacgtcccccatgctgggggttgcatctgagcacaccagacagctgctgctggaggggcctgtgcgagtgaaggagggacgagaagggaagctggacgtgtacctgttcctcttctctgatgtgctccttgtgaccaagccccagcgcaaggcggacaaagccaaggtcatccgaccccctctcatgctggagaagctcgtgtgccaacccctgcgagaccccaacagcttcctgctgatccacctcactgaattccagtgtgtctccagcgccctccttgtgcactgtcccagtcctacagaccgtgcccagtggctggagaagacccagcaggcccaggccgccctacagaagctgaaggcagaggagtatgttcaacagaagagggagctcctgaccctctatcgggaccaggacagggagtcccccagcaccaggccctccacgccttccctggagggctctcagagcagcgcagaggggaggactcctgagttctcgaccattatcccccacctggtggtgacagaagacacagatgaagatgctccccttgtgccagatgatacctcagactctggctacggcactttgatcccaggcacccccacggggtcccgctccccactgagccgtctacgccaaagagcccttcggcgggaccctcgcctcaccttctccaccctggaactccgggacatccctctgcgtccccaccctcccgacccccaagctcctcaacgccgaagcgcccccgaactgccggaaggaatcctaaaaggaggcagtcttccccaggaagacccaccaacctggtctgaggaagaagatggggcctccgagcgagggaatgtggtggtggaaacactccacagggcccggcttcggggccagcttccctcctccccaacccatgctgactctgccggggaaagcccctgggagtcctcaggggaggaggaagaagaggggcctctgttcctgaaagctggccacacatccctgcgcccaatgcgggctgaggacatgctcagagagatccgggaggagctggccagccaaaggattgagggggccgaggagccccgggacagcaggccacggaagctgactcgggcccagctgcagaggatgcgggggccccacatcattcagctggacacccctctgtccgcatcagaggtatgaggaatgcagaggacctttggcatgcatctctcccagaggagatctctccccagtagtgctggtcaccctccggcatctgtgactctacctcaaggaccacatttcccaaaggaagcctggcccaggcaccctgcctcctgctctgtttggggatcaagaactgtaaatttatgtatcataggtgcacctgagccccacagaaagttgtgcataaaaatgactgccctggctgggcatggctgcctgtaatcccagcactttgggaggctgaggtgggaggatcccttgagcccaggagttccagaccagcctgggcaatatagggaaaccctgtctttacaaaaaaaaattttaaaaatt

SEQ ID NO: 166609 - DNA, 3111 bp, Homo sapiens
  Payload ID: 12801
  Gene Symbol: PLEKHG6
  Gene Name: pleckstrin homology domain containing, family G (with RhoGef domain) member 6
  Uniprot ID: Q3KR16
  ENST ID: ENST00000449001
  CDS Start-End: 495-2771
atcaaaccccagagctggcgcctcccaggctcccgcctctgcttggcaggagtttgaggccttcctgagatctgcctctccctgagtcaggatgaagatgagcaaaggttcagggtgtccctactcctccagtggtgggtagggacaggagggtgcctgccttggctccacccctggctccacctgcctggctctcctccagtcctaaccaagcagaggggtgtggaagccaggtctgtccctcagcctgcaggtttcccctccaccttgaggacagttctgcttgtggctgggacatcccctgcctcaatgcacgataattttgcctttggagatgggactttcctaggctgtgggtgagaagggagactagaaagtatgtggggtaattcaggccacaggcaaatgaaggaatgtgaccaggcctgccctgggaggagctgtgtggctgtggcttcagcctttcacacagaagggcagccactcccagctggatgggatgcaggctgcacgcccctggggagaaggctgcacatgatcccagtcgccgacgcctccagcagtatgtcccctttgccaggggttctggccaggcccgaggcctgtcacccatgagactgcgagatccagagcccgagaagaggcacgggggccatgtgggggctggcctgcttcactcccccaaactcaaggaactcaccaaggcccatgagctggaggtgaggctgcacactttcagcatgtttgggatgccccggctgccccctgaggaccggcggcactgggagataggagagggtggcgacagtggcctgaccatcgagaagtcctggagggagctggtgcctgggcacaaggagatgagccaggagctctgccaccaacaggaggccctgtgggagctcctgaccaccgagctgatctacgtgagaaagctcaagatcatgactgatctgctagccgccggcctgctgaacctgcagcgagtgggactgctgatggaagtgtcagctgagaccctgtttggaaatgtccccagcctgattcgaacccaccggagcttttgggatgaggtgctggggcccaccctggaggagactcgggcctcgggccagcctctggaccccattggtctgcaaagtggcttcctgacgtttggccagcggttccacccctatgtccagtactgcctccgagtgaagcagaccatggcttacgcccgagaacagcaagaaactaaccctctcttccatgccttcgtgcagtggtgtgagaagcacaagcgctctgggaggcagatgctctgtgacttgcttatcaagccccaccagcgcatcaccaagtacccactgctgctccatgctgtgctcaagaggagccccgaggcacgagcccaagaggccctgaatgccatgattgaagccgtggagtcattcctgcgacacatcaatgggcaggtccgccagggcgaagagcaagagagcttggcggctgcagcacaacgcatcgggccctacgaggtgctggagccacccagtgatgaggtggagaagaacctgcgcccattctccaccctggacctgacgtcccccatgctgggggttgcatctgagcacaccagacagctgctgctggaggggcctgtgcgagtgaaggagggacgagaagggaagctggacgtgtacctgttcctcttctctgatgtgctccttgtgaccaagccccagcgcaaggcggacaaagccaaggtcatccgaccccctctcatgctggagaagctcgtgtgccaacccctgcgagaccccaacagcttcctgctgatccacctcactgaattccagtgtgtctccagcgccctccttgtgcactgtcccagtcctacagaccgtgcccagtggctggagaagacccagcaggcccaggccgccctacagaagctgaaggcagaggagtatgttcaacagaagagggagctcctgaccctctatcgggaccaggacagggagtcccccagcaccaggccctccacgccttccctggagggctctcagagcagcgcagaggggaggactcctgagttctcgaccattatcccccacctggtggtgacagaagacacagatgaagatgctccccttgtgccagatgatacctcagactctggctacggcactttgatcccaggcacccccacggggtcccgctccccactgagccgtctacgccaaagagcccttcggcgggaccctcgcctcaccttctccaccctggaactccgggacatccctctgcgtccccaccctcccgacccccaagctcctcaacgccgaagcgcccccgaactgccggaaggaatcctaaaaggaggcagtcttccccaggaagacccaccaacctggtctgaggaagaagatggggcctccgagcgagggaatgtggtggtggaaacactccacagggcccggcttcggggccagcttccctcctccccaacccatgctgactctgccggggaaagcccctgggagtcctcaggggaggaggaagaagaggggcctctgttcctgaaagctggccacacatccctgcgcccaatgcgggctgaggacatgctcagagagatccgggaggagctggccagccaaaggattgagggggccgaggagccccgggacagcaggccacggaagctgactcgggcccagctgcagaggatgcgggggccccacatcattcagctggacacccctctgtccgcatcagaggtatgaggaatgcagaggacctttggcatgcatctctcccagaggagatctctccccagtagtgctggtcaccctccggcatctgtgactctacctcaaggaccacatttcccaaaggaagcctggcccaggcaccctgcctcctgctctgtttggggatcaagaactgtaaatttatgtatcataggtgcacctgagccccacagaaagttgtgcataaaaatgactgccctggctgggcatggctgcctgtaatcccagcactttgggaggctgaggtgggaggatcccttgagcccaggagttccagaccagcctgggcaatatagggaaaccctgtctttac

SEQ ID NO: 166610 - DNA, 1683 bp, Homo sapiens
  Payload ID: 12801
  Gene Symbol: PLEKHG6
  Gene Name: pleckstrin homology domain containing, family G (with RhoGef domain) member 6
  ENST ID: ENST00000536531
  CDS Start-End: 180-1667
ggctgggcatcggggctggctggcatcgccggggagccgacggcgacggggagccccgcgggcggggagggcggcgcagggcagcgggtgcggtgacacctgtgggcacagccctaggggacctctttctcctggacattgaagatatggccctttggaggtgacccaggagagaagggatgaaggcctttggtcctccacatgagggccccctccaaggactcgtggcctcccgcattgagacttatgggggccggcatcgagcctctgctcagagcactgctggcagactctatccccgaggataccctgtgctggatcccagtcgccgacgcctccagcagtatgtcccctttgccaggggttctggccaggcccgaggcctgtcacccatgagactgcgagatccagagcccgagaagaggcacgggggccatgtgggggctggcctgcttcactcccccaaactcaaggaactcaccaaggcccatgagctggaggtgaggctgcacactttcagcatgtttgggatgccccggctgccccctgaggaccggcggcactgggagataggagagggtggcgacagtggcctgaccatcgagaagtcctggagggagctggtgcctgggcacaaggagatgagccaggagctctgccaccaacaggaggccctgtgggagctcctgaccaccgagctgatctacgtgagaaagctcaagatcatgactgatctgctagccgccggcctgctgaacctgcagcgagtgggactgctgatggaagtgtcagctgagaccctgtttggaaatgtccccagcctgattcgaacccaccggagcttttgggatgaggtgctggggcccaccctggaggagactcgggcctcgggccagcctctggaccccattggtctgcaaagtggcttcctgacgtttggccagcggttccacccctatgtccagtactgcctccgagtgaagcagaccatggcttacgcccgagaacagcaagaaactaaccctctcttccatgccttcgtgcagtggtgtgagaagcacaagcgctctgggaggcagatgctctgtgacttgcttatcaagccccaccagcgcatcaccaagtacccactgctgctccatgctgtgctcaagaggagccccgaggcacgagcccaagaggccctgaatgccatgattgaagccgtggagtcattcctgcgacacatcaatgggcaggtccgccagggcgaagagcaagagagcttggcggctgcagcacaacgcatcgggccctacgaggtgctggagccacccagtgatgaggtggagaagaacctgcgcccattctccaccctggacctgacgtcccccatgctgggggttgcatctgagcacaccagacagctgctgctggaggggcctgtgcgagtgaaggagggacgagaagggaagctggacgtgtacctgttcctcttctctgatgtgctccttgtgaccaagccccagcgcaaggcggacaaagccaaggtcatccgaccccctctcatgctggagaagctcgtgtgccaacccctgcgagaccccagtacgtccttccttcagggagtcttttcttctccctcttctcagcgaggggaaggaggagctgggacggagatcaaataaaggctggcctcttgaa

SEQ ID NO: 166611 - DNA, 3584 bp, Homo sapiens
  Payload ID: 12802
  Gene Symbol: PLEKHG7
  Gene Name: pleckstrin homology domain containing, family G (with RhoGef domain) member 7
  Uniprot ID: Q6ZR37
  ENST ID: ENST00000344636
  CDS Start-End: 185-1324
gaaaattaccagcttcaggggctatgacttctacggtcttaaggataagacctgggatgaagtcttggaaacacatcacaaactcccgaccgatcaattagacctgaaaaagcagcaagaggccgtgtgggaacttttcacaagtgaatgcacctattttttggaccatttattagttcttaagatgatctttatgaatacactaagatatctgcaaactcatgaatatctcctagatgtggatttatggagactttttgcaaacctggaggagttaactcagacaagccttggttttgtgaacagtctctttggcatcatcaaggactatgtagacgcttctgagatttcctcatcactggattttatttccgtgctcacaaagtatttccgagggagtctctgtcagagccaccagacctactgcctgaactattcagctgctatcttttatcttgagagcctgaggcagagagatgactttggaatttatttaaaatggtgtgagcagaatgaacaatgcagacggctccacgtgccagagctgctagtggccccactacagaggctcactcgatatccgttgttgctgaagaatatctggaaaaggagcatggactctgctgagaaaatcatgatctactccatcaaggaaaaggtggaaaagtccatccgggaccttgaaggaaaagtgaagtggctggacaatttccaaaaatttagatatctacaggagattatagtgtggccaccgctttgggatagagataaaaggtttttcattccagagtgtttgaaacacatttttaaagaacacatggcagaaaacatcttgtcaccaaccagcagacaccttctctatgaaggaaaattaactcttgcagaaagcacgagattcctagatgtttatctgtttctcttcaatgatttcctcttagttacgaaaactaagtgcaacaaaaagaaacttggaggctcagaccctggtttaatgtgtccttctcttactcctgagttgcaagcagtaataaaagagggtggttcgtgtacagtactcgatcagcctattccactagatagattggtagtcaaaagtattgaaccactccatgtgtcagtctttgggctgagaaatgcttttcttatacaacacgaaaacagatatcgacagtgtatagcagcattcttattacaagcccaaacggaaaacatcaaaaaaacatggatggcacaaataacaactgcaatttcttgctttaccaagagtcaggaaaccaagaaaatatctttattcacattgcccgcagaatcctctgaaatttagggacctaaaacaagtggcatgtctttttagaagattatggtttaaggtataatttcattcaaagttttgtaacacttagctagtgataagctagaaggaaatttgcattttaaagaagtttcagaatttgaaattttgagctaggaaaatcctcagtatagaggaataatgactgcaacaaatttgaactctgaggaatttcttgacaaatatatactgacatccagattaccttctaatgcttccgtcaggtttgtaagaggtgtgagtgaagaaaggtgctaatttgtaaagggtgaatgatcagataaatggagtatcagaaggaaaacaatgtccactgcttatgtccaatatgaactccagcatcttactctgtatccataaaataatgaaaccaattttccttcatggcctgtcaatcagtcttaaccgctttatagtcctacctcaaacataatgataaatctttagatacaaagcttgattgttcttttaatatacaaagcaataaatagggactacatttaagtagcagttttaaaattcctattctcaaactcatctcaggtatatagtactctaacgtggaagtagaaaatcccaaagactaaattccattactttaagataggaagaaaaaaaaaatctggctttcaccagttaacacttttgcatggcttttcttggcctgttgtgaagtgtacagattttcatagacatagtaaggtatctgtctcttaactttattttttgaagaatgatggtgtttgccataaaaatactttctggttttgattggtgtgtgtgtgtgtgtgtgtgtgtgttagcacagtacagtcacttaattttatttggcaggacttcaaatttcttcagaatttttatcatgaaaggcagtttgaataattattatcatggcaggatatatactattaactacattcaaggaactagttcttagggtcagattattgcatcaaagggaagtccacaaacttccatttcagaatcgtaccttttgcaatttgcaaagtgaaagtagtaaatttatcaaatttggctgcaagacaactgaagccttagctgattttgttaagctgaagaatggggtagagaggataatgtttgggcaagtcatgtgcccagtaattccttgaggaaggtgaaatttcactatgcaaacaaagcagtaaagacaagtgcagcagaaaggcttttgtacaaggcaagcactattagaatggagactaataacctctttataataatgtcagaaatttaatagaagaaaaaaaggaaaatctggaggacagtaactattgttaatagctaagaataaatgaggtggaggggagaaaaaggggagaatagacttcaagcttcaagtgaattcctagagatggcatctggatgggactgaaagcagttatgtccaggagaatacaatatagattatgcaagagaagattttataaagaaatttctggttaaaaaaaatttttacattaacaatcatcttgcaaatgtttagatataaactaacctcggaggtgagcagtggactaggatgaggtggcctctcaaattcctttagtcccatgaatccagcaaccacagacttacatgtataaaggtagttttctccctctgaatctcattaaagggagagacagactgactaaattaacaaaatatataaaacagctcaagaatatgctgtacataaactggaattctataaagctcacaaagtaacatgtctaatatacaatatattagatgtttgaggatatgcacattaaactctttggagggtttagaatgaagcacattcgaatgaagggatcacgggggtcagaacaaaaaccattctagaaccgtggctcccaggaagaaaaaatagcaaaaaacaatggcacattgggccttccaaaaagtatctttggggaggggagggagaaaaataaataaataaataaataaataatgttttaagtatctttaaatggtcatctgggtattaaatgcagacacacaatgaaataaggggttaattacatattttttatatttgtttttagttttgttaattctctacaatattaaatggaatgtctaaggcaaaatggcattaataatttctcttgagatcaggaatttaattactattcgaaattgaacaacattaaaacaccactgtctatatccaagtgcaaagtcctaatattctgtaaataaattaatgcaaaatggttaa

SEQ ID NO: 166612 - DNA, 913 bp, Homo sapiens
  Payload ID: 12802
  Gene Symbol: PLEKHG7
  Gene Name: pleckstrin homology domain containing, family G (with RhoGef domain) member 7
  ENST ID: ENST00000549856
  CDS Start-End: 426-806
tggggcaacgcaactcagggttctacgagcacaggcggagttctgtggtgctgaacttacctggacttgaggtgttccccggggaccttctggtgtcagatggagctgctgattacctatgccatccacttctgctgctgaattcagaatccaaaaagccaagatggcctttctccaaaagaggagtgggcaaagacaaacacaagcacatatctgatctggaaaactgcctgtcctctgtgaaaattaccagcttcaggggctatgacttctacggtcttaaggataagacctgggatgaagtcttggaaacacatcacaaactcccgaccgatcaattagacctgaaaaagcagcaagaggccgtgtgggaacttttcacaagtgaatgcacctattttttggaccatttattagttcttaagatgatctttatgaatacactaagatatctgcaaactcatgaatatctcctagatgtggatttatggagactttttgcaaacctggaggagttaactcagacaagccttggttttgtgaacagtctctttggcatcatcaaggactatgtagacgcttctgagatttcctcatcactggattttatttccgtgctcacaaagtatttccgagggagtctctgtcagagccaccagacctactgcctgaactattcagctgctatcttttatcttgagagcctgaggcagagagatgactttggaatttatttaaaaaaacaaaacgatgcagaggaagaaactgggaacttcgtaccaagtctcttcgtgtggcacaactaacaatggctaagaactctagctgccatggactgagtgtttgagatgtgccaggctctgttctaagcactttgtgagaattatctcattaaaacctctcaccaacctaa

SEQ ID NO: 166613 - DNA, 6604 bp, Homo sapiens
  Payload ID: 12803
  Gene Symbol: PLEKHH1
  Gene Name: pleckstrin homology domain containing, family H (with MyTH4 domain) member 1
  Uniprot ID: Q9ULM0
  ENST ID: ENST00000329153
  CDS Start-End: 133-4227
gggactccggcgagagcgacgcaaggtcggctgcggcggcggcccgagggcgcccgtgtgcccagtgcgcggcggggacggccgcgagctcgctggagggctccccagaataatccagaagtcgattccatcatggcagaactcaaggtggaggcgccggccagcgtagactggcagaaacgctgcctgaccctggaaactcagcttttccggttccgcctacaggccagcaagataagggagctgctggctgacaagatgcaggagctggagcagaggctgctggaggcagagcagagagcagagaacgctgagacccaggtgggtgtcatggaagagaaggtaaaactatccaatctgaagaatgtggactctgaggggagcctgcaccggaaataccaagaattgctgaaagccataaagggcaaagatgagctcatcagccagctagaggctcagctggagaagcagaagcagatgagggcagaggaagcaaaaactgttcaagaaaaagctgcaaagatcaaggaatgggtgacactcaagttggcaaagcttgagatggagaatcagcatctgaaaagccataatcagcgcctggtggagcaggtgggatcccttcaagatgcgctagaagctattcagatagctccttcacggaagctgctggtgcccccctacggagctgcagagcaggattctgtcccttcagagccgggaatccagcctatgggccaggacagtggctcccaggcccagggtctgaaggcagctgtgcttgcaccttccccaggtgccctgcagagcaaggactctgtttctgaagcagcaagccccttggaggattctagttccagcacggtccattctggggaaacagtagaggccaagccccttcaacctcatctgggaagagagagccctccccaccagccatgcatgaagcttcttaccttcagatgtagttcagcttcctggggtgagggtctggttactgctcagagagggatgctccctgggacaaagacctctgccagggaaggtggtcctggcagcagtctgaccctaccaaaggtgcgggctcctggcaccccgcgggacagcatccagttggccaaaaggcaccacagccagccccaggtgggccatgggcactttggccgtgtggtgaacattgagactgaggccttctcagccctccacccctctggccttcctgagctggagtcccgagctaggtcccgggaggaaccagagaagatggagatggaggagccacccccagcagggaagaatgaggaaagagagagcccaaaggcccttggagctgagctggaggaagtggagctgggtaacaagccacctacacccccgctgcaccagttttcatcctgggagagccggatctatgctgtggccacatcgggcatgcggctctcagatatgtctcccagaagtaatactgcatgctgcgcttcaagccctcctgcccttgtttcccctgggtctttctctggcctggtctacaagaatgtcactgtgcctgtctacacagcactgaaggggagagctacacagatcagcaacatgccctttatggacgagtcctctgggtctgacgatgactgcagctctcaggcgagtttccgaatctcggtcccctcctctgagtccaggaagaccagcggactaggcagcccccgggccatcaagagaggcgtctccatgtcctcactgagctccgagggtgactacgccatccccccggacgcctgctcactggacagtgactactcagagcctgagcacaaactgcagcgcacctcatcctactccaccgacgggctgggcctgggcggggagtcactggagaagtcgggctacctgctgaaaatggggagccaggtgaagacgtggaagaggcgctggtttgtcctgagacagggacagattatgtactacaagtccccgagtgatgtcatccggaaacctcaaggccaagtggatctgaactcccgctgccaaattgttcgaggggagggttcacagacgtttcagctcatctctgagaagaaaacctactacctgacggccgattcacccagcctgctggaggagtggatccgagtactccagagcctgctgaaggtgcaggccaccgggcctccagctctgcttcggggtggcaccaagcccaccgtgaagggctggctgaccaaggtaaagcatggccactccaaggtggtctggtgcgctcttgttgggaaaatcttctactactatcggagccatgaggacaagcgacccctgggctgcctgcctgtgcgggatgcgcacatagaggaagtagatcgatcctgtgactcagacgaggactatgaggctggaggaaccagacggttgctttcctcccactgcaccctggtgatccaccccacagagcacagccccacctacctcctcattggcaccaagcatgaaaaggatacgtggctctaccacctcacagtggctgcaggtggcagcagtgccaaggtgggcactgcctatgagcagctcattggaaaactgatggatggtgaaggagatccagattcgccgctctggaggcaccccatgctgtgctacagcaaagacggcctatacgcctccctcaccaccctgccctctgaggccttgcagacggaggccctcaagctcttcaagtcctgccagctcttcatcaacgtgccggtggaagctgcctcggtggactaccatgtgtccctggcccagaccgcactgcaggtctgcctggttcaccccgagctgcagagtgagatctactgccaactcatgaagcagaccagctgccgcccacctcagaagtactccctcatgcagtgctggcagctcctcgctctgtgtgctccacttttcctgcctcagcatcacttcctctggtatgtcaagcagcagctccaacgccatgcagatcccagaagtgaaactggccagtatgccacctactgccagcgggcagtggagcggaccctgcggaccggggagcgggaagccaggccatcgcgcatggaagtggtgtccatcctgctgcgtaaccccttccaccactccttgcccttcagcatccccgtgcactttaccaacgggacttaccatgtggttggttttgacggctcttccacggttgatgagttcctccagcggctgaaccaggagataggcatgagaaagccatcccactctggctttgccctcttcacggacgatccctcgggcagggacctggagcactgcctgcagggaagtgtcaagatctgtgatgccatctccaagtgggaacaagccatgaaggagctgcaccccggaaagtctgagggtgggacacgcgtcgtgaagctgatgtacaagaacaggctgtactttcgcagtcaagtcaaaggggagacggaccgagaacggctgctccttgcctctcaaaccagtagagagatagtggcagggaggtttcctatcaacaaggaattggctcttgagatggctgccctgatggcccaggtagaatatggggacttggagaagcctgccctgccaggccctggaggcacatcccctgccaaggctcagcatcttctccagcaggtcctagacaggttccaccccaggcgctatagacatggggcccccgctgaacagctgaggcacctggcagatatgttgaccacaaaatgggcaacattgcaaggatgctcccctcctgagtgcatccgcatctacctgaccgtggccaggaaatggcctttctttggtgctaaactttttgctgctcagcctgcccagctgtcttccaaggagaacgctctggtgtggattgctgtgaatgaggatggcgtcagcatcctggaccacaacactatgcaagtgcacatcacttacccctactcttcagtgacaacgtttggtggctgcagggatgacttcatgcttgtgattagatctatcccagacaagagctctggaaaaagccacattgagaagttgatcttccggatggctgctcccaagattgcagaagctaccttcatcatggccagctatatgaaccattgcactacaactgtgaacccccccaccaacccacccggagcctgccagctgtgggaactggatggacgacagttcttttcttctgtttcctgtgctaccaaggggccaacgttgctgtgaatatttctcctacccgattccccaacaccactagtgcctctggatttagagatatatatcctagggtatgatactactgtgacgggtctaacagcccccggctactcttgttctgtgaaatgtgtattttagtctctgtgaagcctttactctctaggtgccttataatgtttcagggctcaactttttaaaatccagacccagtgttaaaaccatttattccttttttcataagaataatgactccagatgctacctgattctagacatagacagggatgatccactgttactgagggcatcagtgctataagttaaggctttctgcactggtactctcaaggaagctaattttctttctggggggggcgggggacacagtgtcactatgtcacccagtccacagggttcaagcaattctcctgcctcagccttcggagtggctgggattacaggtgtgcgccaccatgcccggctaatttttgtatttttagtagagacggggtttcaccatgttggccaggctggtctcgaactcctgacctcaggtgatctgcccactttggcctcccaaagtgctgggattacaggcatgagccatcgcccagcccagaagctaattttttaatattgtatatggtcttatttatacttgaagttttgtgaacgtcgctaaacaggataggactaaaatttccaattctcctacactctgtcagaagcctagaactcactaaactgggctgcctttcccaaatgggaaaggtgctgacagagttggagaaaaaagaatagactcatttttccccattattggtatgtaggcattggtacagccccttctggggcagtctttgcaggataacatgctatacctgctaagattcaagctgttttcctcacactggactttaggccaaacccagtaccacgcaatgtgcaagcaagggcaggaggtaggtccaatctgacccctccctgtctcattttaatgactggacagcgctcggtgaaggctgtgttcactgtagtgggccatcatttgtttccttcttcttgtaaaagaccaagcaaatgcactctgctttttgctgctgtaagaccaccaaaaatgagtcagaaacacagaagactatttcaggcatgtgggcctggatatgctccttgagacttctggcaaacttctgctgggaattagtttgagggtgagggtacatatgtgacatttgccctagcctaagagtagcaggtaaaaaaaagtttctttcatcttttgccttactgataataccataatccccctcaattcagaccttctgattgagtgcagaggagactagacagtctcctctagacaggttgtagacacaccctcccctaacaaaaacaaaacgaaagagttcatactctgattttccaacatctaggaaactgagttttatttcctagctctaaggcagccttactatatgtcagtaaagtgctgaaaactgtatatttagcagtagcacccaaaaccaagcctttaaccccaacaatgtgtgtatcttttgcacagcaaaaactgcgaggccagaactagtttatctgaacacctcagctgctgtaagcttctcctctctcaccccgtaaactgacaagcatgatgaaaaaagaagcacatccaagtttctgcctcttttaaatgtacttgactttgcaaggcaagtagttttacagccatttctgttcacacttttcaccccacaacttggggatctagctgagacatttctacctcgaacaagtcacatgtaccacaggttcctgaataattcctgcagggctggtgacagacataacagctctggttttataatatcttgggtatctctaaggccaataaggataacattatctacccagagagtttagaagaaaagtaggagtccaaaggaagagtaaacaagaatggagctgtgttcacactgaatttggggtcaatctatttcccccaccctctctcctccccaacccttcaggaaccctttagtttattaatcttatacagaagaaactaacttagaaacaaaggattcaatatttgcttatttattctttgttaacatgagagtcccatgtctgaaaaccaaagtccaatttctgtctggccttttgtctcatccttcttggcaaaagtagcttttgaactgatataaaaaaaaatgctgagtaacagaaaagtattaatgtgcttgacaccatgactgaaatactatgatcttgtttgtcaataaaaagcagctatctgtgaaccaggtaactgtgtgttttggaagatctgtttattaacagtaaataaataagccctgtacagaacacaggcactaggttgaca

SEQ ID NO: 166614 - DNA, 1820 bp, Homo sapiens
  Payload ID: 12803
  Gene Symbol: PLEKHH1
  Gene Name: pleckstrin homology domain containing, family H (with MyTH4 domain) member 1
  ENST ID: ENST00000561370
  CDS Start-End: 1-547
acttttcctgcctcagcatcacttcctctggtatgtcaagcagcagctccaacgccatgcagatcccagaagtgaaactggccagtatgccacctactgccagcgggcagtggagcggaccctgcggaccggggagcgggaagccaggccatcgcgcatggaagtggtgtccatcctgctgcgtaaccccttccaccactccttgcccttcagcatccccgtgcactttaccaacgggacttaccatgtggttggttttgacggctcttccacggttgatgagttcctccagcggctgaaccaggagataggcatgagaaagccatcccactctggctttgccctcttcacggacgatccctcgggcagggacctggagcactgcctgcagggaagtgtcaagatctgtgatgccatctccaagtgggaacaagccatgaaggagctgcaccccggaaagtctgagggctgtactttcgcagtcaagtcaaaggggagacggaccgagaacggctgctccttgcctctcaaaccagtagagagatagtggcagggaggtttcctatcaacaaggaattggctcttgagatggctgccctgatggcccaggtagaatatggggacttggagaagcctgccctgccaggccctggaggcacatcccctgccaaggctcagcatcttctccagcaggtcctagacaggttccaccccaggcgctatagacatggggcccccgctgaacagctgaggcacctggcagatatgttgaccacaaaatgggcaacattgcaaggatgctcccctcctgagtgcatccgcatctacctgaccgtggccaggaaatggcctttctttggtgctaaactttttgctgctcagcctgcccagctgtcttccaaggagaacgctctggtgtggattgctgtgaatgaggatggcgtcagcatcctggaccacaacactatgcaagtgcacatcacttacccctactcttcagtgacaacgtttggtggctgcagggatgacttcatgcttgtgattagatctatcccagacaagagctctggaaaaagccacattgagaagttgatcttccggatggctgctcccaagccccagcatcatgcagtcctcagttgggtgcttacgtgctcttctcttccttgcagcagtcctcaaggcagggcagattcctctttaagagctaaccagagcagaacactgggcctccttttctcagaagggcactgtgcatctgagaggatctccagaccaacaggagcccacaccactgggcctctgaacagcacagttatgattccctttggatattttctcccagattgcagaagctaccttcatcatggccagctatatgaaccattgcactacaactgtgaacccccccaccaacccacccggagcctgccagctgtgggaactggatggacgacagttcttttcttctgtttcctgtgctaccaaggggccaacgttgctgtgaatatttctcctacccgattccccaacaccactagtgcctctggatttagagatatatatcctagggtatgatactactgtgacgggtctaacagcccccggctactcttgttctgtgaaatgtgtattttagtctctgtgaagcctttactctctaggtgccttataatgtttcagggctcaactttttaaaatccagacccagtgttaaaaccatttattccttttttcataagaataatgactccagatgctacctgattctagacatagacagggatgatccactgttactgagggcatcagtgctataa

SEQ ID NO: 166615 - DNA, 510 bp, Homo sapiens
  Payload ID: 12803
  Gene Symbol: PLEKHH1
  Gene Name: pleckstrin homology domain containing, family H (with MyTH4 domain) member 1
  ENST ID: ENST00000561057
  CDS Start-End: 1-104
tttttgctgctcagcctgcccagctgtcttccaaggagaacgctctggtgtggattgctgtgaatgaggatggcgtcagcatcctggaccacaacactatgtgacaacgtttggtggctgcagggatgacttcatgcttgtgattagatctatcccagacaagagctctggaaaaagccacattgagaagttgatcttccggatggctgctcccaagattgcagaagctaccttcatcatggccagctatatgaaccattgcactacaactgtgaacccccccaccaacccacccggagcctgccagctgtgggaactggatggacgacagttcttttcttctgtttcctgtgctaccaaggggccaacgttgctgtgaatatttctcctacccgattccccaacaccactagtgcctctggatttagagatatatatcctagggtatgatactactgtgacgggtctaacagcccccggctactcttgttctgtgaaatgtgtatttta

SEQ ID NO: 166616 - DNA, 747 bp, Homo sapiens
  Payload ID: 12803
  Gene Symbol: PLEKHH1
  Gene Name: pleckstrin homology domain containing, family H (with MyTH4 domain) member 1
  ENST ID: ENST00000559168
  CDS Start-End: 1-244
gcttgtgattagatctatcccagacaagagctctggaaaaagccacattgagaagttgatcttccggatggctgctcccaagattgcagaagctaccttcatcatggccagctatatgaaccattgcactacaactgtgaacccccccaccaacccacccggagcctgccagctgtgggaactggatggacgacagttcttttcttctgtttcctgtgctaccaaggggccaacgttgctgtgaatatttctcctacccgattccccaacaccactagtgcctctggatttagagatatatatcctaggcaaaaactgcgaggccagaactagtttatctgaacacctcagctgctgtaagcttctcctctctcaccccgtaaactgacaagcatgatgaaaaaagaagcacatccaagtttctgcctcttttaaatgtacttgactttgcaaggcaagtagttttacagccatttctgttcacacttttcaccccacaacttggggatctagctgagacatttctacctcgaacaagtcacatgtaccacaggttcctgaataattcctgcagggctggtgacagacataacagctctggttttataatatcttgggtatctctaaggccaataaggataacattatctacccagagagtttagaagaaaagtaggagtccaaaggaagagtaaacaagaatggagctgtgttcacactgaatttggggtcaatctatttccccca

SEQ ID NO: 166617 - DNA, 6981 bp, Homo sapiens
  Payload ID: 12804
  Gene Symbol: PLEKHH2
  Gene Name: pleckstrin homology domain containing, family H (with MyTH4 domain) member 2
  Uniprot ID: Q8IVE3
  ENST ID: ENST00000282406
  CDS Start-End: 111-4592
gagctcggcttgaggcgggcgcgggctgagagtccggggatcccgggggccagtcgcggccgggacatcgggcgctgcggccggggacccgctgctgagatagacagaatatggcagagctttctgagccagagggaccagtagattggaaggaacgatgtgtagctctggagtcccaactcatgaaatttagagttcaagcaagcaagatacgagagcttttagcagagaagatgcaacagcttgagagacaagttattgatgctgaacgtcaagcagaaaaagcttttcaacaggtacaagttatggaagataaattaaaagcagctaatattcaaaccagtgaatcagagacaagattatataataagtgtcaagatctggagtcgctaatacaggaaaaagatgacgtcattcaaaacttggaattgcaacttgaagagcagaaacaaataagaatacaagaagctaaaataatagaagagaaagcagctaagataaaagaatgggtaacagttaagttaaatgagctggaattggagaatcagaatcttcgtttgatcaaccaaaaccaaactgaagagataagaacaatgcagtcaaaactacaagaagttcaaggaaagaagtcatccactgtctctacactaaagctttcggaaggccagcgcctgagcagtttgacctttgggtgctttttatctcgagcaaggagtcctcctcaagtagtaaaatctgaggaaatgagcaagatatcatcgaaagaacctgagttcactgaaggaaaagacatggaagaaatggaaattccagaaaagtctgttgataaccaagttctagaaaacaacagaggccagagaacattgcatcaaaccccttgtggctcagaacagaatcggaaaacaagaacaagctttgccacagatggtggcatctcccagaattctggggctcctgtgagtgactggagctctgatgaggaagacgggagcaaaggaagatccaagtccagatgcacatccaccctctccagtcacacatctgaggaaggggtccagtgtagcaggatgggaagtgaaatgtatctgacagcatctgatgacagcagctctatatttgaggaagagacttttggcataaagagaccagaacacaagaagctatattcttggcagcaggaggcacagtggaaagctctaaatagtcctcttggaaagggaaattctgaattaagtaaaaaggaacaagatagttcctcggatgaactgaataaaaaatttcaatcccagagactcgattattcatcttcatcgagtgaagccaacaccccaagccctattttgaccccagctttaatgccaaagcatcctaactcactctctggaaaaggaacacaattagtgccttcatcacacctgccacccccaaagttaaggattcctaatgttttcagtataagtgtagcactagccaaaaggcacttaagccagccacagttaagctctgacaggatgtttggtacaaatagaaacgctataagcatgatacgaccactgagacctcaggaaactgatcttgatctagttgatggagacagtacagaagttttagagaatatggacacgagttgtgatgatggattattttcctatgactccttggactctccaaattcagatgaccaggaacactgtgactcagcaaagaaggtggcatacagcaaacctccaactcctcccctgcaccgttttccttcttgggaaagcagaatttatgctgtagccaaatcaggtattcgaatgtctgaggccttcaatatggagagtgttaataaaaattctgctgcaaccctttcctatactacatcaggactttatacatctctgatatacaagaacatgaccaccccagtgtatacaactttgaaggggaaggcgacccaaataagtagcagccctttcctggatgactcatctgggtcagaggaagaagacagctccagatccagctcccggacgtcagagtcagactcacgcagtaggagtgggccaggcagccccagagccatgaaacgaggtgtgtctctctcctctgtggcttctgaaagtgattatgctattcctcctgatgcttactccacagacacggagtactcacagccagagcagaagctcccaaaaacttgctcatcttccagtgataatgggaaaaatgaaccactggaaaaatctggttatttattaaaaatgagtggtaaagtcaagtcttggaagcggcggtggtttgttcttaaaggtggtgaattactttactacaaatctccgagtgatgtaattagaaaaccccagggccatattgaacttagtgcatcctgtagtattttaagaggagataacaaacaaacagttcagttgaccactgaaaaacacacatactatctgactgcagattctcccaatatattggaagagtggattaaagtgttacagaatgttcttcgagtacaagctgccaacccactttccctgcagcctgagggcaaacccaccatgaagggattgctcactaaggtaaaacatggatattccaagagagtctggtgtacactaataggaaagacattatattattttcggagtcaagaagataagtttcctttaggtcagatcaaactctgggaggctaaagtggaagaggttgacagatcttgtgattcagatgaagattatgaagccagtggacgaagtctgttatccacacattatactatcgttatccatcccaaagaccaaggtccaacttacctcctaattggatccaagcatgaaaaggacacttggctttatcatctgactgttgcagctggaagcaacaatgtaaacgttggatctgaatttgaacaactggtttgcaaattgctaaatatagacggggagccttcctctcagatatggagacaccccactttgtgtcacagtaaagaaggaatcatttcccctctgacaactctaccttccgaagccctgcagacagaagctattaaattatttaagacctgccagctttttataaatgctgcagttgactctcctgcaattgattaccacatatctttagcccagagtgctttgcaaatctgcctgacacatcctgagctgcagaatgaaatttgctgtcagcttattaaacagacaagacgaagacagccacagaatcaaccaggaccattgcagggctggcagctcttggcactctgcgttgggctcttccttccccatcatcctttcctgtggctcctcaggcttcacctaaagaggaatgcagattccaggacagaatttggaaaatatgccatttactgccagcgttgtgtagaaagaacgcaacaaaatggtgacagagaagcaagaccctcaaggatggaaattctttcaactcttctccgaaacccttatcaccattctttgccctttagtatacctgtgcacttcatgaatgggatataccaggtagttggttttgacgcatctaccacagtggaagaatttttgaatactttgaaccaggacacaggaatgaggaaaccagcgcagtctggatttgcgttgttcactgacgatccttctggcagagatttagagcattgtcttcaaggaaacatcaagatttgtgacattatttccaaatgggaacaggcttccaaagaacagcagcctggaaaatgtgaaggtacaaggactgttcgtctgacatacaaaaacagactatatttctcagtgcaagctcgtggagagactgatagagaaaagttgctgttaatgtatcagacaaatgatcaaatcataaatggactttttcctctgaacaaagatctggcattagaaatggcagctcttttatctcaggtagagattggagattttgaaagacctttctcaactccagcagggcatgttaccaatcagtgcaaagtgaatcaaactctaaagcaagtcatagagaaattttatcctaaaaggtatagagatggctgttctgaagagcagttaaggcagctttgccagcgactttcaaccagatggatggccctccggggacacagtgctgctgactgtgtgcgcatttatttgacagtagccaggaagtggccattctttggtgccaagttgtttcttgcaaaacccataactccatcatcacttggaagtactttcttgtggctggctgtacatgaggatggtttaagcctcttagaatacaactccatgaggttaatagtcagctatgtgtacaagagtctaatgacctttggaggctatcaagatgattttatggtagtcattaacaatacacattcaaaggacaaaccaacagagaaattactttttgccatggcaaaacccaagattcttgaaatcactcttttgatcgccagttacataaacaacttccatcagcaaaaggcagcatttcaccacctctctgctccagcactgctctcagcccagacccggggaccccaagccagaatgatgggaagccagcctcttctgtcaagcagcagaccgaccaaaggccccaccttactctgaaagctggggagcctgaacattcactccttgtcctccatgctgtggctgtatcagctccctacaagttcgtttacacctggcagcacggcagccacacaccggtattccaaaccttaacaatgaagggggttagtctcttttatttgattcttaaatattcaaataaatattaacagtaaaacataaacacaaaatttgccaacacactaattttcttatagagtaaatgagtaagaattcatcattttttccatctcccttctcccttgtcatcagacacattgtgcaatgtggcttttcttttcttttctttttttcccctttttaatattctggcaatctttagaaagggagattccaaactcccatttggtaaaccagttgattatttggaaatgttcactgccaaaatagtaagtgctataactaaatgcgcttttaattaatgatatagtgtttggaaaggagtagaacatgcagcataagaaactgctgcagagtggtgcgaggagtacattttcagagcaggtgcagtacatcttccggctctatgaatcattatgtgagaaagcaggataacattaggtaacctgagcctcctgtgtggtattagaaagtataccgtcaccttttcacatcactggagtgtaaaatttaaaacaagatggtgattcctgacattccttggctgtcagtgctgcccagattcagaagaatattgcccacatttcactgtatttggtgctgggtcattttgaccttgctttgttaataatatctttaaaaacaaagacaatccttaaagctttgctcctcacacattaccttctaattatagtttgaaaatagattccctacacatacatacatatgtatgcacagatagggtcttgctatgttgcccaggctggtcttgaactcctggcctcaagcaatcctctctcctcagcctcccaaagtgctgggattacaagtgtgagccaccacacctggctccagaaattttattttatttttttgaggcagggtctcactctggttgcccaggctggagtgcagtggtgccatcatagctcactgtagcctcgaccttccgggatcaagcaatcccacttcagcctcttgaatagctgggactagaagcatgcaccaccatgcccatctaatatttgtatttttagtagagacaggatctccctatgttgtccagcctagtctcaaactcctgggttcaagcaatcctcccacctcggcctcccaaagtgctgggattgcaggcatgagccaccgtgcccagcctcaaaaatattttttaaaagaaaagagaaaataattcttctgtcaaaggaggttaaattttagttgatagagtacttaaatgcattactttattaggttatgtaagtggtcagtgcattccagtatgtgtcacaacagtgtagttcatattcatgataaaaatgaaactgtgataagacatgaaaattatattattaaaatgttcaattgtaatggtaatcatgagtatacttaattttatttatgtatagaatatttgtatttattttttggacatatatttatcactttgtcattttttttaaccaatttgagaaatgttagctgctgaattaatttgttgcccgagccttcatattttcttctttgctgccttctccctgtggcaatgtactgttctcacattaagccttttaaaaatgttccatactgtattagcatccttagaagggacagaactaagaaatacattgctcaaataatattttactttattgataatgacaaaaagaatattttttaaaccccatcaaaatagatttcaattgactgtttcccctacatcttttgagccacagtcgcccatcgaataagcaaatttgtttttgagaataaactggtaaccagtttgtgatgactctcagaagccttttggctgggttacagaagagtttctaagttcctagagagccatttaataattagttggtgagccagaggcttgacagagctgttacttatgtgtgagggctttattctcaggcagtagtttattcatcatttggtaagcccctccccacactcctctaatttaaacaagtagtgaaggcttatcttaaactgtgtagtaccttagacttggcatttatttttgatagagcagagataaaatattttgatggaaggaaatcaattttctgtaactgatgatgtgaaaattttattttctgggaaattatatagccattcaaaaattcaaagtatgttattatgattggttacaagagaataatgttacatgtttaattgtaatatttgtctcctatcattttcttccctttcagtcataataaatgatttacaaaaccca

SEQ ID NO: 166618 - DNA, 737 bp, Homo sapiens
  Payload ID: 12804
  Gene Symbol: PLEKHH2
  Gene Name: pleckstrin homology domain containing, family H (with MyTH4 domain) member 2
  ENST ID: ENST00000491692
  CDS Start-End: 45-314
atcgggcgctgcggccggggacccgctgctgagatagacagaatatggcagagctttctgagccagagggaccagtagattggaaggaacgatgtgtagctctggagtcccaactcatgaaatttagagttcaagcaagcaagatacgagagcttttagcagagaagatgcaacagcttgagagacaagttattgatgctgaacgtcaagcagaaaaagcttttcaacagacggaatcttgctctgtggcccaggctggagtgcagtggcgcgatcttggcttactgcaacctccgcctcccgggttcaagtgattctcctgcctcaatctcctgaataactgggattacaggtacaagttatggaagataaattaaaagcagctaatattcaaaccagtgaatcagagacaagattatataataagtgtcaagatctggagtcgctaatacaggaaaaagatgacgtcattcaaaacttggaattgcaacttgaagagcagaaacaaataagaatacaagaagctaaaataatagaagagaaagcagctaagataaaagaatgggtaacagttaagttaaatgagctggaattggagaatcagaatcttcgtttgatcaaccaaaaccaaactgaagagataagaacaatgcagtcaaaactacaagaagttcaaggaaagaagtcatccactgtctctacactaaagctttcggaaggccagcgcctgagcagtt

SEQ ID NO: 166619 - DNA, 632 bp, Homo sapiens
  Payload ID: 12804
  Gene Symbol: PLEKHH2
  Gene Name: pleckstrin homology domain containing, family H (with MyTH4 domain) member 2
  ENST ID: ENST00000490038
  CDS Start-End: 1-267
tccaaagaacagcagcctggaaaatgtgaaggtacaaggactgttcgtctgacatacaaaaacagactatatttctcagtgcaagctcgtggagagactgatagagaaaagttgctgttaatgtatcagacaaatgatcaaatcataaatggactttttcctctgaacaaagatctggcattagaaatggcagctcttttatctcaggcagctttgccagcgactttcaaccagatggatggccctccggggacacagtgctgctgactgtgtgcgcatttatttgacagtagccaggaagtggccattctttggtgccaagttgtttcttgcaaaacccataactccatcatcacttggaagtactttcttgtggctggctgtacatgaggatggtttaagcctcttagaatacaactccatgaggttaatagtcagctatgtgtacaagagtctaatgacctttggaggctatcaagatgattttatggtagtcattaacaatacacattcaaaggacaaaccaacagagaaattactttttgccatggcaaaacccaagattcttgaaatcactcttttgatcgccagttacataaacaacttccatcagcaaaaggcagcatttcacc

SEQ ID NO: 166620 - DNA, 2987 bp, Homo sapiens
  Payload ID: 12805
  Gene Symbol: PLEKHH3
  Gene Name: pleckstrin homology domain containing, family H (with MyTH4 domain) member 3
  ENST ID: ENST00000293349
  CDS Start-End: 432-2804
agtcccggggctgcagggagcgcagcgcgcgcggcccgggccccggccaccggacgccctaccggacacgaccctccctggagcttggacaactgcccacctcggacgctgcaccggacactgccccccacagggctggacactccaacggacactacttcccagctccggacattgctccctcctctcccggggccctggacgcttttccccctcccccctccgggggcccagacactgagcccccctcagcgtctggctagcgtccccttgcaccccagcccaggacactgcctcctccctgtcctcttctcccttctgctcctcccacctcatctttcccctgctcgggtcggagccccgccagttcctccgaccccctactgctcggccgcggctgcccgcgcccccatccgcagctcctcgcccggatgcctctccccgggggactatggtggcttctctgctgccgtcgaggcttcactcttctgcaccgggactacggggacggcgagcttagcggggacggggacgaggacgaggacgaggaaacctttgagctgcggaccccgagtccagcgggcggcgggaggggtcccctggaagtgacgctgactcagccagtgaggagcgggcctgtctccaacaggctgcagagctgggaggagacttggagcctcatcccggagaaagggctgccggaggacgacccggacatcgttgtgaaaggttggctgtaccgggagccccgcggaggaggggcgcggccctggctgcccccgcgccgagcctggtttgtgctcacgcgggactccctggatcagttcagcagcagcgggaaaggggcgcggcgtctcgggagcctcgtgctcaccagcctgtgctcggtgaccggcccagagcgcaggcgtaaggagacaggtctgtggtcagtgactgtgtctggtcggaaacacagtgtccgcctctgctccccacgccaggcagaggctgagcgctggggggtggcattgcgggaagtgatcgcctccaaggcacccctggagacccccacccagctactgctcagggacatacaggaaagttgcggggacccagaggccgttgccctcatttacctgaggaacccgattctgagacacactagtggagccttgtatgccccactcctgcccctgccctatggagtcagcgccccaggtccgggctatgcacccctgcgcgaggaggcggtgcggctgttcttggcgctgcaggcgctggagggggcgcggcgccccgggcccttgatgcagggtgtgctccaaacctgccgggacttgcccgcgctccgggatgaactcttcctgcagctggctaagcagacctcgggccctgcaggtccccccgggctcccggctacccaagaccctgcggccctgcggtactggcaactcctcacctgcatgagctgcaccttccgacctgggggagctgtgcgggggcacctcctggggcacttggagaggaccgagcaggcactcccggactcggaactggcggaatatgcgcgcttcatccggaaagcgctgggccggacgcgcggcagagagctggtgccctcgctggcggagatttccgcgttgagccaacggcaggagctgctgtgtaccgtgcactgtccgggggctggtgcctgtgctgtggccatcgactcccacaccacggcgggggaggtggctcgagagctggtggggcggctgggcttggcccggagccgcaacgcattcgcgctgtacgagcagcgaggggcccaggagcgagccctggctggggggaccctcgtggccgacgtgctcaccagcttggccgcggaggaagctgggttggaggactcgcccgactccgggtggagactatgtctgcgtcttcacggacctctgcaccctgaggggctgtccccagacggtcacgaactgcctttcctctttgagcaggctcacgctctgctgctgcggggccggccgcccccacccgacgacacgctgcgcgccctggcggcgctgcgcctgcagagcctgcagcgggacttctctccgcgggtgcccctgccccgcctggaccgcctgctcccgcccccggccccgccgcgcgaagacccgccccgcccgacccccaggccgcccccttccgctgccctgctggccggggcgctctggagcccgggcctggccaagaggcgggcggagcgggcccggcgcggcggggccggccgcactgcgggaagcattgcccgcgagggaggaggcggcgccggcacggcagctgccgtgctgggcggctggaagcggctacggggcatgggccgagctgaggccatggccgcctacctggccctggcggcgcagtgtccggggttcggcgctgctcggtatgacgttctggagctgagcacggagcctggtcggggtgctccacagaagctgtgcctgggcttgggagccaaggccatgtccctctcccggccaggggagacggagcccatccacagtgtcagctatggccatgtggccgcctgccagctaatgggcccccacaccctggccttgagggtgggagagagccagctcctcctgcagagcccccaggtggaagagatcatgcagctggtgaatgcctacttggccaacccctcccccgagaggccctgcagcagctcttctcctccatgccaagacctgccagacacctcccctcccagccagcgcccgggcctggacgagccccagggacagtctggctgcttggggcagctgcaggactgagcctgccaagaggtcacgacttccctcctgcctgcagcctgggccaggactgctctgagatttgagggaaacatggacccttttggccctgcagggacagggcacatcccacacccaagggctacaatgggtgtgggtaattttctagtttgtttcttaatttatttgtagaagagaagcaaa

SEQ ID NO: 166621 - DNA, 1047 bp, Homo sapiens
  Payload ID: 12805
  Gene Symbol: PLEKHH3
  Gene Name: pleckstrin homology domain containing, family H (with MyTH4 domain) member 3
  ENST ID: ENST00000587627
  CDS Start-End: 430-1047
tcccggggctgcagggagcgcagcgcgcgcggcccgggccccggccaccggacgccctaccggacacgaccctccctggagcttggacaactgcccacctcggacgctgcaccggacactgccccccacagggctggacactccaacggacactacttcccagctccggacattgctccctcctctcccggggccctggacgcttttccccctcccccctccgggggcccagacactgagcccccctcagcgtctggctagcgtccccttgcaccccagcccaggacactgcctcctccctgtcctcttctcccttctgctcctcccacctcatctttcccctgctcgggtcggagccccgccagttcctccgaccccctactgctcggccgcggctgcccgcgcccccatccgcagctcctcgcccggatgcctctccccgggggactatggtggcttctctgctgccgtcgaggcttcactcttctgcaccgggactacggggacggcgagcttagcggggacggggacgaggacgaggacgaggaaacctttgagctgcggaccccgagtccagcgggcggcgggaggggaggcagtgtggaagaagggaaaatgaggaggagagggtgccttggagcctggcagaacgagctcacctctcctgtttcaaagatggggaaactaaggcccggagacgggaagagacttgcccaaggttccacaggtcccctggaagtgacgctgactcagccagtgaggagcgggcctgtctccaacaggctgcagagctgggaggagacttggagcctcatcccggagaaagggctgccggaggacgacccggacatcgttgtgaaaggttggctgtaccgggagccccgcggaggaggggcgcggccctggctgcccccgcgccgagcctggtttgtgctcacgcgggactccctggatcagttcagcagcagcgggaaaggggcgcggcgtctcgggagcctcgtgctcaccagcctgtgctcggtgaccggcccagagcgcaggcgtaag

SEQ ID NO: 166622 - DNA, 2640 bp, Homo sapiens
  Payload ID: 12805
  Gene Symbol: PLEKHH3
  Gene Name: pleckstrin homology domain containing, family H (with MyTH4 domain) member 3
  Uniprot ID: Q7Z736
  ENST ID: ENST00000591196
  CDS Start-End: 71-2188
cgccagttcctccgaccccctactgctcggccgcggctgcccgcgcccccatccgcagctcctcgcccggatgcctctccccgggggactatggtggcttctctgctgccgtcgaggcttcactcttctgcaccgggactacggggacggcgagcttagcggggacggggacgaggacgaggacgaggaaacctttgagctgcggaccccgagtccagcgggcggcgggaggggtcccctggaagtgacgctgactcagccagtgaggagcgggcctgtctccaacaggctgcagagctgggaggagacttggagcctcatcccggagaaagggctgccggaggacgacccggacatcgttgtgaaaggttggctgtaccgggagccccgcggaggaggggcgcggccctggctgcccccgcgccgagcctggtttgtgctcacgcgggactccctggatcagttcagcagcagcgggaaaggggcgcggcgtctcgggagcctcgtgctcaccagcctgtgctcggtgaccggcccagagcgcaggcgtaaggagacaggtctgtggtcagtgactgtgtctggtcggaaacacagtgtccgcctctgctccccacgccaggcagaggctgagcgctggggggtggcattgcgggaagtgatcgcctccaaggcacccctggagacccccacccagctactgctcagggacatacaggaaagttgcggggacccagaggccgttgccctcatttacctgaggaacccgattctgagacacactagtggagccttgtatgccccactcctgcccctgccctatggagtcagcgccccaggtccgggctatgcacccctgcgcgaggaggcggtgcggctgttcttggcgctgcaggcgctggagggggcgcggcgccccgggcccttgatgcagggtgtgctccaaacctgccgggacttgcccgcgctccgggatgaactcttcctgcagctggctaagcagacctcgggccctgcaggtccccccgggctcccggctacccaagaccctgcggccctgcggtactggcaactcctcacctgcatgagctgcaccttccgacctgggggagctgtgcgggggcacctcctggggcacttggagaggaccgagcaggcactcccggactcggaactggcggaatatgcgcgcttcatccggaaagcgctgggccggacgcgcggcagagagctggtgccctcgctggcggagatttccgcgttgagccaacggcaggagctgctgtgtaccgtgcactgtccgggggctggtgcctgtgctgtggccatcgactcccacaccacggcgggggaggtggctcgagagctggtggggcggctgggcttggcccggagccgcaacgcattcgcgctgtacgagcagcgaggggcccaggagcgagccctggctggggggaccctcgtggccgacgtgctcaccaggtttgagaacttggccgcggaggaagctgggttggaggactcgcccgactccgggtggagactatgtctgcgtcttcacggacctctgcaccctgaggggctgtccccagacggtcacgaactgcctttcctctttgagcaggctcacgctctgctgctgcggggccggccgcccccacccgacgacacgctgcgcgccctggcggcgctgcgcctgcagagcctgcagcgggacttctctccgcgggtgcccctgccccgcctggaccgcctgctcccgcccccggccccgccgcgcgaagacccgccccgcccgacccccaggccgcccccttccgctgccctgctggccggggcgctctggagcccgggcctggccaagaggcgggcggagcgggcccggcgcggcggggccggccgcactgcgggaagcattgcccgcgagggaggaggcggcgccggcacggcagctgccgtgctgggcggctggaagcggctacggggcatgggccgagctgaggccatggccgcctacctggccctggcggcgcagtgtccggggttcggcgctgctcggagcctggtcggggtgctccacagaagctgtgcctgggcttgggagccaaggccatgtccctctcccggccaggggagacggagcccatccacagtgtcagctatggccatgtggccgcctgccagctaatgggcccccacaccctggccttgagggtgggagagagccagctcctcctgcagagcccccaggtggaagagatcatgcagctggtgaatgcctacttggccaacccctcccccgagaggccctgcagcagctcttctcctccatgccaagacctgccagacacctcccctcccagccagcgcccgggcctggacgagccccagggacagtctggctgcttggggcagctgcaggactgagcctgccaagaggtcacgacttccctcctgcctgcagcctgggccaggactgctctgagatttgagggaaacatggacccttttggccctgcagggacagggcacatcccacacccaagggctacaatgggtgtgggtaattttctagtttgtttcttaatttatttgtagaagagaagcaaaaaaaaaaaaaaagtttcttatttacacaaa

SEQ ID NO: 166623 - DNA, 2983 bp, Homo sapiens
  Payload ID: 12805
  Gene Symbol: PLEKHH3
  Gene Name: pleckstrin homology domain containing, family H (with MyTH4 domain) member 3
  Uniprot ID: Q7Z736
  ENST ID: ENST00000591022
  CDS Start-End: 389-2770
cggccaccggacgccctaccggacacgaccctccctggagcttggacaactgcccacctcggacgctgcaccggacactgccccccacagggctggacactccaacggacactacttcccagctccggacattgctccctcctctcccggggccctggacgcttttccccctcccccctccgggggcccagacactgagcccccctcagcgtctggctagcgtccccttgcaccccagcccaggacactgcctcctccctgtcctcttctcccttctgctcctcccacctcatctttcccctgctcgggtcggagccccgccagttcctccgaccccctactgctcggccgcggctgcccgcgcccccatccgcagctcctcgcccggatgcctctccccgggggactatggtggcttctctgctgccgtcgaggcttcactcttctgcaccgggactacggggacggcgagcttagcggggacggggacgaggacgaggacgaggaaacctttgagctgcggaccccgagtccagcgggcggcgggaggggtcccctggaagtgacgctgactcagccagtgaggagcgggcctgtctccaacaggctgcagagctgggaggagacttggagcctcatcccggagaaagggctgccggaggacgacccggacatcgttgtgaaaggttggctgtaccgggagccccgcggaggaggggcgcggccctggctgcccccgcgccgagcctggtttgtgctcacgcgggactccctggatcagttcagcagcagcgggaaaggggcgcggcgtctcgggagcctcgtgctcaccagcctgtgctcggtgaccggcccagagcgcaggcgtaaggagacaggtctgtggtcagtgactgtgtctggtcggaaacacagtgtccgcctctgctccccacgccaggcagaggctgagcgctggggggtggcattgcgggaagtgatcgcctccaaggcacccctggagacccccacccagctactgctcagggacatacaggaaagttgcggggacccagaggccgttgccctcatttacctgaggaacccgattctgagacacactagtggagccttgtatgccccactcctgcccctgccctatggagtcagcgccccaggtccgggctatgcacccctgcgcgaggaggcggtgcggctgttcttggcgctgcaggcgctggagggggcgcggcgccccgggcccttgatgcagggtgtgctccaaacctgccgggacttgcccgcgctccgggatgaactcttcctgcagctggctaagcagacctcgggccctgcaggtccccccgggctcccggctacccaagaccctgcggccctgcggtactggcaactcctcacctgcatgagctgcaccttccgacctgggggagctgtgcgggggcacctcctggggcacttggagaggaccgagcaggcactcccggactcggaactggcggaatatgcgcgcttcatccggaaagcgctgggccggacgcgcggcagagagctggtgccctcgctggcggagatttccgcgttgagccaacggcaggagctgctgtgtaccgtgcactgtccgggggctggtgcctgtgctgtggccatcgactcccacaccacggcgggggaggtggctcgagagctggtggggcggctgggcttggcccggagccgcaacgcattcgcgctgtacgagcagcgaggggcccaggagcgagccctggctggggggaccctcgtggccgacgtgctcaccaggtttgagaacttggccgcggaggaagctgggttggaggactcgcccgactccgggtggagactatgtctgcgtcttcacggacctctgcaccctgaggggctgtccccagacggtcacgaactgcctttcctctttgagcaggctcacgctctgctgctgcggggccggccgcccccacccgacgacacgctgcgcgccctggcggcgctgcgcctgcagagcctgcagcgggacttctctccgcgggtgcccctgccccgcctggaccgcctgctcccgcccccggccccgccgcgcgaagacccgccccgcccgacccccaggccgcccccttccgctgccctgctggccggggcgctctggagcccgggcctggccaagaggcgggcggagcgggcccggcgcggcggggccggccgcactgcgggaagcattgcccgcgagggaggaggcggcgccggcacggcagctgccgtgctgggcggctggaagcggctacggggcatgggccgagctgaggccatggccgcctacctggccctggcggcgcagtgtccggggttcggcgctgctcggtatgacgttctggagctgagcacggagcctggtcggggtgctccacagaagctgtgcctgggcttgggagccaaggccatgtccctctcccggccaggggagacggagcccatccacagtgtcagctatggccatgtggccgcctgccagctaatgggcccccacaccctggccttgagggtgggagagagccagctcctcctgcagagcccccaggtggaagagatcatgcagctggtgaatgcctacttggccaacccctcccccgagaggccctgcagcagctcttctcctccatgccaagacctgccagacacctcccctcccagccagcgcccgggcctggacgagccccagggacagtctggctgcttggggcagctgcaggactgagcctgccaagaggtcacgacttccctcctgcctgcagcctgggccaggactgctctgagatttgagggaaacatggacccttttggccctgcagggacagggcacatcccacacccaagggctacaatgggtgtgggtaattttctagtttgtttcttaatttatttgtagaagagaagcaaaaaaaaaaaaaaagtttcttatttacacaaa

SEQ ID NO: 166624 - DNA, 1206 bp, Homo sapiens
  Payload ID: 12806
  Gene Symbol: PLEKHJ1
  Gene Name: pleckstrin homology domain containing, family J member 1
  Uniprot ID: Q9NW61
  ENST ID: ENST00000326631
  CDS Start-End: 73-522
ggcgccggccccagcctgagcggggacggcggccgggagggcgcggcccgggttcccgttccccgcggagccatgcggtacaacgagaaggagctgcaggctctgtcccggcagccggccgagatggcggccgagctgggcatgaggggccccaagaagggcagcgtgctgaagcggcggctggtgaagctggtggtgaatttcctcttctactttcggacagacgaggccgagcccgtcggagccctgctgctggagcgctgcagagtcgtccgggaagagcccggcaccttctccatcagcttcattgaggaccctgagaggaagtatcactttgagtgcagcagcgaggagcagtgtcaggagtggatggaggctctgcgtcgggccagctacgagttcatgcggagaagcctcatcttctacaggaacgaaatccggaaggtgacgggcaaggaccccctggaacagttcggcatatccgaggaggccaggttccagctgagtggcttgcaggcgtgagcgcagggcacggtggtcagcgtgcagcgggacgggactggccctgcccagccatgaatcgcttggccatgcctggatctgttttgttttggtttttggtttttgggtcagggtttcactgtgttgcccaggctagagtgcagtggtgccacagctcactgtgaccttgaccttctggactcaagtgatcctcctgcctcagcttcccaagtagcggggatcacaggcatgagccgccacacccggccatcacacctggattttcagtgggaggtttttggtttggagacatccaaagcctgaagccaggtgggtgtgggcaggggctgcattttatgaaactgcccagcaagctgcgctccctggggccccaggatccacctaactggcctggcacctggtgccacgtgctgctgccgccaggatatgcgccttcccacaggtgccctgcctgagttgtgtgcatccaggggcctggtgagcccccaggctggtggcatggcccccctgccccgtgctgaatgaatgtacagagccagacaaagctgtgaatggcctaggggctgagtcccacaccagctgtgaattctcctgcagacaggagggccctggctgtgcacctggggaagtggttgccctggggccagggtgcttgttctgttcaaataaaggtacctcttttcc

SEQ ID NO: 166625 - DNA, 935 bp, Homo sapiens
  Payload ID: 12806
  Gene Symbol: PLEKHJ1
  Gene Name: pleckstrin homology domain containing, family J member 1
  ENST ID: ENST00000586608
  CDS Start-End: 51-503
gggacggcggccgggagggcgcggcccgggttcccgttccccgcggagccatgcggtacaacgagaaggagctgcaggctctgtcccggcagccggccgagatggcggccgagctgggcatgaggggccccaagaagggcagcgtgctgaagcggcggctggtgaagctggtggtgaatttcctcttctactttcggacagacgaggccgaggtaggggcgtcccgggcgcgcgggcgggtcccaggctgggcccctcggaggccgggtgctcactgccccgtcccggcgcccgtgtctcctccagcccgtcggagccctgctgctggagcgctgcagagtcgtccgggaagagcccggcaccttctccatcactacgagttcatgcggagaagcctcatcttctacaggaacgaaatccggaaggtgacgggcaaggaccccctggaacagttcggcatatccgaggaggccaggttccagctgagtggcttgcaggcgtgagcgcagggcacggtggtcagcgtgcagcgggacgggactggccctgcccagccatgaatcgcttggccatgcctggatctgttttgttttggtttttggtttttgggtcagggtttcactgtgttgcccaggctagagtgcagtggtgccacagctcactgtgaccttgaccttctggactcaagtgatcctcctgcctcagcttcccaagtagcggggatcacaggcatgagccgccacacccggccatcacacctggattttcagtgggaggtttttggtttggagacatccaaagcctgaagccaggtgggtgtgggcaggggctgcattttatgaaactgcccagcaagctgcgctccctggggccccaggatccacctaactggcctggcacctggtgccacgtgctgctgccgccaggatatgcgc

SEQ ID NO: 166626 - DNA, 937 bp, Homo sapiens
  Payload ID: 12806
  Gene Symbol: PLEKHJ1
  Gene Name: pleckstrin homology domain containing, family J member 1
  ENST ID: ENST00000587394
  CDS Start-End: 25-858
cgggttcccgttccccgcggagccatgcggtacaacgagaaggagctgcaggctctgtcccggcagccggccgagatggcggccgagctgggcatgaggggccccaagaagggcagcgtgctgaagcggcggctggtgaagctggtggtgaatttcctcttctactttcggacagacgaggccgagcccgtcggagccctgctgctggagcgctgcagagtcgtccgggaagagcccggcaccttctccatcagcttcattgaggaccctgagaggaagtatcactttgagtgcagcagcgaggagcagtgtcaggagtggatggaggctctgcgtcgggccagctacgagttcatgcggagaagcctcatcttctacaggaacgaaatccggaaggtgacgggcaagaaacaccaagggacccacgacaggcctgccccgcatcgcagggcatgctgcgagccatggacagccgagaaatacaaaagtaaatgcacttgttcaacgtgcccgcgccgtcctcacagcaccatcgcgcagcacatggccagctgcgtcaccgcgcaggccccttcacatgcaagggcgcaacccacgccccggagggtgaacagtctgggggttcacagtgccggggtaaaggtgaagagctcagggcaggcgccagggcgctcaggaaggggctcaggccgcggggaggcctccgaggaatgtggtggcgacgggcctgcctttggtacgggagcagcgcgtcgggggagccggccgggcggcgtttccgagaacggggttcggcgttgtcagcgtctagtcagcaccaagcgggtggaggcaggcgcgggcctggggacgagatagcaccggggcaggctgtggcgaatccgctggcgggcccgccctgcagacacgtgtctttatatagagctctcatatatag

SEQ ID NO: 166627 - DNA, 2251 bp, Homo sapiens
  Payload ID: 12806
  Gene Symbol: PLEKHJ1
  Gene Name: pleckstrin homology domain containing, family J member 1
  Uniprot ID: Q9NW61
  ENST ID: ENST00000589097
  CDS Start-End: 1115-1564
aactaacaggtatagatgagcatacagaagcgttctcggctacaaggaaggcggccgaaaccatttcagccgcgatcccgattcgaccccaacgaatcttggttgtttcttttttattttgtcaaacagggtcttgctctgttgtccaggctggagtgcaacggcacaatcacaactcactgcagcctcgacctcctggactcaagcgatcttcccgcttcagcctccagagtagctgggactacaggcgcgcgtcaccaaccacgcccggctaattttttttttttttttttttgcagtgatggggtctcgctatgttgcccaggctggagtgcagtggtgggatcatggctcactgcagcctcgacattccgagctcaagcgatcctctcgagtagctgggcctacagggaacccccggtccgcgtcggccgccgccctcaaccgcctctactcctcaccagagcccaaggccgcgttatctcctcctcgtttcgccacctccacgacttcgtttggcgaacggcgggcaaagaaagcacttccggggcaaatgagacgggccctctggtgtgcgcatgcctggcccgcccagcggcgtgagtcagagggtcccgaggcgcgaaggaaaaggctggagggggagaggctgaaagcgcggcctggaaggcaaactgcgcgtgcgcacaacgctctcaacgaaccctcggtccgctgcggccgcacggggccaactttcgcgagggagcggctgacactctccgggcgacgttatcgctccctccgcctgcgcctggccgctctagaaaggggtgccagccatcgctggggtgccttgattctgttccaccttggtccggtttatttcagtttaatggttatgtaacaacggtccgtctctcctaccaaccggtaccccgcccacgccagcagccacgggtcgccagcgccacgcagcggaggcgggcggcatggctggcccaaggtgcgcaggcgcactagccctgggggtgcttccgtgtctgcgccctgagacatttttggcgccggccccagcctgagcggggacggcggccgggagggcgcggcccgggttcccgttccccgcggagccatgcggtacaacgagaaggagctgcaggctctgtcccggcagccggccgagatggcggccgagctgggcatgaggggccccaagaagggcagcgtgctgaagcggcggctggtgaagctggtggtgaatttcctcttctactttcggacagacgaggccgagcccgtcggagccctgctgctggagcgctgcagagtcgtccgggaagagcccggcaccttctccatcagcttcattgaggaccctgagaggaagtatcactttgagtgcagcagcgaggagcagtgtcaggagtggatggaggctctgcgtcgggccagctacgagttcatgcggagaagcctcatcttctacaggaacgaaatccggaaggtgacgggcaaggaccccctggaacagttcggcatatccgaggaggccaggttccagctgagtggcttgcaggcgtgagcgcagggcacggtggtcagcgtgcagcgggacgggactggccctgcccagccatgaatcgcttggccatgcctggatctgttttgttttggtttttggtttttgggtcagggtttcactgtgttgcccaggctagagtgcagtggtgccacagctcactgtgaccttgaccttctggactcaagtgatcctcctgcctcagcttcccaagtagcggggatcacaggcatgagccgccacacccggccatcacacctggattttcagtgggaggtttttggtttggagacatccaaagcctgaagccaggtgggtgtgggcaggggctgcattttatgaaactgcccagcaagctgcgctccctggggccccaggatccacctaactggcctggcacctggtgccacgtgctgctgccgccaggatatgcgccttcccacaggtgccctgcctgagttgtgtgcatccaggggcctggtgagcccccaggctggtggcatggcccccctgccccgtgctgaatgaatgtacagagccagacaaagctgtgaatggcctaggggctgagtcccacaccagctgtgaattctcctgcagacaggagggccctggctgtgcacctggggaagtggttgccctggggccagggtgcttgttctgttcaaataaaggtacctcttttccaca

SEQ ID NO: 166628 - DNA, 1092 bp, Homo sapiens
  Payload ID: 12806
  Gene Symbol: PLEKHJ1
  Gene Name: pleckstrin homology domain containing, family J member 1
  ENST ID: ENST00000591099
  CDS Start-End: 47-331
cggcggccgggagggcgcggcccgggttcccgttccccgcggagccatgcggtacaacgagaaggagctgcaggctctgtcccggcagccggccgagatggcggccgagctgggcatgaggggccccaagaagggcagcgtgctgaagcggcggctggtgaagctggtggtgaatttcctcttctactttcggacagacgaggccgagcccgtcggagccctgctgctggagcgctgcagagtcgtccgggaagagcccggcaccttctccatcactacgagttcatgcggagaagcctcatcttctacaggaacgaaatccggaaggtgacgggcaaggaccccctggaacagttcggcatatccgaggaggccaggttccagctgagtggcttgcaggcgtgagcgcagggcacggtggtcagcgtgcagcgggacgggactggccctgcccagccatgaatcgcttggccatgcctggatctgttttgttttggtttttggtttttgggtcagggtttcactgtgttgcccaggctagagtgcagtggtgccacagctcactgtgaccttgaccttctggactcaagtgatcctcctgcctcagcttcccaagtagcggggatcacaggcatgagccgccacacccggccatcacacctggattttcagtgggaggtttttggtttggagacatccaaagcctgaagccaggtgggtgtgggcaggggctgcattttatgaaactgcccagcaagctgcgctccctggggccccaggatccacctaactggcctggcacctggtgccacgtgctgctgccgccaggatatgcgccttcccacaggtgccctgcctgagttgtgtgcatccaggggcctggtgagcccccaggctggtggcatggcccccctgccccgtgctgaatgaatgtacagagccagacaaagctgtgaatggcctaggggctgagtcccacaccagctgtgaattctcctgcagacaggagggccctggctgtgcacctggggaagtggttgccctggggccagggtgcttgttctgttcaaataaaggtacctcttttccaca

SEQ ID NO: 166629 - DNA, 1311 bp, Homo sapiens
  Payload ID: 12806
  Gene Symbol: PLEKHJ1
  Gene Name: pleckstrin homology domain containing, family J member 1
  ENST ID: ENST00000587962
  CDS Start-End: 79-603
atttttggcgccggccccagcctgagcggggacggcggccgggagggcgcggcccgggttcccgttccccgcggagccatgcggtacaacgagaaggagctgcaggctctgtcccggcagccggccgagatggcggccgagctgggcatgaggggccccaagaagggcagcgtgctgaagcggcggctggtgaagctggtggtgaatttcctcttctactttcggacagacgaggccgagcccgtcggagccctgctgctggagcgctgcagagtcgtccgggaagagcccggcaccttctccatcagcttcattgaggaccctgagaggaagtatcactttgagtgcagcagcgaggagcagtgtcaggagtggatggaggctctgcgtcgggccagctacgagttcatgcggagaagcctcatcttctacaggaacgaaatccggaaggtgacgggcaaggtgtgtgcagggctgcagagggccggggtggggctgcaggtggcagaggcagtcctccagccctggctcatggccacccgtcctccccacaggaccccctggaacagttcggcatatccgaggaggccaggttccagctgagtggcttgcaggcgtgagcgcagggcacggtggtcagcgtgcagcgggacgggactggccctgcccagccatgaatcgcttggccatgcctggatctgttttgttttggtttttggtttttgggtcagggtttcactgtgttgcccaggctagagtgcagtggtgccacagctcactgtgaccttgaccttctggactcaagtgatcctcctgcctcagcttcccaagtagcggggatcacaggcatgagccgccacacccggccatcacacctggattttcagtgggaggtttttggtttggagacatccaaagcctgaagccaggtgggtgtgggcaggggctgcattttatgaaactgcccagcaagctgcgctccctggggccccaggatccacctaactggcctggcacctggtgccacgtgctgctgccgccaggatatgcgccttcccacaggtgccctgcctgagttgtgtgcatccaggggcctggtgagcccccaggctggtggcatggcccccctgccccgtgctgaatgaatgtacagagccagacaaagctgtgaatggcctaggggctgagtcccacaccagctgtgaattctcctgcagacaggagggccctggctgtgcacctggggaagtggttgccctggggccagggtgcttgttctgttcaaataaaggtacctcttttccacactgg

SEQ ID NO: 166630 - DNA, 5263 bp, Homo sapiens
  Payload ID: 12807
  Gene Symbol: PLEKHM1
  Gene Name: pleckstrin homology domain containing, family M (with RUN domain) member 1
  Uniprot ID: Q9Y4G2
  ENST ID: ENST00000430334
  CDS Start-End: 135-3305
gttgtcagtggccgagagaccgcatcgtcggctcggaggctgaggggctgccgcggccgggagcgcccctcgcctcgctcctcgctccgcttggtgtcatgtgattctctgagggagcagctgcgtgagtggagatgctttcagtggtggagaatggactggacccccaggctgccatcccggtcatcaagaagaagctggtgggatccgtgaaggccttgcagaagcagtacgtgtccctggacacggtggtcactagtgaagacggagatgccaacaccatgtgcagcgccctggaggccgtatttatccatggcctgcacgccaagcacatccgagctgaggccggaggaaaaaggaagaaaagtgcccaccagaagcctctgccccagcctgtcttctggcccctcctgaaagctgtcacccacaaacacatcatctcagagttggagcacctgacgtttgtcaacacggatgtgggccgctgccgggcatggctgcggctggccctgaacgatggcctgatggagtgctacctgaagctgctgctgcaggagcaggcccgcttgcatgagtactaccagcccaccgccctgctccgggatgctgaggagggcgagttcctccttagcttcctgcagggcctcacgtccttgtccttcgaactctcctacaagtctgccatcttaaatgagtggacgctcaccccattggccctgtctgggctttgcccgctttctgagctggaccctctctctacctctggtgcagaactacagcggaaggaatctctggattccatttcccattcttcaggctctgaagacatcgaagtccatcactcgggccataagatacggaggaaccagaagctgactgcctcctccctcagcctggacacggccagttcatcccagctgtcctgcagcctaaactctgatagctgcttactccaagagaatggctccaagagtccagaccattgcgaggagcccatgtcctgtgactcagacctgggcacagcaaatgctgaggactcagaccggtctctgcaagaggtattgttggaattcagcaaagcccaggtaaactctgtgccaaccaacggactgagccaagaaacagagatccccacaccacaggcctcgctctccctccatggcctcaacaccagcacatacctgcactgtgaggcacctgcagagccccttcctgcccaggcagcctctggaactcaagatggtgtccacgtgcaggagccgcgtccccaggcgcccagccccctggacttacagcagcctgtagagagcacctcaggccagcagccttctagtactgtcagcgagacagccagagaagtgggccaagggaatggcctgcagaaggcccaggctcatgacggagctggtctgaagctggtagtttcctcacccaccagtccgaaaaacaagagctggatctcagaggatgacttctaccggccttcccgggagcaacccctggagagtgcttcagaccacccaatagcttcttacagggggactccagggtcaaggcctggtctccacaggcatttttctcaagaaccaagaaaaaactgctccctgggggcgttagaccaagcgtgtgtaccttccccaggaagaaggcaagcccaggcagccccatcccaggggcataagagcttccgggtggtacaccggagacagatgggactgtccaacccattccggggtctcatgaagctgggcaccgtggagcggcggggggcaatgggcatctggaaggagctcttctgcgagctctccccgctggagttccgcctctacctgagcaacgaggagcacacctgtgtggagaactgctcgctgcttcgctgtgagtctgtggggccagcccatagtgatgggcgctttgagctggtcttctctggcaagaagctggccctgcgcgcctcctcccaggacgaagctgaggactggctggaccgggtgcgggaggccctgcagaaggtccggcctcagcaggaggatgagtgggtgaacgtgcagtacccagaccagcctgaggaaccccccgaggcgccccagggctgcctctctccctcagacctgctctcggagcccgcggccctccagggcacacagtttgactggtcgtccgcccaggttccagagccagatgccatcaaggagtccctgctgtacttgtacatggacaggacctggatgccctatatattttctctgtccttggaggctctgaaatgtttccgcatcaggaacaatgagaagatgctgagtgacagccacggcgtggagaccatccgggacatcctgccagacaccagccttgggggcccatccttcttcaaaatcatcacggccaaggctgtcctgaagctgcaggccggaaacgccgaggaagccgccctgtggagggatctggtccgcaaagtcctggcatcctacttggagacagccgaggaggcggtgaccctgggcgggagcctggatgaaaactgtcaggaggtgctgaaatttgccacccgggagaatggcttcctgctgcagtacctggtggctatccccatggagaaaggccttgactcccaaggctgcttctgcgcaggctgctcccggcagatcggcttctcctttgtacgacccaagctctgtgccttctctggcctctattactgtgacatctgccaccaagacgatgcctcagtgattccggccaggatcatccacaactgggacctcaccaagcgcccgatctgcaggcaggccctgaagtttctgacacagatccgggcccagcccctcatcaacctgcagatggtgaacgcgtctctgtacgagcatgtggagcggatgcacctcattgggaggagacgggagcagctgaagctcctgggggattacctgggcctgtgccggagtggcgccctgaaggagctcagcaagaggctcaaccacaggaattatctcttggaatctccgcataggttcagtgttgctgacctccaacagatcgcagacggggtgtatgaaggattcctcaaggccctgattgaatttgcctcccagcatgtctaccactgcgacctgtgcacccagcgcggcttcatctgccagatctgccagcaccacgacatcatcttcccctttgagtttgacaccacagtcaggtgtgccgagtgcaagaccgtcttccaccagagctgccaggctgtggtgaagaagggctgcccccgctgtgcccgccggcgcaagtaccaggaacagaacattttcgcctgatgcccatctgctgaccccgctctgaaagccgggggtgagtgtggctcagccatcccggctgggtttgccatcagcccaggatactcaccgtgtcacagctgtgtccccttgtcaggaagaccctcagatgtggccagagcaccggcctcccagagaaagcccaggaagtccccgtggtgtcccctggccctccccccacccctctgctgcaggaggcgtggccaccaccagatgctccctgtctggggcaggcagggccgtttactcaccaggccctggctcaccagcgtcccggcgcctccgttagggctgcccaaacactgtggaaaggggacttggggagcattttcaattccacattcctgattaaaaggtctagttttttaaggtgggtttttcccattcatatttcaacagaaagtatttttttattcttgaccctacgtgagtcacccatgaaatccagacattctcacccccagcggatgcacaggagccactcaggcctggcttagaggtagcgggtggctggtgggcaggccactgctgggacagggtctatgggcccacccagtgcctttccttggccctcactgccagtgccaaaccgcccctcagcagggcagggccagtcctggcgaccccggttcctctgtgtcctctttactccccaccccagtgcgtctcgcctgctgagcccaccgctttctcagcgtcagagcccctagctcttctctagcctggggccttggccccattaggagaaggagaaatgactggaaaccagcactgtcagcactttgagccctcctcggtttatggagggtcgccgtcttgcccacccccgatccccgtgcgctcctcacccctctacagacaggggcgctgctgcagatgctccaggcccaccttggtgggtgcccggggtcacactctctgcctgactgacccctgccagggcacagataggcaggaccccagagagggcaggcagccacgccctgcactgtggagaagtgacctggtcctaagctgtgcagggcgtgcgggggaactgccctgtggatgcagccaccacctcacaaagccatgaattcccaaagcatcactgaacttgcccagccgggacactggagactgaagaagttccccggagcaggactgcctttgaaggggccttggggctggggtgggagtctggaattgttttcaaagtgatggtcagaccctccaggcttcggggaaatgtgggtttgctggtctctctgtcgccttcccccacctctcctggacctagcaggccctcagtcctagctgtcttacctgcgctcagcttggagtcaggcctcaggtggagagccgcatgtcactgtcagagatgagcccacccccacccttccctgggggcgattagctgctgagtcacccacccagccttggagctggatgcctgtgcagcagaacagaggcaacggtggcaggcaggtggaggctgcgcacagcttctcccggtcatggcacacacctgtgcccagacgccaatgcctcctaagccaggagctgggttatgcaccgccatggcccacattaacgctccaccacaagcccagcctagtcagagccctcattgccccatccctgagtgggcaggagcctggcctggggagggcttgggcctgtgaggattctccccgaaggtgccctcggaggcagcaggtttgaggccctggggggcccgttccccagaagctgccagtgctttcagatgcattgactcttcccgcctcccctccctcagaaaggtagtgcccacactatttttaaaatgttattttatgcaatacactgttcctagtgagcagggctctggccctgaggagtctttgcaatgtattgaaggaattgctgccgtgtgagttttgaatgattttgcagtaaagacctgatctttctcatca

SEQ ID NO: 166631 - DNA, 2825 bp, Homo sapiens
  Payload ID: 12807
  Gene Symbol: PLEKHM1
  Gene Name: pleckstrin homology domain containing, family M (with RUN domain) member 1
  ENST ID: ENST00000446609
  CDS Start-End: 173-364
acacaattcaggcagtggagagaaggccgtggggagtggctgaggagtccctcaagagaagaggttgctgttcactgatggtggagtgttttgagagtggtggaaccaggttatccctttcttcttttaacgtgtcatgtgattctctgagggagcagctgcgtgagtggagatgctttcagtggtggagaatggactggacccccaggctgccatcccgacacatcatctcagagttggagcacctgacgtttgtcaacacggatgtgggccgctgccgggcatggctgcggctggccctgaacgatggcctgatggagtgctacctgaagctgctgctgcaggagcaggcccgcttgcatgagtactaccagcccaccgccctgctccgggatgctgaggagggcgagttcctccttagcttcctgcagggcctcacgtccttgtccttcgaactctcctacaagtctgccatcttaaatgagtggacgctcaccccattggccctgtctgggctttgcccgctttctgagctggaccctctctctacctctggtgcagaactacagcggaaggaatctctggattccatttcccattcttcaggctctgaagacatcgaagtccatcactcgggccataagatacggaggaaccagaagctgactgcctcctccctcagcctggacacggccagttcatcccagctgtcctgcagcctaaactctgatagctgcttactccaagagaatggctccaagagtccagaccattgcgaggagcccatgtcctgtgactcagacctgggcacagcaaatgctgaggactcagaccggtctctgcaagaggtattgttggaattcagcaaagcccaggtaaactctgtgccaaccaacggactgagccaagaaacagagatccccacaccacaggcctcgctctccctccatggcctcaacaccagcacatacctgcactgtgaggcacctgcagagccccttcctgcccaggcagcctctggaactcaagatggtgtccacgtgcaggagccgcgtccccaggcgcccagccccctggacttacagcagcctgtagagagcacctcaggccagcagccttctagtactgtcagcgagacagccagagaagtgggccaagggaatggcctgcagaaggcccaggctcatgacggagctggtctgaagctggtagtttcctcacccaccagtccgaaaaacaagagctggatctcagaggatgacttctaccggccttcccgggagcaacccctggagagtgcttcagaccacccaatagcttcttacagggggactccagggtcaaggcctggtctccacaggcatttttctcaagaaccaagaaaaaactgctccctgggggcgttagaccaagcgtgtgtaccttccccaggaagaaggcaagcccaggcagccccatcccaggggcataagagcttccgggtggtacaccggagacagatgggactgtccaacccattccggggtctcatgaagctgggcaccgtggagcggcggggggcaatgggcatctggaaggagctcttctgcgagctctccccgctggagttccgcctctacctgagcaacgaggagcacacctgtgtggagaactgctcgctgcttcgctgtgagtctgtggggccagcccatagtgatgggcgctttgagctggtcttctctggcaagaagctggccctgcgcgcctcctcccaggacgaagctgaggactggctggaccgggtgcgggaggccctgcagaaggtccggcctcagcaggaggatgagtgggtgaacgtgcagtacccagaccagcctgaggaaccccccgaggcgccccagggctgcctctctccctcagacctgctctcggagcccgcggccctccagggcacacagtttgactggtcgtccgcccaggttccagagccagatgccatcaaggagtccctgctgtacttgtacatggacaggacctggatgccctatatattttctctgtccttggaggctctgaaatgtttccgcatcaggaacaatgagaagatgctgagtgacagccacggcgtggagaccatccgggacatcctgccagacaccagccttgggggcccatccttcttcaaaatcatcacggccaaggctgtcctgaagctgcaggccggaaacgccgaggaagccgccctgtggagggatctggtccgcaaagtcctggcatcctacttggagacagccgaggaggcggtgaccctgggcgggagcctggatgaaaactgtcaggaggtgctgaaatttgccacccgggagaatggcttcctgctgcagtacctggtggctatccccatggagaaaggccttgactcccaaggctgcttctgcgcaggctgctcccggcagatcggcttctcctttgtacgacccaagctctgtgccttctctggcctctattactgtgacatctgccaccaagacgatgcctcagtgattccggccaggatcatccacaactgggacctcaccaagcgcccgatctgcaggcaggccctgaagtttctgacacagatccgggcccagcccctcatcaacctgcagatggtgaacgcgtctctgtacgagcatgtggagcggatgcacctcattgggaggagacgggagcagctgaagctcctgggggattacctgggcctgtgccggagtggcgccctgaaggagctcagcaagaggctcaaccacaggaattatctcttggaatctccgcataggttcagtgttgctgacctccaacag

SEQ ID NO: 166632 - DNA, 603 bp, Homo sapiens
  Payload ID: 12807
  Gene Symbol: PLEKHM1
  Gene Name: pleckstrin homology domain containing, family M (with RUN domain) member 1
  ENST ID: ENST00000584420
  CDS Start-End: 182-603
agtggccgagagaccgcatcgtcggctcggaggctgaggggctgccgcggccgggagcgcccctcgcctcgctcctcgctccgcttgacacatcatctcagagttggagcacctgacgtttgtcaacacggatgtgggccgctgccgggcatggctgcggctggccctgaacgatggcctgatggagtgctacctgaagctgctgctgcaggagcaggcccgcttgcatgagtactaccagcccaccgccctgctccgggatgctgaggagggcgagttcctccttagcttcctgcagggcctcacgtccttgtccttcgaactctcctacaagtctgccatcttaaatgagtggacgctcaccccattggccctgtctgggctttgcccgctttctgagctggaccctctctctacctctggtgcagaactacagcggaaggaatctctggattccatttcccattcttcaggctctgaagacatcgaagtccatcactcgggccataagatacggaggaaccagaagctgactgcctcctccctcagcctggacacggccagttcatcccagctgtcctgcagcctaaactctgatagctg

SEQ ID NO: 166633 - DNA, 3292 bp, Homo sapiens
  Payload ID: 12807
  Gene Symbol: PLEKHM1
  Gene Name: pleckstrin homology domain containing, family M (with RUN domain) member 1
  ENST ID: ENST00000581448
  CDS Start-End: 120-1127
gagaccgcatcgtcggctcggaggctgaggggctgccgcggccgggagcgcccctcgcctcgctcctcgctccgcttggtgtcatgtgattctctgagggagcagctgcgtgagtggagatgctttcagtggtggagaatggactggacccccaggctgccatcccggtcatcaagaagaagctggtgggatccgtgaaggccttgcagaagcagtacgtgtccctggacacggtggtcactagtgaagacggagatgccaacaccatgtgcagcgccctggaggccgtatttatccatggcctgcacgccaagcacatccgagctgaggccggaggaaaaaggaagaaaagtgcccaccagaagcctctgccccagcctgtcttctggcccctcctgaaagctgtcacccacaaacacatcatctcagagttggagcacctgacgtttgtcaacacggatgtgggccgctgccgggcatggctgcggctggccctgaacgatggcctgatggagtgctacctgaagctgctgctgcaggagcaggcccgcttgcatgagtactaccagcccaccgccctgctccgggatgctgaggagggcgagttcctccttagcttcctgcagggcctcacgtccttgtccttcgaactctcctacaagtctgccatcttaaatgagtggacgctcaccccattggccctgtctgggctttgcccgctttctgagctggaccctctctctacctctggtgcagaactacagcggaaggaatctctggattccatttcccattcttcaggctctgaagacatcgaagtccatcactcgggccataagatacggaggaaccagaagctgactgcctcctccctcagcctggacacggccagttcatcccagctgtcctgcagcctaaactctgatagctgcttactccaagagaatggctccaagagtccagaccattgcgaggagcccatgtcctgtgactcagacctgggcacagcaaatgctgaggactcagaccggtctctgcaagaaaaaacaagagctggatctcagaggatgacttctaccggccttcccgggagcaacccctggagagtgcttcagaccacccaatagcttcttacagggggactccagggtcaaggcctggtctccacaggcatttttctcaagaaccaagaaaaaactgctccctgggggcgttagaccaagcgtgtgtaccttccccaggaagaaggcaagcccaggcagccccatcccaggggcataagagcttccgggtggtacaccggagacagatgggactgtccaacccattccggggtctcatgaagctgggcaccgtggagcggcggggggcaatgggcatctggaaggagctcttctgcgagctctccccgctggagttccgcctctacctgagcaacgaggagcacacctgtgtggagaactgctcgctgcttcgctgtgagtctgtggggccagcccatagtgatgggcgctttgagctggtcttctctggcaagaagctggccctgcgcgcctcctcccaggacgaagctgaggactggctggaccgggtgcgggaggccctgcagaaggtccggcctcagcaggaggatgagtgggtgaacgtgcagtacccagaccagcctgaggaaccccccgaggcgccccagggctgcctctctccctcagacctgctctcggagcccgcggccctccagggcacacagtttgactggtcgtccgcccaggttccagagccagatgccatcaaggagtccctgctgtacttgtacatggacaggacctggatgccctatatattttctctgtccttggaggctctgaaatgtttccgcatcaggaacaatgagaagatgctgagtgacagccacggcgtggagaccatccgggacatcctgccagacaccagccttgggggcccatccttcttcaaaatcatcacggccaaggctgtcctgaagctgcaggccggaaacgccgaggaagccgccctgtggagggatctggtccgcaaagtcctggcatcctacttggagacagccgaggaggcggtgaccctgggcgggagcctggatgaaaactgtcaggaggtgctgaaatttgccacccgggagaatggcttcctgctgcagtacctggtggctatccccatggagaaaggccttgactcccaaggctgcttctgcgcaggctgctcccggcagatcggcttctcctttgtacgacccaagctctgtgccttctctggcctctattactgtgacatctgccaccaagacgatgcctcagtgattccggccaggatcatccacaactgggacctcaccaagcgcccgatctgcaggcaggccctgaagtttctgacacagatccgggcccagcccctcatcaacctgcagatggtgaacgcgtctctgtacgagcatgtggagcggatgcacctcattgggaggagacgggagcagctgaagctcctgggggattacctgggcctgtgccggagtggcgccctgaaggagctcagcaagaggctcaaccacaggaattatctcttggaatctccgcataggttcagtgttgctgacctccaacagatcgcagacggggtgtatgaaggattcctcaaggccctgattgaatttgcctcccagcatgtctaccactgcgacctgtgcacccagcgcggcttcatctgccagatctgccagcaccacgacatcatcttcccctttgagtttgacaccacagtcaggtgtgccgagtgcaagaccgtcttccaccagagctgccaggctgtggtgaagaagggctgcccccgctgtgcccgccggcgcaagtaccaggaacagaacattttcgcctgatgcccatctgctgaccccgctctgaaagccgggggtgagtgtggctcagccatcccggctgggtttgccatcagcccaggatactcaccgtgtcacagctgtgtccccttgtcaggaagaccctcagatgtggccagagcaccggcctcccagagaaagcccaggaagtccccgtggtgtcccctggccctccccccacccctctgctgcaggaggcgtggccaccaccagatgctccctgtctggggcaggcagggccgtttactcaccaggccctggctcaccagcgtcccggcgcctccgttagggctgcccaaacactgtggaaaggggacttggggagcattttcaattccacattcctgattaaaaggtctagttttttaa

SEQ ID NO: 166634 - DNA, 4995 bp, Homo sapiens
  Payload ID: 12807
  Gene Symbol: PLEKHM1
  Gene Name: pleckstrin homology domain containing, family M (with RUN domain) member 1
  ENST ID: ENST00000579197
  CDS Start-End: 119-310
agaccgcatcgtcggctcggaggctgaggggctgccgcggccgggagcgcccctcgcctcgctcctcgctccgcttggtgtcatgtgattctctgagggagcagctgcgtgagtggagatgctttcagtggtggagaatggactggacccccaggctgccatcccgacacatcatctcagagttggagcacctgacgtttgtcaacacggatgtgggccgctgccgggcatggctgcggctggccctgaacgatggcctgatggagtgctacctgaagctgctgctgcaggagcaggcccgcttgcatgagtactaccagcccaccgccctgctccgggatgctgaggagggcgagttcctccttagcttcctgcagggcctcacgtccttgtccttcgaactctcctacaagtctgccatcttaaatgagtggacgctcaccccattggccctgtctgggctttgcccgctttctgagctggaccctctctctacctctggtgcagaactacagcggaaggaatctctggattccatttcccattcttcaggctctgaagacatcgaagtccatcactcgggccataagatacggaggaaccagaagctgactgcctcctccctcagcctggacacggccagttcatcccagctgtcctgcagcctaaactctgatagctgcttactccaagagaatggctccaagagtccagaccattgcgaggagcccatgtcctgtgactcagacctgggcacagcaaatgctgaggactcagaccggtctctgcaagaggtattgttggaattcagcaaagcccaggtaaactctgtgccaaccaacggactgagccaagaaacagagatccccacaccacaggcctcgctctccctccatggcctcaacaccagcacatacctgcactgtgaggcacctgcagagccccttcctgcccaggcagcctctggaactcaagatggtgtccacgtgcaggagccgcgtccccaggcgcccagccccctggacttacagcagcctgtagagagcacctcaggccagcagccttctagtactgtcagcgagacagccagagaagtgggccaagggaatggcctgcagaaggcccaggctcatgacggagctggtctgaagctggtagtttcctcacccaccagtccgaaaaacaagagctggatctcagaggatgacttctaccggccttcccgggagcaacccctggagagtgcttcagaccacccaatagcttcttacagggggactccagggtcaaggcctggtctccacaggcatttttctcaagaaccaagaaaaaactgctccctgggggcgttagaccaagcgtgtgtaccttccccaggaagaaggcaagcccaggcagccccatcccaggggcataagagcttccgggtggtacaccggagacagatgggactgtccaacccattccggggtctcatgaagctgggcaccgtggagcggcggggggcaatgggcatctggaaggagctcttctgcgagctctccccgctggagttccgcctctacctgagcaacgaggagcacacctgtgtggagaactgctcgctgcttcgctgtgagtctgtggggccagcccatagtgatgggcgctttgagctggtcttctctggcaagaagctggccctgcgcgcctcctcccaggacgaagctgaggactggctggaccgggtgcgggaggccctgcagaaggtccggcctcagcaggaggatgagtgggtgaacgtgcagtacccagaccagcctgaggaaccccccgaggcgccccagggctgcctctctccctcagacctgctctcggagcccgcggccctccagggcacacagtttgactggtcgtccgcccaggttccagagccagatgccatcaaggagtccctgctgtacttgtacatggacaggacctggatgccctatatattttctctgtccttggaggctctgaaatgtttccgcatcaggaacaatgagaagatgctgagtgacagccacggcgtggagaccatccgggacatcctgccagacaccagccttgggggcccatccttcttcaaaatcatcacggccaaggctgtcctgaagctgcaggccggaaacgccgaggaagccgccctgtggagggatctggtccgcaaagtcctggcatcctacttggagacagccgaggaggcggtgaccctgggcgggagcctggatgaaaactgtcaggaggtgctgaaatttgccacccgggagaatggcttcctgctgcagtacctggtggctatccccatggagaaaggccttgactcccaaggctgcttctgcgcaggctgctcccggcagatcggcttctcctttgtacgacccaagctctgtgccttctctggcctctattactgtgacatctgccaccaagacgatgcctcagtgattccggccaggatcatccacaactgggacctcaccaagcgcccgatctgcaggcaggccctgaagtttctgacacagatccgggcccagcccctcatcaacctgcagatggtgaacgcgtctctgtacgagcatgtggagcggatgcacctcattgggaggagacgggagcagctgaagctcctgggggattacctgggcctgtgccggagtggcgccctgaaggagctcagcaagaggctcaaccacaggaattatctcttggaatctccgcataggttcagtgttgctgacctccaacagatcgcagacggggtgtatgaaggattcctcaaggccctgattgaatttgcctcccagcatgtctaccactgcgacctgtgcacccagcgcggcttcatctgccagatctgccagcaccacgacatcatcttcccctttgagtttgacaccacagtcaggtgtgccgagtgcaagaccgtcttccaccagagctgccaggctgtggtgaagaagggctgcccccgctgtgcccgccggcgcaagtaccaggaacagaacattttcgcctgatgcccatctgctgaccccgctctgaaagccgggggtgagtgtggctcagccatcccggctgggtttgccatcagcccaggatactcaccgtgtcacagctgtgtccccttgtcaggaagaccctcagatgtggccagagcaccggcctcccagagaaagcccaggaagtccccgtggtgtcccctggccctccccccacccctctgctgcaggaggcgtggccaccaccagatgctccctgtctggggcaggcagggccgtttactcaccaggccctggctcaccagcgtcccggcgcctccgttagggctgcccaaacactgtggaaaggggacttggggagcattttcaattccacattcctgattaaaaggtctagttttttaaggtgggtttttcccattcatatttcaacagaaagtatttttttattcttgaccctacgtgagtcacccatgaaatccagacattctcacccccagcggatgcacaggagccactcaggcctggcttagaggtagcgggtggctggtgggcaggccactgctgggacagggtctatgggcccacccagtgcctttccttggccctcactgccagtgccaaaccgcccctcagcagggcagggccagtcctggcgaccccggttcctctgtgtcctctttactccccaccccagtgcgtctcgcctgctgagcccaccgctttctcagcgtcagagcccctagctcttctctagcctggggccttggccccattaggagaaggagaaatgactggaaaccagcactgtcagcactttgagccctcctcggtttatggagggtcgccgtcttgcccacccccgatccccgtgcgctcctcacccctctacagacaggggcgctgctgcagatgctccaggcccaccttggtgggtgcccggggtcacactctctgcctgactgacccctgccagggcacagataggcaggaccccagagagggcaggcagccacgccctgcactgtggagaagtgacctggtcctaagctgtgcagggcgtgcgggggaactgccctgtggatgcagccaccacctcacaaagccatgaattcccaaagcatcactgaacttgcccagccgggacactggagactgaagaagttccccggagcaggactgcctttgaaggggccttggggctggggtgggagtctggaattgttttcaaagtgatggtcagaccctccaggcttcggggaaatgtgggtttgctggtctctctgtcgccttcccccacctctcctggacctagcaggccctcagtcctagctgtcttacctgcgctcagcttggagtcaggcctcaggtggagagccgcatgtcactgtcagagatgagcccacccccacccttccctgggggcgattagctgctgagtcacccacccagccttggagctggatgcctgtgcagcagaacagaggcaacggtggcaggcaggtggaggctgcgcacagcttctcccggtcatggcacacacctgtgcccagacgccaatgcctcctaagccaggagctgggttatgcaccgccatggcccacattaacgctccaccacaagcccagcctagtcagagccctcattgccccatccctgagtgggcaggagcctggcctggggagggcttgggcctgtgaggattctccccgaaggtgccctcggaggcagcaggtttgaggccctggggggcccgttccccagaagctgccagtgctttcagatgcattgactcttcccgcctcccctccctcagaaaggtagtgcccacactatttttaaaatgttattttatgcaatacactgttcctagtgagcagggctctggccctgaggagtctttgcaatgtattgaaggaattgctgccgtgtgagttttgaatgattttgcagtaaagacctgatctttctc

SEQ ID NO: 166635 - DNA, 553 bp, Homo sapiens
  Payload ID: 12807
  Gene Symbol: PLEKHM1
  Gene Name: pleckstrin homology domain containing, family M (with RUN domain) member 1
  ENST ID: ENST00000586084
  CDS Start-End: 132-431
gtcagtggccgagagaccgcatcgtcggctcggaggctgaggggctgccgcggccgggagcgcccctcgcctcgctcctcgctccgcttggtgtcatgtgattctctgagggagcagctgcgtgagtggagatgctttcagtggtggagaatggactggacccccaggctgccatcccggtcatcaagaagaagctggtgggatccgtgaaggccttgcagaagcagtacgtgtccctggacacggtggtcactagtgaagacggagatgccaacaccatgtgcagcgccctggaggccgtatttatccatggcctgcacgccaagcacatccgagctgaggccggaggaaaaaggaagaaaagtgcccaccagaagcctctgccccagcctgtcttctggcccctcctgaaagctgtcacccacaagtgagatttagctggagaggttttgctttgcggaggagcagcagactatgggacacttggcttttcctccccagctgttcaggaagccaacagagacacatcatctcagagttggagcacctgacg

SEQ ID NO: 166636 - DNA, 327 bp, Homo sapiens
  Payload ID: 12807
  Gene Symbol: PLEKHM1
  Gene Name: pleckstrin homology domain containing, family M (with RUN domain) member 1
  ENST ID: ENST00000590991
  CDS Start-End: 1-138
ctgtgccggagtggcgccctgaaggagctcagcaagaggctcaaccacaggaattatctcttggaatctccgcataggttcagtgttgctgacctccaacaggtaagagtgtcatgcttcccccgcccagacctctagagagacttcattcccagagaagtcagcaaggaagatggaagagggggtgtctgtagtttactgaagaagacagcagtctgtagcttttctgcagctcaggatcgcagacggggtgtatgaaggattcctcaaggccctgattgaatttgcctcccagcatgtctaccactgcgacctgtgcacccagcg

SEQ ID NO: 166637 - DNA, 587 bp, Homo sapiens
  Payload ID: 12807
  Gene Symbol: PLEKHM1
  Gene Name: pleckstrin homology domain containing, family M (with RUN domain) member 1
  ENST ID: ENST00000589780
  CDS Start-End: 132-587
gtcagtggccgagagaccgcatcgtcggctcggaggctgaggggctgccgcggccgggagcgcccctcgcctcgctcctcgctccgcttggtgtcatgtgattctctgagggagcagctgcgtgagtggagatgctttcagtggtggagaatggactggacccccaggctgccatcccggtcatcaagaagaagctggtgggatccgtgaaggccttgcagaagcaacacatcatctcagagttggagcacctgacgtttgtcaacacggatgtgggccgctgccgggcatggctgcggctggccctgaacgatggcctgatggagtgctacctgaagctgctgctgcaggagcaggcccgcttgcatgagtactaccagcccaccgccctgctccgggatgctgaggagggcgagttcctccttagcttcctgcagggcctcacgtccttgtccttcgaactctcctacaagtctgccatcttaaatgagtggacgctcaccccattggccctgtctgggctttgcccgctttctgagctggaccctctctctacctctggtgcagaactacagcggaaggaatct

SEQ ID NO: 166638 - DNA, 650 bp, Homo sapiens
  Payload ID: 12807
  Gene Symbol: PLEKHM1
  Gene Name: pleckstrin homology domain containing, family M (with RUN domain) member 1
  ENST ID: ENST00000591580
  CDS Start-End: 1-341
tgaagctcctgggggattacctgggcctgtgccggagtggcgccctgaaggagctcagcaagaggctcaaccacaggaattatctcttggaatctccgcataggttcagtgttgctgacctccaacagcatgtctaccactgcgacctgtgcacccagcgcggcttcatctgccagatctgccagcaccacgacatcatcttcccctttgagtttgacaccacagtcaggtgtgccgagtgcaagaccgtcttccaccagagctgccaggctgtggtgaagaagggctgcccccgctgtgcccgccggcgcaagtaccaggaacagaacattttcgcctgatgcccatctgctgaccccgctctgaaagccgggggtgagtgtggctcagccatcccggctgggtttgccatcagcccaggatactcaccgtgtcacagctgtgtccccttgtcaggaagaccctcagatgtggccagagcaccggcctcccagagaaagcccaggaagtccccgtggtgtcccctggccctccccccacccctctgctgcaggaggcgtggccaccaccagatgctccctgtctggggcaggcagggccgtttactcaccaggccctggctcaccagcgtcccggcgcctccgttaggg

SEQ ID NO: 166639 - DNA, 5263 bp, Homo sapiens
  Payload ID: 12807
  Gene Symbol: PLEKHM1
  Gene Name: pleckstrin homology domain containing, family M (with RUN domain) member 1
  Uniprot ID: Q9Y4G2
  ENST ID: ENST00000613787
  CDS Start-End: 135-3305
gttgtcagtggccgagagaccgcatcgtcggctcggaggctgaggggctgccgcggccgggagcgcccctcgcctcgctcctcgctccgcttggtgtcatgtgattctctgagggagcagctgcgtgagtggagatgctttcagtggtggagaatggactggacccccaggctgccatcccggtcatcaagaagaagctggtgggatccgtgaaggccttgcagaagcagtacgtgtccctggacacggtggtcactagtgaagacggagatgccaacaccatgtgcagcgccctggaggccgtatttatccatggcctgcacgccaagcacatccgagctgaggccggaggaaaaaggaagaaaagtgcccaccagaagcctctgccccagcctgtcttctggcccctcctgaaagctgtcacccacaaacacatcatctcagagttggagcacctgacgtttgtcaacacggatgtgggccgctgccgggcatggctgcggctggccctgaacgatggcctgatggagtgctacctgaagctgctgctgcaggagcaggcccgcttgcatgagtactaccagcccaccgccctgctccgagatgctgaggagggcgagttcctccttagcttcctgcagggcctcacgtccttgtccttcgaactctcctacaagtctgccatcttaaatgagtggacgctcaccccactggccctgtctgggctttgcccgctttctgagctggaccctctctctacctctggtgcagaactacagcggaaggaatctctggattccatttcgcattcttcaggctctgaagacatcgaagtccatcactcgggccataagatacggaggaaccagaagctgactgcctcctccctcagcctggacacggccagttcatcccagctgtcctgcagcctaaactctgatagctgcttactccaagagaatggctccaagagtccagaccattgtgaggagcccatgtcctgtgactcagacctgggcacagcaaatgctgaggactcagaccggtctctgcaagaggtattgttggaattcagcaaagcccaggtaaactctgtgccaaccaacggactgagccaagaaacggagatccccacaccacaggcctcgctctccctccatggcctcaacaccagcacatacctgcactgtgaggcacctgcagagccccttcctgcccaggcagcctctggaactcaagatggtgtccacgtgcaggagccgcgtccccaggcgcccagccccctggacttacagcagcctgtagagagcacctcaggccagcagccttctagtactgtcagcgagacagccagagaagtgggccaagggaatggcctgcagaaggcccaggctcatgacggagctggtctgaagctggtagtttcctcacccaccagtccgaaaaacaagagctggatctcagaggatgacttctaccggccttcccgggagcaacccctggagagtgcttcagaccacccaatagcttcttacagggggactccagggtcaaggcctggtctccacaggcatttttctcaagaaccaagaaaaaactgctccctgggggcgttagaccaagcgtgtgtaccttccccaggaagaaggcaagcccaggcagccccatcccaggggcataagagcttccgggtggtacaccggagacagatgggactgtccaacccattccggggtctcatgaagctgggcaccgtggagcggcggggggcaatgggcatctggaaggagctcttctgcgagctctccccgctggagttccgcctctacctgagcaacgaggagcacacctgtgtggagaactgctcgctgcttcgctgtgagtctgtggggccagcccatagtgatgggcgctttgagctggtcttctctggcaagaagctggccctgcgcgcctcctcccaggacgaagctgaggactggctggaccgggtgcgggaggccctgcagaaggtccggcctcagcaggaggatgagtgggtgaacgtgcagtacccagaccagcctgaggaaccccccgaggcgccccagggctgcctctctccctcagacctgctctcggagcccgcggccctccagggcacacagtttgactggtcgtccgcccaggttccagagccagatgccatcaaggagtccctgctgtacttgtacatggacaggacctggatgccctatatattttctctgtccttggaggctctgaaatgtttccgcatcaggaacaatgagaagatgctgagtgacagccacggcgtggagaccatccgggacatcctgccagacaccagccttgggggcccatccttcttcaaaatcatcacggccaaggctgtcctgaagctgcaggccggaaacgccgaggaagccgccctgtggagggatctggtccgcaaagtcctggcatcctacttggagacagccgaggaggcggtgaccctgggcgggagcctggatgaaaactgtcaggaggtgctgaaatttgccacccgggagaatggcttcctgctgcagtacctggtggctatccccatggagaaaggccttgactcccaaggctgcttctgcgcaggctgctcccggcagatcggcttctcctttgtacgacccaagctctgtgccttctctggcctctattactgtgacatctgccaccaagacgatgcctcagtgattccggccaggatcatccacaactgggacctcaccaagcgcccgatctgcaggcaggccctgaagtttctgacacagatccgggcccagcccctcatcaacctgcagatggtgaacgcgtctctgtacgagcatgtggagcggatgcacctcattgggaggagacgggagcagctgaagctcctgggggattacctgggcctgtgccggagtggcgccctgaaggagctcagcaagaggctcaaccacaggaattatctcttggaatctccgcataggttcagtgttgctgacctccaacagatcgcagacggggtgtatgaaggattcctcaaggccctgattgaatttgcctcccagcatgtctaccactgcgacctgtgcacccagcgcggcttcatctgccagatctgccagcaccacgacatcatcttcccctttgagtttgacaccacagtcaggtgtgccgagtgcaagaccgtcttccaccagagctgccaggctgtggtgaagaagggctgcccccgctgtgcccgccggcgcaagtaccaggaacagaacattttcgcctgatgcccatctgctgaccccgctctgaaagccgggggtgagtgtggctcagccatcccggctgggtttgccatcagcccaggatactcaccgtgtcacagctgtgtccccttgtcaggaagaccctcagatgtggccagagcaccggcctcccagagaaagcccaggaagtccccgtggtgtcccctggccctccccccacccctctgctgcaggaggcgtggccaccaccagatgctccctgtctggggcaggcagggccgtttactcactaggccctggctcaccagcgtcccggcgcctccgttagggctgcccaaacactgtggaaaggggacttggggagcattttcaattccacattcctgattaaaaggtctagttttttaaggtgggtttttcccattcatatttcaacagaaagtatttttttattcttgaccctacgtgagtcacccatgaaatccagacattctcacccccagcggatgcacaggagccactcaggcctggcttagaggtagcgggtggctggtgggcaggccactgctgggacagggtctatgggcccacccagtgcctttccttggccctcactgccagtgccaaaccgcccctcagcagggcagggccagtcctggcgaccccggttcctctgtgtcctctttactccccaccccagtgcgtctcgcctgctgagcccaccgctttctcagcgtcagagcccctagctcttctctagcctggggccttggccccattaggagaaggagaaatgactggaaaccagcactgtcagcactttgagccctcctcggtttatggagggtcgccgtcttgcccacccccgatccccgtgcgctcctcacccctctacagacaggggcgctgctgcagatgctccaggcccaccttggtgggtgcccggggtcacactctctgcctgactgacccctgccagggcacagataggcaggaccccagagagggcaggcagccacgccctgcactgtggagaagtgacctggtcctaagctgtgcagggcgtgcgggggaactgccctgtggatgcagccaccacctcacaaagccatgaattcccaaagcatcactgaacttgcccagccgggacactggagactgaagaagttccccggagcaggactgcctttgaaggggccttggggctggggtgggagtctggaattgttttcaaagtgatggtcagaccctccaggcttcggggaaatgtgggtttgctggtctctctgtcgccttcccccacctctcctggacctagcaggccctcagtcctagctgtcttacctgcactcagcttggagtcaggcctcaggtggagagccgcatgtcactgtcagagatgagcccacccccacccttccctgggggcgattagctgctgagtcacccacccagccttggagctggatgcctgtgcagcagaacagaggcaacggtggcaggcaggtggaggctgcgcacagcttctcccggtcatggcacacacctgtgcccagacgccaatgcctcctaagccaggagctgggttatgcaccgccatggcccacattaacgctccaccacaagcccagcctagtcagagccctcattgccccatccctgagtgggcaggagcctggcctggggagggcttcggcctgtgaggattctccccgaaggtgccctcggaggcagcaggtttgaggccctggggggcccgttccccagaagctgccagtgctttcagatgcattgactcttcccacctcccctccctcagaaaggtagtgcccacactatttttaaaatgttattttatgcaatacactgttcctagtgagcagggctctggccctgaggagtctttgcaatgtattgaaggaattgctgccgtgtgagttttgaatgattttgcagtaaagacctgatctttctcatca

SEQ ID NO: 166640 - DNA, 5263 bp, Homo sapiens; identical to SEQ ID NO: 166630
  Payload ID: 12807
  Gene Symbol: PLEKHM1
  Gene Name: pleckstrin homology domain containing, family M (with RUN domain) member 1
  Uniprot ID: Q9Y4G2
  ENST ID: ENST00000617688
  CDS Start-End: 135-3305

SEQ ID NO: 166641 - DNA, 650 bp, Homo sapiens
  Payload ID: 12807
  Gene Symbol: PLEKHM1
  Gene Name: pleckstrin homology domain containing, family M (with RUN domain) member 1
  ENST ID: ENST00000631322
  CDS Start-End: 1-341
tgaagctcctgggggattacctgggcctgtgccggagtggcgccctgaaggagctcagcaagaggctcaaccacaggaattatctcttggaatctccgcataggttcagtgttgctgacctccaacagcatgtctaccactgcgacctgtgcacccagcgcggcttcatctgccagatctgccagcaccacgacatcatcttcccctttgagtttgacaccacagtcaggtgtgccgagtgcaagaccgtcttccaccagagctgccaggctgtggtgaagaagggctgcccccgctgtgcccgccggcgcaagtaccaggaacagaacattttcgcctgatgcccatctgctgaccccgctctgaaagccgggggtgagtgtggctcagccatcccggctgggtttgccatcagcccaggatactcaccgtgtcacagctgtgtccccttgtcaggaagaccctcagatgtggccagagcaccggcctcccagagaaagcccaggaagtccccgtggtgtcccctggccctccccccacccctctgctgcaggaggcgtggccaccaccagatgctccctgtctggggcaggcagggccgtttactcactaggccctggctcaccagcgtcccggcgcctccgttaggg

SEQ ID NO: 166642 - DNA, 2847 bp, Homo sapiens
  Payload ID: 12807
  Gene Symbol: PLEKHM1
  Gene Name: pleckstrin homology domain containing, family M (with RUN domain) member 1
  ENST ID: ENST00000628145
  CDS Start-End: 173-364
acacaattcaggcagtggagagaaggccgtggggagtggctgaggagtccctcaagagaagaggttgctgttcactgatggtggagtgttttgagagtggtggaaccaggttatccctttcttcttttaacgtgtcatgtgattctctgagggagcagctgcgtgagtggagatgctttcagtggtggagaatggactggacccccaggctgccatcccgacacatcatctcagagttggagcacctgacgtttgtcaacacggatgtgggccgctgccgggcatggctgcggctggccctgaacgatggcctgatggagtgctacctgaagctgctgctgcaggagcaggcccgcttgcatgagtactaccagcccaccgccctgctccgagatgctgaggagggcgagttcctccttagcttcctgcagggcctcacgtccttgtccttcgaactctcctacaagtctgccatcttaaatgagtggacgctcaccccactggccctgtctgggctttgcccgctttctgagctggaccctctctctacctctggtgcagaactacagcggaaggaatctctggattccatttcgcattcttcaggctctgaagacatcgaagtccatcactcgggccataagatacggaggaaccagaagctgactgcctcctccctcagcctggacacggccagttcatcccagctgtcctgcagcctaaactctgatagctgcttactccaagagaatggctccaagagtccagaccattgtgaggagcccatgtcctgtgactcagacctgggcacagcaaatgctgaggactcagaccggtctctgcaagaggtattgttggaattcagcaaagcccaggtaaactctgtgccaaccaacggactgagccaagaaacggagatccccacaccacaggcctcgctctccctccatggcctcaacaccagcacatacctgcactgtgaggcacctgcagagccccttcctgcccaggcagcctctggaactcaagatggtgtccacgtgcaggagccgcgtccccaggcgcccagccccctggacttacagcagcctgtagagagcacctcaggccagcagccttctagtactgtcagcgagacagccagagaagtgggccaagggaatggcctgcagaaggcccaggctcatgacggagctggtctgaagctggtagtttcctcacccaccagtccgaaaaacaagagctggatctcagaggatgacttctaccggccttcccgggagcaacccctggagagtgcttcagaccacccaatagcttcttacagggggactccagggtcaaggcctggtctccacaggcatttttctcaagaaccaagaaaaaactgctccctgggggcgttagaccaagcgtgtgtaccttccccaggaagaaggcaagcccaggcagccccatcccaggggcataagagcttccgggtggtacaccggagacagatgggactgtccaacccattccggggtctcatgaagctgggcaccgtggagcggcggggggcaatgggcatctggaaggagctcttctgcgagctctccccgctggagttccgcctctacctgagcaacgaggagcacacctgtgtggagaactgctcgctgcttcgctgtgagtctgtggggccagcccatagtgatgggcgctttgagctggtcttctctggcaagaagctggccctgcgcgcctcctcccaggacgaagctgaggactggctggaccgggtgcgggaggccctgcagaaggtccggcctcagcaggaggatgagtgggtgaacgtgcagtacccagaccagcctgaggaaccccccgaggcgccccagggctgcctctctccctcagacctgctctcggagcccgcggccctccagggcacacagtttgactggtcgtccgcccaggttccagagccagatgccatcaaggagtccctgctgtacttgtacatggacaggacctggatgccctatatattttctctgtccttggaggctctgaaatgtttccgcatcaggaacaatgagaagatgctgagtgacagccacggcgtggagaccatccgggacatcctgccagacaccagccttgggggcccatccttcttcaaaatcatcacggccaaggctgtcctgaagctgcaggccggaaacgccgaggaagccgccctgtggagggatctggtccgcaaagtcctggcatcctacttggagacagccgaggaggcggtgaccctgggcgggagcctggatgaaaactgtcaggaggtgctgaaatttgccacccgggagaatggcttcctgctgcagtacctggtggctatccccatggagaaaggccttgactcccaaggctgcttctgcgcaggctgctcccggcagatcggcttctcctttgtacgacccaagctctgtgccttctctggcctctattactgtgacatctgccaccaagacgatgcctcagtgattccggccaggatcatccacaactgggacctcaccaagcgcccgatctgcaggcaggccctgaagtttctgacacagatccgggcccagcccctcatcaacctgcagatggtgaacgcgtctctgtacgagcatgtggagcggatgcacctcattgggaggagacgggagcagctgaagctcctgggggattacctgggcctgtgccggagtggcgccctgaaggagctcagcaagaggctcaaccacaggaattatctcttggaatctccgcataggttcagtgttgctgacctccaacagatcgcagacggggtgtatgaag

SEQ ID NO: 166643 - DNA, 4995 bp, Homo sapiens
  Payload ID: 12807
  Gene Symbol: PLEKHM1
  Gene Name: pleckstrin homology domain containing, family M (with RUN domain) member 1
  ENST ID: ENST00000628743
  CDS Start-End: 119-310
agaccgcatcgtcggctcggaggctgaggggctgccgcggccgggagcgcccctcgcctcgctcctcgctccgcttggtgtcatgtgattctctgagggagcagctgcgtgagtggagatgctttcagtggtggagaatggactggacccccaggctgccatcccgacacatcatctcagagttggagcacctgacgtttgtcaacacggatgtgggccgctgccgggcatggctgcggctggccctgaacgatggcctgatggagtgctacctgaagctgctgctgcaggagcaggcccgcttgcatgagtactaccagcccaccgccctgctccgagatgctgaggagggcgagttcctccttagcttcctgcagggcctcacgtccttgtccttcgaactctcctacaagtctgccatcttaaatgagtggacgctcaccccactggccctgtctgggctttgcccgctttctgagctggaccctctctctacctctggtgcagaactacagcggaaggaatctctggattccatttcgcattcttcaggctctgaagacatcgaagtccatcactcgggccataagatacggaggaaccagaagctgactgcctcctccctcagcctggacacggccagttcatcccagctgtcctgcagcctaaactctgatagctgcttactccaagagaatggctccaagagtccagaccattgtgaggagcccatgtcctgtgactcagacctgggcacagcaaatgctgaggactcagaccggtctctgcaagaggtattgttggaattcagcaaagcccaggtaaactctgtgccaaccaacggactgagccaagaaacggagatccccacaccacaggcctcgctctccctccatggcctcaacaccagcacatacctgcactgtgaggcacctgcagagccccttcctgcccaggcagcctctggaactcaagatggtgtccacgtgcaggagccgcgtccccaggcgcccagccccctggacttacagcagcctgtagagagcacctcaggccagcagccttctagtactgtcagcgagacagccagagaagtgggccaagggaatggcctgcagaaggcccaggctcatgacggagctggtctgaagctggtagtttcctcacccaccagtccgaaaaacaagagctggatctcagaggatgacttctaccggccttcccgggagcaacccctggagagtgcttcagaccacccaatagcttcttacagggggactccagggtcaaggcctggtctccacaggcatttttctcaagaaccaagaaaaaactgctccctgggggcgttagaccaagcgtgtgtaccttccccaggaagaaggcaagcccaggcagccccatcccaggggcataagagcttccgggtggtacaccggagacagatgggactgtccaacccattccggggtctcatgaagctgggcaccgtggagcggcggggggcaatgggcatctggaaggagctcttctgcgagctctccccgctggagttccgcctctacctgagcaacgaggagcacacctgtgtggagaactgctcgctgcttcgctgtgagtctgtggggccagcccatagtgatgggcgctttgagctggtcttctctggcaagaagctggccctgcgcgcctcctcccaggacgaagctgaggactggctggaccgggtgcgggaggccctgcagaaggtccggcctcagcaggaggatgagtgggtgaacgtgcagtacccagaccagcctgaggaaccccccgaggcgccccagggctgcctctctccctcagacctgctctcggagcccgcggccctccagggcacacagtttgactggtcgtccgcccaggttccagagccagatgccatcaaggagtccctgctgtacttgtacatggacaggacctggatgccctatatattttctctgtccttggaggctctgaaatgtttccgcatcaggaacaatgagaagatgctgagtgacagccacggcgtggagaccatccgggacatcctgccagacaccagccttgggggcccatccttcttcaaaatcatcacggccaaggctgtcctgaagctgcaggccggaaacgccgaggaagccgccctgtggagggatctggtccgcaaagtcctggcatcctacttggagacagccgaggaggcggtgaccctgggcgggagcctggatgaaaactgtcaggaggtgctgaaatttgccacccgggagaatggcttcctgctgcagtacctggtggctatccccatggagaaaggccttgactcccaaggctgcttctgcgcaggctgctcccggcagatcggcttctcctttgtacgacccaagctctgtgccttctctggcctctattactgtgacatctgccaccaagacgatgcctcagtgattccggccaggatcatccacaactgggacctcaccaagcgcccgatctgcaggcaggccctgaagtttctgacacagatccgggcccagcccctcatcaacctgcagatggtgaacgcgtctctgtacgagcatgtggagcggatgcacctcattgggaggagacgggagcagctgaagctcctgggggattacctgggcctgtgccggagtggcgccctgaaggagctcagcaagaggctcaaccacaggaattatctcttggaatctccgcataggttcagtgttgctgacctccaacagatcgcagacggggtgtatgaaggattcctcaaggccctgattgaatttgcctcccagcatgtctaccactgcgacctgtgcacccagcgcggcttcatctgccagatctgccagcaccacgacatcatcttcccctttgagtttgacaccacagtcaggtgtgccgagtgcaagaccgtcttccaccagagctgccaggctgtggtgaagaagggctgcccccgctgtgcccgccggcgcaagtaccaggaacagaacattttcgcctgatgcccatctgctgaccccgctctgaaagccgggggtgagtgtggctcagccatcccggctgggtttgccatcagcccaggatactcaccgtgtcacagctgtgtccccttgtcaggaagaccctcagatgtggccagagcaccggcctcccagagaaagcccaggaagtccccgtggtgtcccctggccctccccccacccctctgctgcaggaggcgtggccaccaccagatgctccctgtctggggcaggcagggccgtttactcactaggccctggctcaccagcgtcccggcgcctccgttagggctgcccaaacactgtggaaaggggacttggggagcattttcaattccacattcctgattaaaaggtctagttttttaaggtgggtttttcccattcatatttcaacagaaagtatttttttattcttgaccctacgtgagtcacccatgaaatccagacattctcacccccagcggatgcacaggagccactcaggcctggcttagaggtagcgggtggctggtgggcaggccactgctgggacagggtctatgggcccacccagtgcctttccttggccctcactgccagtgccaaaccgcccctcagcagggcagggccagtcctggcgaccccggttcctctgtgtcctctttactccccaccccagtgcgtctcgcctgctgagcccaccgctttctcagcgtcagagcccctagctcttctctagcctggggccttggccccattaggagaaggagaaatgactggaaaccagcactgtcagcactttgagccctcctcggtttatggagggtcgccgtcttgcccacccccgatccccgtgcgctcctcacccctctacagacaggggcgctgctgcagatgctccaggcccaccttggtgggtgcccggggtcacactctctgcctgactgacccctgccagggcacagataggcaggaccccagagagggcaggcagccacgccctgcactgtggagaagtgacctggtcctaagctgtgcagggcgtgcgggggaactgccctgtggatgcagccaccacctcacaaagccatgaattcccaaagcatcactgaacttgcccagccgggacactggagactgaagaagttccccggagcaggactgcctttgaaggggccttggggctggggtgggagtctggaattgttttcaaagtgatggtcagaccctccaggcttcggggaaatgtgggtttgctggtctctctgtcgccttcccccacctctcctggacctagcaggccctcagtcctagctgtcttacctgcactcagcttggagtcaggcctcaggtggagagccgcatgtcactgtcagagatgagcccacccccacccttccctgggggcgattagctgctgagtcacccacccagccttggagctggatgcctgtgcagcagaacagaggcaacggtggcaggcaggtggaggctgcgcacagcttctcccggtcatggcacacacctgtgcccagacgccaatgcctcctaagccaggagctgggttatgcaccgccatggcccacattaacgctccaccacaagcccagcctagtcagagccctcattgccccatccctgagtgggcaggagcctggcctggggagggcttcggcctgtgaggattctccccgaaggtgccctcggaggcagcaggtttgaggccctggggggcccgttccccagaagctgccagtgctttcagatgcattgactcttcccacctcccctccctcagaaaggtagtgcccacactatttttaaaatgttattttatgcaatacactgttcctagtgagcagggctctggccctgaggagtctttgcaatgtattgaaggaattgctgccgtgtgagttttgaatgattttgcagtaaagacctgatctttctc

SEQ ID NO: 166644 - DNA, 603 bp, Homo sapiens
  Payload ID: 12807
  Gene Symbol: PLEKHM1
  Gene Name: pleckstrin homology domain containing, family M (with RUN domain) member 1
  ENST ID: ENST00000629244
  CDS Start-End: 182-603
agtggccgagagaccgcatcgtcggctcggaggctgaggggctgccgcggccgggagcgcccctcgcctcgctcctcgctccgcttgacacatcatctcagagttggagcacctgacgtttgtcaacacggatgtgggccgctgccgggcatggctgcggctggccctgaacgatggcctgatggagtgctacctgaagctgctgctgcaggagcaggcccgcttgcatgagtactaccagcccaccgccctgctccgagatgctgaggagggcgagttcctccttagcttcctgcagggcctcacgtccttgtccttcgaactctcctacaagtctgccatcttaaatgagtggacgctcaccccactggccctgtctgggctttgcccgctttctgagctggaccctctctctacctctggtgcagaactacagcggaaggaatctctggattccatttcgcattcttcaggctctgaagacatcgaagtccatcactcgggccataagatacggaggaaccagaagctgactgcctcctccctcagcctggacacggccagttcatcccagctgtcctgcagcctaaactctgatagctg

SEQ ID NO: 166645 - DNA, 587 bp, Homo sapiens
  Payload ID: 12807
  Gene Symbol: PLEKHM1
  Gene Name: pleckstrin homology domain containing, family M (with RUN domain) member 1
  ENST ID: ENST00000629153
  CDS Start-End: 132-587
gtcagtggccgagagaccgcatcgtcggctcggaggctgaggggctgccgcggccgggagcgcccctcgcctcgctcctcgctccgcttggtgtcatgtgattctctgagggagcagctgcgtgagtggagatgctttcagtggtggagaatggactggacccccaggctgccatcccggtcatcaagaagaagctggtgggatccgtgaaggccttgcagaagcaacacatcatctcagagttggagcacctgacgtttgtcaacacggatgtgggccgctgccgggcatggctgcggctggccctgaacgatggcctgatggagtgctacctgaagctgctgctgcaggagcaggcccgcttgcatgagtactaccagcccaccgccctgctccgagatgctgaggagggcgagttcctccttagcttcctgcagggcctcacgtccttgtccttcgaactctcctacaagtctgccatcttaaatgagtggacgctcaccccactggccctgtctgggctttgcccgctttctgagctggaccctctctctacctctggtgcagaactacagcggaaggaatct

SEQ ID NO: 166646 - DNA, 327 bp, Homo sapiens; identical to SEQ ID NO: 166636
  Payload ID: 12807
  Gene Symbol: PLEKHM1
  Gene Name: pleckstrin homology domain containing, family M (with RUN domain) member 1
  ENST ID: ENST00000627693
  CDS Start-End: 1-138

SEQ ID NO: 166647 - DNA, 553 bp, Homo sapiens
  Payload ID: 12807
  Gene Symbol: PLEKHM1
  Gene Name: pleckstrin homology domain containing, family M (with RUN domain) member 1
  ENST ID: ENST00000626666
  CDS Start-End: 132-431
gtcagtggccgagagaccgcatcgtcggctcggaggctgaggggctgccgcggccgggagcgcccctcgcctcgctcctcgctccgcttggtgtcatgtgattctctgagggagcagctgcgtgagtggagatgctttcagtggtggagaatggactggacccccaggctgccatcccggtcatcaagaagaagctggtgggatccgtgaaggccttgcagaagcagtacgtgtccctggacacggtggtcactagtgaagacggagatgccaacaccatgtgcagcgccctggaggccgtatttatccatggcctgcacgccaagcacatccgagctgaggccggaggaaaaaggaagaaaagtgcccaccagaagcctctgccccagcctgtcttctggcccctcctgaaagctgtcacccacaagtgagatttagccggagaggttttgctttgcggaggagcagcagactatgggacacttggcttttcctccccagctgttcaggaagccaacagagacacatcatctcagagttggagcacctgacg

SEQ ID NO: 166648 - DNA, 3292 bp, Homo sapiens
  Payload ID: 12807
  Gene Symbol: PLEKHM1
  Gene Name: pleckstrin homology domain containing, family M (with RUN domain) member 1
  ENST ID: ENST00000630038
  CDS Start-End: 120-1127
gagaccgcatcgtcggctcggaggctgaggggctgccgcggccgggagcgcccctcgcctcgctcctcgctccgcttggtgtcatgtgattctctgagggagcagctgcgtgagtggagatgctttcagtggtggagaatggactggacccccaggctgccatcccggtcatcaagaagaagctggtgggatccgtgaaggccttgcagaagcagtacgtgtccctggacacggtggtcactagtgaagacggagatgccaacaccatgtgcagcgccctggaggccgtatttatccatggcctgcacgccaagcacatccgagctgaggccggaggaaaaaggaagaaaagtgcccaccagaagcctctgccccagcctgtcttctggcccctcctgaaagctgtcacccacaaacacatcatctcagagttggagcacctgacgtttgtcaacacggatgtgggccgctgccgggcatggctgcggctggccctgaacgatggcctgatggagtgctacctgaagctgctgctgcaggagcaggcccgcttgcatgagtactaccagcccaccgccctgctccgagatgctgaggagggcgagttcctccttagcttcctgcagggcctcacgtccttgtccttcgaactctcctacaagtctgccatcttaaatgagtggacgctcaccccactggccctgtctgggctttgcccgctttctgagctggaccctctctctacctctggtgcagaactacagcggaaggaatctctggattccatttcgcattcttcaggctctgaagacatcgaagtccatcactcgggccataagatacggaggaaccagaagctgactgcctcctccctcagcctggacacggccagttcatcccagctgtcctgcagcctaaactctgatagctgcttactccaagagaatggctccaagagtccagaccattgtgaggagcccatgtcctgtgactcagacctgggcacagcaaatgctgaggactcagaccggtctctgcaagaaaaaacaagagctggatctcagaggatgacttctaccggccttcccgggagcaacccctggagagtgcttcagaccacccaatagcttcttacagggggactccagggtcaaggcctggtctccacaggcatttttctcaagaaccaagaaaaaactgctccctgggggcgttagaccaagcgtgtgtaccttccccaggaagaaggcaagcccaggcagccccatcccaggggcataagagcttccgggtggtacaccggagacagatgggactgtccaacccattccggggtctcatgaagctgggcaccgtggagcggcggggggcaatgggcatctggaaggagctcttctgcgagctctccccgctggagttccgcctctacctgagcaacgaggagcacacctgtgtggagaactgctcgctgcttcgctgtgagtctgtggggccagcccatagtgatgggcgctttgagctggtcttctctggcaagaagctggccctgcgcgcctcctcccaggacgaagctgaggactggctggaccgggtgcgggaggccctgcagaaggtccggcctcagcaggaggatgagtgggtgaacgtgcagtacccagaccagcctgaggaaccccccgaggcgccccagggctgcctctctccctcagacctgctctcggagcccgcggccctccagggcacacagtttgactggtcgtccgcccaggttccagagccagatgccatcaaggagtccctgctgtacttgtacatggacaggacctggatgccctatatattttctctgtccttggaggctctgaaatgtttccgcatcaggaacaatgagaagatgctgagtgacagccacggcgtggagaccatccgggacatcctgccagacaccagccttgggggcccatccttcttcaaaatcatcacggccaaggctgtcctgaagctgcaggccggaaacgccgaggaagccgccctgtggagggatctggtccgcaaagtcctggcatcctacttggagacagccgaggaggcggtgaccctgggcgggagcctggatgaaaactgtcaggaggtgctgaaatttgccacccgggagaatggcttcctgctgcagtacctggtggctatccccatggagaaaggccttgactcccaaggctgcttctgcgcaggctgctcccggcagatcggcttctcctttgtacgacccaagctctgtgccttctctggcctctattactgtgacatctgccaccaagacgatgcctcagtgattccggccaggatcatccacaactgggacctcaccaagcgcccgatctgcaggcaggccctgaagtttctgacacagatccgggcccagcccctcatcaacctgcagatggtgaacgcgtctctgtacgagcatgtggagcggatgcacctcattgggaggagacgggagcagctgaagctcctgggggattacctgggcctgtgccggagtggcgccctgaaggagctcagcaagaggctcaaccacaggaattatctcttggaatctccgcataggttcagtgttgctgacctccaacagatcgcagacggggtgtatgaaggattcctcaaggccctgattgaatttgcctcccagcatgtctaccactgcgacctgtgcacccagcgcggcttcatctgccagatctgccagcaccacgacatcatcttcccctttgagtttgacaccacagtcaggtgtgccgagtgcaagaccgtcttccaccagagctgccaggctgtggtgaagaagggctgcccccgctgtgcccgccggcgcaagtaccaggaacagaacattttcgcctgatgcccatctgctgaccccgctctgaaagccgggggtgagtgtggctcagccatcccggctgggtttgccatcagcccaggatactcaccgtgtcacagctgtgtccccttgtcaggaagaccctcagatgtggccagagcaccggcctcccagagaaagcccaggaagtccccgtggtgtcccctggccctccccccacccctctgctgcaggaggcgtggccaccaccagatgctccctgtctggggcaggcagggccgtttactcactaggccctggctcaccagcgtcccggcgcctccgttagggctgcccaaacactgtggaaaggggacttggggagcattttcaattccacattcctgattaaaaggtctagttttttaa

SEQ ID NO: 166649 - DNA, 2825 bp, Homo sapiens; identical to SEQ ID NO: 166631
  Payload ID: 12807
  Gene Symbol: PLEKHM1
  Gene Name: pleckstrin homology domain containing, family M (with RUN domain) member 1
  ENST ID: ENST00000631629
  CDS Start-End: 173-364

SEQ ID NO: 166650 - DNA, 587 bp, Homo sapiens; identical to SEQ ID NO: 166637
  Payload ID: 12807
  Gene Symbol: PLEKHM1
  Gene Name: pleckstrin homology domain containing, family M (with RUN domain) member 1
  ENST ID: ENST00000632050
  CDS Start-End: 132-587

SEQ ID NO: 166651 - DNA, 603 bp, Homo sapiens; identical to SEQ ID NO: 166632
  Payload ID: 12807
  Gene Symbol: PLEKHM1
  Gene Name: pleckstrin homology domain containing, family M (with RUN domain) member 1
  ENST ID: ENST00000633460
  CDS Start-End: 182-603

SEQ ID NO: 166652 - DNA, 553 bp, Homo sapiens; identical to SEQ ID NO: 166635
  Payload ID: 12807
  Gene Symbol: PLEKHM1
  Gene Name: pleckstrin homology domain containing, family M (with RUN domain) member 1
  ENST ID: ENST00000633998
  CDS Start-End: 132-431

SEQ ID NO: 166653 - DNA, 4995 bp, Homo sapiens; identical to SEQ ID NO: 166634
  Payload ID: 12807
  Gene Symbol: PLEKHM1
  Gene Name: pleckstrin homology domain containing, family M (with RUN domain) member 1
  ENST ID: ENST00000631843
  CDS Start-End: 119-310

SEQ ID NO: 166654 - DNA, 650 bp, Homo sapiens; identical to SEQ ID NO: 166638
  Payload ID: 12807
  Gene Symbol: PLEKHM1
  Gene Name: pleckstrin homology domain containing, family M (with RUN domain) member 1
  ENST ID: ENST00000633029
  CDS Start-End: 1-341

SEQ ID NO: 166655 - DNA, 3292 bp, Homo sapiens; identical to SEQ ID NO: 166633
  Payload ID: 12807
  Gene Symbol: PLEKHM1
  Gene Name: pleckstrin homology domain containing, family M (with RUN domain) member 1
  ENST ID: ENST00000633444
  CDS Start-End: 120-1127

SEQ ID NO: 166656 - DNA, 327 bp, Homo sapiens; identical to SEQ ID NO: 166636
  Payload ID: 12807
  Gene Symbol: PLEKHM1
  Gene Name: pleckstrin homology domain containing, family M (with RUN domain) member 1
  ENST ID: ENST00000633981
  CDS Start-End: 1-138

SEQ ID NO: 166657 - DNA, 4004 bp, Homo sapiens
  Payload ID: 12808
  Gene Symbol: PLEKHM2
  Gene Name: pleckstrin homology domain containing, family M (with RUN domain) member 2
  ENST ID: ENST00000375793
  CDS Start-End: 170-3169
aggcgaggcgagggccgggcggcgggcgccgggccccgcggccggcacgacggagcccccgtacggccggcggcagcggttggcggcggcccccggcccccggcgcgggaagcggcggcggggcggcggcggcggtggcggtggcggtggcggcgacggtggcagcgccatggagccgggggaggtgaaggaccggatcctggagaacatctcgctgtcggtgaagaagttgcagagctattttgctgcatgtgaggatgagatccctgccatccggaaccatgacaaggtcctacagcgtctgtgtgagcacctggaccacgccctgctgtacggactgcaagacctctcctctggctactgggtgctcgtggtgcattttactcggagagaggccatcaagcagatcgaggtgctgcagcacgtggccaccaacctggggcgcagccgtgcctggctgtacctggccctcaacgagaactccttggagagctacctgcggttgttccaggagaacctgggcctgctgcataagtactacgtcaagaatgccctggtctgcagccacgatcacctgacgctcttcctgaccttggtgtccgggctagagttcattcgtttcgagctggatctggatgccccttacctagacctggccccctacatgcccgactactacaaacctcagtacctgctggactttgaagaccgccttcccagctcggtccacggctcagacagtctgtccctcaactctttcaactccgtcacctccaccaacctggagtgggatgacagtgcgattgccccatctagtgaggatggagacctcacagacacggtcagtggtccccgctccacagcctccgacctgaccagcagcaaggcctccaccaggagccccacccagcgccagaaccccttcaacgaggagccggcagagactgtgtcctcctctgacaccacccccgtgcacaccacctctcaggagaaggaggaggcccaggccctggacccgccggatgcctgcacggagctcgaggtcatcagggtcaccaagaagaagaaaattggcaagaagaaaaagagcagatcagatgaggaggcaagtccactccaccccgcctgcagccagaagaaatgtgccaagcagggggacggtgacagccgcaacggcagcccaagccttgggcgggactcgccagacactatgcttgcctccccccaggaggagggagaggggccgagcagcaccacggagagcagcgagcgctccgagccgggcctgctgatccctgagatgaaggacacctccatggagcgcttggggcagcccctgagcaaggttatcgaccagctcaacgggcagctggaccccagcacctggtgctcccgtgctgagcccccagaccagtcctttcggaccggctctcccggggatgccccggagaggccgccgctttgcgactttagtgaggggctttcagccccaatggacttctaccgctttaccgtcgagagtccaagcactgttacatcaggtggcggccaccatgaccctgcagggcttggccaaccgctgcatgttcctagtagccctgaggctgctggccaagaagaagagggaggaggaggagagggacagacgcctcggcccctagaggataccacgagggaggctcaggagctggaggcccagctgtccctggtcagggaggggcctgtgtctgagccagagcctgggacccaggaggttctctgccagctcaagcgagaccagcccagcccgtgtctgagtagcgctgaggattctggggtggatgagggacaggggagcccttcggagatggtccattcctcggagttcagagtagacaacaatcacctgctcctgctcatgatccacgtgttccgagaaaacgaagagcagctgttcaaaatgatccggatgagcaccgggcacatggagggcaacctgcagctgctgtacgtgctgctcacagactgctatgtctacctgctccggaaaggggccacagagaagccatacctggtggaagaggccgtttcttacaatgaacttgactatgtgtcggttggccttgaccagcagacggtgaagctggtgtgcaccaaccgcaggaagcagtttctgctggacacggctgatgtggcgctggctgagttctttttggcttctttgaagtcagccatgatcaaaggctgtcgagaacctccctaccccagcatcctgacggatgccaccatggagaagctggcactggccaaatttgtggcccaagaatcgaagtgtgaggcatctgctgtcaccgtgcgcttctacggccttgtgcactgggaggaccccacagacgagtccctgggccccacgccctgccactgctcaccccccgagggcaccatcaccaaagaaggcatgctgcactacaaggcgggcacctcctacctgggcaaggaacactggaagacgtgcttcgtggtgctcagcaacgggatcctctaccagtacccggaccgcaccgacgtcatccctctgctctcggtgaacatggggggggagcagtgcggtggctgccggagagccaacaccacggatcggccccacgccttccaggtcattctctccgaccggccctgcctggagctaagtgccgagagcgaggccgagatggccgagtggatgcagcatctctgccaggctgtgtccaaaggggtcatcccccagggcgtagctcccagcccctgcataccctgctgcctggtcctcacggatgaccgcctctttacgtgccatgaggattgccagaccagcttcttccgctctttgggcacagccaagctgggcgacatcagcgccgtctccaccgagccgggcaaggagtactgcgtcttggagttctcccaggacagccagcagctcctcccgccctgggtcatctacctgagctgcacttctgaactggaccgattgctgtctgcactgaactctgggtggaaaaccatctatcaggtggacctcccccacacggcgatccaggaagcctccaacaagaagaaattcgaggatgccttgagcctcatccacagcgcctggcagcggagcgacagtctctgccgcggccgagcctcccgagacccctggtgctgaggcagagctggttggcgtccctggtgggcaggaaaggaaggcacgccagccggcaggcacactgtcacggctgttgtcatgctgtcgggagcctacagtccacccctgccctgggcggcagaaccaccgagtgtggcttaagacagggtccctccactccagggatccagatcaggtgcccggcacccctgggcatcctgcccgacaggtagcgaatggaggtcgctgggggcagagggtccgagccctgtgggctctgcggatgcacgccctcctcccgggcctccgcctcagtctgcagaatttctgccgagtggcaccgagaacaccatccatctaaggacgaacaaaagaaccaggagggcgggacccccctcttcctctcctgggttgggggctggggccctgagtgcccagccatccttgttcgtgtttgaacactctcctggccacgtggggaagcgggaacacggggtgtctgcgcatgtttcctcctcctagctccatcactgcgcacacagctgcctgcctcgccagatgcaggggggcgggcagccctccctggctgccaggaggctctgcatgcccacagtcctgccctgcctgtcccctcaacccggcagtgcctgtagcaccgaggagcaaagggggtggatggggggcttggagaagggcggagcccaccagcctggcatccatgttgacatcttctgactgtcccctgcttggctggagccaggcccttccctagagtttcgtcaagagcctcctggggaaggggtcaggtggtttgggttttgttttttaaaataaaatagacatgttatattgccaa

SEQ ID NO: 166658 - DNA, 4122 bp, Homo sapiens
  Payload ID: 12808
  Gene Symbol: PLEKHM2
  Gene Name: pleckstrin homology domain containing, family M (with RUN domain) member 2
  Uniprot ID: Q8IWE5
  ENST ID: ENST00000375799
  CDS Start-End: 228-3287
gcctccttccccgccggccgcgctccggagcctccgggccgcggtggagcgagggcccaggcgaggcgagggccgggcggcgggcgccgggccccgcggccggcacgacggagcccccgtacggccggcggcagcggttggcggcggcccccggcccccggcgcgggaagcggcggcggggcggcggcggcggtggcggtggcggtggcggcgacggtggcagcgccatggagccgggggaggtgaaggaccggatcctggagaacatctcgctgtcggtgaagaagttgcagagctattttgctgcatgtgaggatgagatccctgccatccggaaccatgacaaggtcctacagcgtctgtgtgagcacctggaccacgccctgctgtacggactgcaagacctctcctctggctactgggtgctcgtggtgcattttactcggagagaggccatcaagcagatcgaggtgctgcagcacgtggccaccaacctggggcgcagccgtgcctggctgtacctggccctcaacgagaactccttggagagctacctgcggttgttccaggagaacctgggcctgctgcataagtactacgtcaagaatgccctggtctgcagccacgatcacctgacgctcttcctgaccttggtgtccgggctagagttcattcgtttcgagctggatctggatgccccttacctagacctggccccctacatgcccgactactacaaacctcagtacctgctggactttgaagaccgccttcccagctcggtccacggctcagacagtctgtccctcaactctttcaactccgtcacctccaccaacctggagtgggatgacagtgcgattgccccatctagtgaggattatgattttggagatgtgtttccagcagtgccgtctgtacccagcacagactgggaagatggagacctcacagacacggtcagtggtccccgctccacagcctccgacctgaccagcagcaaggcctccaccaggagccccacccagcgccagaaccccttcaacgaggagccggcagagactgtgtcctcctctgacaccacccccgtgcacaccacctctcaggagaaggaggaggcccaggccctggacccgccggatgcctgcacggagctcgaggtcatcagggtcaccaagaagaagaaaattggcaagaagaaaaagagcagatcagatgaggaggcaagtccactccaccccgcctgcagccagaagaaatgtgccaagcagggggacggtgacagccgcaacggcagcccaagccttgggcgggactcgccagacactatgcttgcctccccccaggaggagggagaggggccgagcagcaccacggagagcagcgagcgctccgagccgggcctgctgatccctgagatgaaggacacctccatggagcgcttggggcagcccctgagcaaggttatcgaccagctcaacgggcagctggaccccagcacctggtgctcccgtgctgagcccccagaccagtcctttcggaccggctctcccggggatgccccggagaggccgccgctttgcgactttagtgaggggctttcagccccaatggacttctaccgctttaccgtcgagagtccaagcactgttacatcaggtggcggccaccatgaccctgcagggcttggccaaccgctgcatgttcctagtagccctgaggctgctggccaagaagaagagggaggaggaggagagggacagacgcctcggcccctagaggataccacgagggaggctcaggagctggaggcccagctgtccctggtcagggaggggcctgtgtctgagccagagcctgggacccaggaggttctctgccagctcaagcgagaccagcccagcccgtgtctgagtagcgctgaggattctggggtggatgagggacaggggagcccttcggagatggtccattcctcggagttcagagtagacaacaatcacctgctcctgctcatgatccacgtgttccgagaaaacgaagagcagctgttcaaaatgatccggatgagcaccgggcacatggagggcaacctgcagctgctgtacgtgctgctcacagactgctatgtctacctgctccggaaaggggccacagagaagccatacctggtggaagaggccgtttcttacaatgaacttgactatgtgtcggttggccttgaccagcagacggtgaagctggtgtgcaccaaccgcaggaagcagtttctgctggacacggctgatgtggcgctggctgagttctttttggcttctttgaagtcagccatgatcaaaggctgtcgagaacctccctaccccagcatcctgacggatgccaccatggagaagctggcactggccaaatttgtggcccaagaatcgaagtgtgaggcatctgctgtcaccgtgcgcttctacggccttgtgcactgggaggaccccacagacgagtccctgggccccacgccctgccactgctcaccccccgagggcaccatcaccaaagaaggcatgctgcactacaaggcgggcacctcctacctgggcaaggaacactggaagacgtgcttcgtggtgctcagcaacgggatcctctaccagtacccggaccgcaccgacgtcatccctctgctctcggtgaacatggggggggagcagtgcggtggctgccggagagccaacaccacggatcggccccacgccttccaggtcattctctccgaccggccctgcctggagctaagtgccgagagcgaggccgagatggccgagtggatgcagcatctctgccaggctgtgtccaaaggggtcatcccccagggcgtagctcccagcccctgcataccctgctgcctggtcctcacggatgaccgcctctttacgtgccatgaggattgccagaccagcttcttccgctctttgggcacagccaagctgggcgacatcagcgccgtctccaccgagccgggcaaggagtactgcgtcttggagttctcccaggacagccagcagctcctcccgccctgggtcatctacctgagctgcacttctgaactggaccgattgctgtctgcactgaactctgggtggaaaaccatctatcaggtggacctcccccacacggcgatccaggaagcctccaacaagaagaaattcgaggatgccttgagcctcatccacagcgcctggcagcggagcgacagtctctgccgcggccgagcctcccgagacccctggtgctgaggcagagctggttggcgtccctggtgggcaggaaaggaaggcacgccagccggcaggcacactgtcacggctgttgtcatgctgtcgggagcctacagtccacccctgccctgggcggcagaaccaccgagtgtggcttaagacagggtccctccactccagggatccagatcaggtgcccggcacccctgggcatcctgcccgacaggtagcgaatggaggtcgctgggggcagagggtccgagccctgtgggctctgcggatgcacgccctcctcccgggcctccgcctcagtctgcagaatttctgccgagtggcaccgagaacaccatccatctaaggacgaacaaaagaaccaggagggcgggacccccctcttcctctcctgggttgggggctggggccctgagtgcccagccatccttgttcgtgtttgaacactctcctggccacgtggggaagcgggaacacggggtgtctgcgcatgtttcctcctcctagctccatcactgcgcacacagctgcctgcctcgccagatgcaggggggcgggcagccctccctggctgccaggaggctctgcatgcccacagtcctgccctgcctgtcccctcaacccggcagtgcctgtagcaccgaggagcaaagggggtggatggggggcttggagaagggcggagcccaccagcctggcatccatgttgacatcttctgactgtcccctgcttggctggagccaggcccttccctagagtttcgtcaagagcctcctggggaaggggtcaggtggtttgggttttgttttttaaaataaaatagacatgttatattgccaa

SEQ ID NO: 166659 - DNA, 1915 bp, Homo sapiens
  Payload ID: 12809
  Gene Symbol: PLEKHM3
  Gene Name: pleckstrin homology domain containing, family M, member 3
  ENST ID: ENST00000447645
  CDS Start-End: 1-1408
gaatcaaaacctttatgccacgtaccagctttcacacttccagagcatatctgttttaggcaacctggaggccaggatggtggatactgttttgtatgacaacactcagctacagctaaaggcagagtcaccatgggaggctttggactggggacagaagctttgggaagtagtgcatgctgctgtgcccggttacatggggcggcagaatgagctgacaatctcaccagggcttggccatcatgatgactatacacagaatcatagtttccagaagaaaaccagtgggctgctgccaccgtcccctgtcctggacagctccaaacagtaccaaaacatcctcaaatcagggactctctacaggctgactgtccaaaacaactggaaggcatttacatttgtgctgagcagggcttaccttatggcttttcagcctggcaagctagacgaggatccactgttgagctacaacgtggacgtgtgtctggctgtccagatggacaacctggatggctgcgactcttgctttcaagtcattttcccccaggatgtccttcgcctccgagctgagacccgacagagggctcaggaatggatggaggctctgaagatagctgccaatgtggcgaggagttcagagcaaaacctgcaagtcacactgaggaacaaacccaaggatcaaatgggtgggcatgaactcaggaagaacaaacgccaatctgtgactaccagcttcctgagcattttgacgactttgtctttggaacgaggactcactgctcagagtttcaaatgtgcaggctgccagcgatccataggtctttccaatgggaaagccaaggtgtgcaactacagtgggtggtattactgcagtagctgccacgtggatgacagctttctcattccagcacgcatagtccacaactgggatacttcaaagtataaggtgtcgaagcaggccaaggagtttctggagtacgtgtacgaagagccgctcatcgacatccagcaggagaacgccatgctgtaccaccacgcagagccgctggccgccgtgctgcggctgcggcagcggctgaagtcgctccgagcctatttgttcagctgccgggcagcggtggcagaggatctccgccgcagaattttccccagagaatacctccttcaacagatccacctgtattcacttgccgacctgcagcaggtaatagagggaaagctggctccattcttgggcaaggtcattaaatttgccacctcacacgtgtacagctgcagtctttgtagccagaaggggttcatctgtgaaatctgtaacaatggagagatcctctacccttttgaggatatttcaacaagcagattcggagacccatatgcagatttattacaaggatatgtggcctgatgctgagatggagtttcactcttgttggccaggctggggtgcaatggcgcgacctcagctcactgcaacctctgcctcctgggttcaagcgattctcctgtctcagcctccggtgtatctgggattacaggcacccaccaccatgccccactagtttttttgtgtttttagtagagactgggtttcatcatgttggccaggctggtgtcaaactcctaacctcaggtgatcctcccccgcctcggcctcccagagtgctgggattacaggcgtgagccactgcacccagcctcaaacacaaattaaatacatacctctctttaacctaaatagaaaaaccgtaaagcccagattgcaagatttttaaatacaataagaatatcctgaattataaaactgctttgctaaagcctaatccaggatttatcctcctagaggactacaaggaaagcacagccttgggagagataaacattttgacaaaacaatgataaaattccacatcct

SEQ ID NO: 166660 - DNA, 3689 bp, Homo sapiens
  Payload ID: 12809
  Gene Symbol: PLEKHM3
  Gene Name: pleckstrin homology domain containing, family M, member 3
  ENST ID: ENST00000457206
  CDS Start-End: 429-2447
gcccgggcgggctgtcaccgtgaggcgggcggcaggctgcgggagtcaagcccctccaggagcggactgaaggccccgcaggtgaatggagagtagcagccggggcccaggaaatcaaggattggcgtggcattgctttgacaagtacttgctgttgtcttcacagaggtctcactgaagaataatctcaaaggaacatttggtctccctatacatctgttaatgcccattagccactagcaaatgcttttaattaccaggaaaacatcaaccactttgggtttggcctgctccagggagcccaatgaaggtttcttccagttgtttccatagctctattgctgaagcacccctcttggttgggtgaatgttcatgaagccatttctggaaccagcttaggaggctaaggcctcctggagcctgtgacatggaagctttggaagtggatgatatcagcccagccttagaagttacggaggaattctttagtactttggatagtaatctagaaaaggctgtgcagcaggcagaggtttatgggatccaggaagtccctgaactggtggggcatgaggtactcagtaacataacagacaatggtgctatgagaaatgtcacctccctgggcaaggggggcatgatttgggaccactgtaagagcaggctcttagaaaccaaagctcaaaatgtcttccctgccaaagaacagtttatggtccagagagggacaaccccagataatctttcctggatggaacaaaaggaagcatcaacctttaatttcttcaatatctgtcagcgtcggagggaccggcctcgttctgtaaatgacttactggatgagacctcaactttcaagccagggcatgctcgatcacgatcagatattacccaagtggactggagggtagtcctcaaaaccacgcctttgcagcagcagcaacagcagcagccattgcttcaaggcccgcatgtcaccaggccatcttttctgttgccctcaccaaataagatagaagatgctcaaggaaatactgaacacaagcagacattcccaaacattctaaagaagggttacctggagattagaaaggaccatgacagttactggcaaagctgttatgcagaactttcaccttacaacttatacttctacagcctcgacagcagtgggaatcaaaacctttatgccacgtaccagctttcacacttccagagcatatctgttttaggcaacctggaggccaggatggtggatactgttttgtatgacaacactcagctacagctaaaggcagagtcaccatgggaggctttggactggggacagaagctttgggaagtagtgcatgctgctgtgcccggttacatggggcggcagaatgagctgacaatctcaccagggcttggccatcatgatgactatacacagaatcatagtttccagaagaaaaccagtgggctgctgccaccgtcccctgtcctggacagctccaaacagtaccaaaacatcctcaaatcagggactctctacaggctgactgtccaaaacaactggaaggcatttacatttgtgctgagcagggcttaccttatggcttttcagcctggcaagctagacgaggatccactgttgagctacaacgtggacgtgtgtctggctgtccagatggacaacctggatggctgcgactcttgctttcaagtcattttcccccaggatgtccttcgcctccgagctgagacccgacagagggctcaggaatggatggaggctctgaagatagctgccaatgtggcgaggagttcagagcaaaacctgcaagtcacactgaggaacaaacccaaggatcaaatgggtgggcatgaactcaggaagaacaaacgccaatctgtgactaccagcttcctgagcattttgacgactttgtctttggaacgaggactcactgctcagagtttcaaatgtgcaggctgccagcgatccataggtctttccaatgggaaagccaaggtgtgcaactacagtgggtggtattactgcagtagctgccacgtggatgacagctttctcattccagcacgcatagtccacaactgggatacttcaaagtataaggtgtcgaagcaggccaaggagtttctggagtacgtgtacgaagagccgctcatcgacatccagcaggagaacgccatgctgtaccaccacgcagagccgctggccgccgtgctgcggctgcggcagcggctgaagtcgctccgagcctatttgttcagctgccgggcagcggtggcagaggatctccgccgcagaaatgaccagcagcatgcattagtcatgttaaatgtttttggagaattttccccagagaatacctccttcaacagatccacctgtattcacttgccgacctgcagcagacccaggcactacagccaaatctaacctgatccacagatgattgaaggatcgggggagctcggcacgggatgtggcagcaaatgtgcggcactaaggacaaagtcactgccttttgtggaagccagatcagaaagatgactgtgtgttgtgagtggtggatagagagccctgttgcccaggtgagaaggagctcagttgagataaggattccaggagccaactcgagcccctcaggtagagacaacaataccggttgaggctgcagctgtggagttggatggtgtttagtcagtgctgaaatcactttcctgggagtcccttggcatgcagtcatctgagtgctgttgttgttgttgggtttttgttgtttcctattttaaaagagtaatcataatactgacgaagtgagggcctgttttcaaagaacatttacttaaagatatagagtaaggttagcatcggtcttgccagtggtagaaacctatgccaccaacagccatcatgaaagggccccaggagtctttctggttcttcatttctattcagtttgattcaacaagtgtgtattgattgaatgctttctgtgtgccaatcattgagctagccacagaggaggcaaaggtgattaagccacaattccttccctcactgagctcacagtctgatgagagaggcagataggcattgttgaagtcagcggagttgaacctagggtacttggggaatacatctgaccaagtgtgtggcagattgtattttgcaaaaatagctgcaacagtatcttccatcccacatgtctttcttacactgtgactttgatgctcctcctattcagtagtgagatctgtgttccttctccccgaatttgggcaggtctgtgactatggaagtgatgccatgtgatttccaaagccaagtcataaaaggtgatatagctccaacctggtgctgtctggagatgctcactcatggcaacccagtggccatgttgtaaggaagtccagattagccctcatagaacaaccacatgaacaggcctcatatggtagttgttctagctggcagcgatcatcagccaccagagagatgagtgaagacagccccacatgattccagctgctagccttcaagtcttctcacctaggctagagatgaggctgcagatattatggagcagaaacaaaccatctccacagtgtccttcctggagtcctgaccgaccgacaaaatgtgtgagcccataataaaatggttgttttgcaccac

SEQ ID NO: 166661 - DNA, 2792 bp, Homo sapiens
  Payload ID: 12809
  Gene Symbol: PLEKHM3
  Gene Name: pleckstrin homology domain containing, family M, member 3
  Uniprot ID: Q6ZWE6
  ENST ID: ENST00000427836
  CDS Start-End: 491-2776
agcatttcagagtgggaccgcgagaagccgcttgtaaacagagccgggccgggatggtcagcgcccgggcgggctgtcaccgtgaggcgggcggcaggctgcgggagtcaagcccctccaggagcggactgaaggccccgcaggtgaatggagagtagcagccggggcccaggaaatcaaggattggcgtggcattgctttgacaagtacttgctgttgtcttcacagaggtctcactgaagaataatctcaaaggaacatttggtctccctatacatctgttaatgcccattagccactagcaaatgcttttaattaccaggaaaacatcaaccactttgggtttggcctgctccagggagcccaatgaaggtttcttccagttgtttccatagctctattgctgaagcacccctcttggttgggtgaatgttcatgaagccatttctggaaccagcttaggaggctaaggcctcctggagcctgtgacatggaagctttggaagtggatgatatcagcccagccttagaagttacggaggaattctttagtactttggatagtaatctagaaaaggctgtgcagcaggcagaggtttatgggatccaggaagtccctgaactggtggggcatgaggtactcagtaacataacagacaatggtgctatgagaaatgtcacctccctgggcaaggggggcatgatttgggaccactgtaagagcaggctcttagaaaccaaagctcaaaatgtcttccctgccaaagaacagtttatggtccagagagggacaaccccagataatctttcctggatggaacaaaaggaagcatcaacctttaatttcttcaatatctgtcagcgtcggagggaccggcctcgttctgtaaatgacttactggatgagacctcaactttcaagccagggcatgctcgatcacgatcagatattacccaagtggactggagggtagtcctcaaaaccacgcctttgcagcagcagcaacagcagcagccattgcttcaaggcccgcatgtcaccaggccatcttttctgttgccctcaccaaataagatagaagatgctcaaggaaatactgaacacaagcagacattcccaaacattctaaagaagggttacctggagattagaaaggaccatgacagttactggcaaagctgttatgcagaactttcaccttacaacttatacttctacagcctcgacagcagtgggaatcaaaacctttatgccacgtaccagctttcacacttccagagcatatctgttttaggcaacctggaggccaggatggtggatactgttttgtatgacaacactcagctacagctaaaggcagagtcaccatgggaggctttggactggggacagaagctttgggaagtagtgcatgctgctgtgcccggttacatggggcggcagaatgagctgacaatctcaccagggcttggccatcatgatgactatacacagaatcatagtttccagaagaaaaccagtgggctgctgccaccgtcccctgtcctggacagctccaaacagtaccaaaacatcctcaaatcagggactctctacaggctgactgtccaaaacaactggaaggcatttacatttgtgctgagcagggcttaccttatggcttttcagcctggcaagctagacgaggatccactgttgagctacaacgtggacgtgtgtctggctgtccagatggacaacctggatggctgcgactcttgctttcaagtcattttcccccaggatgtccttcgcctccgagctgagacccgacagagggctcaggaatggatggaggctctgaagatagctgccaatgtggcgaggagttcagagcaaaacctgcaagtcacactgaggaacaaacccaaggatcaaatgggtgggcatgaactcaggaagaacaaacgccaatctgtgactaccagcttcctgagcattttgacgactttgtctttggaacgaggactcactgctcagagtttcaaatgtgcaggctgccagcgatccataggtctttccaatgggaaagccaaggtgtgcaactacagtgggtggtattactgcagtagctgccacgtggatgacagctttctcattccagcacgcatagtccacaactgggatacttcaaagtataaggtgtcgaagcaggccaaggagtttctggagtacgtgtacgaagagccgctcatcgacatccagcaggagaacgccatgctgtaccaccacgcagagccgctggccgccgtgctgcggctgcggcagcggctgaagtcgctccgagcctatttgttcagctgccgggcagcggtggcagaggatctccgccgcagaattttccccagagaatacctccttcaacagatccacctgtattcacttgccgacctgcagcaggtaatagagggaaagctggctccattcttgggcaaggtcattaaatttgccacctcacacgtgtacagctgcagtctttgtagccagaaggggttcatctgtgaaatctgtaacaatggagagatcctctacccttttgaggatatttcaacaagcaggtgtgaaagctgtggagccgttttccattctgaatgcaaagaaaagtctgtcccctgcccgaggtgtgttcgccgagagctgcagaagaagcagaagtctttctggcagagactgaacatggacgagagtctagaggaggcttgcaccatgttcgagctgtcctaccagaacacctgactccagccgacccgaa

SEQ ID NO: 166662 - DNA, 2194 bp, Homo sapiens
  Payload ID: 12810
  Gene Symbol: PLEKHN1
  Gene Name: pleckstrin homology domain containing, family N member 1
  Uniprot ID: Q494U1
  ENST ID: ENST00000379407
  CDS Start-End: 31-1761
ccagacttgccgacctgtacgactctggccatggggaacagccactgtgtccctcaggcccccaggaggctccgggcctccttctccagaaagccctcgctgaagggaaacagagaggacagcgcgcggatgtcggccggcctgccgggccccgaggctgctcgaagcggggacgccgccgccaacaagctcttccactacatcccgggcacggacatcctggacctggagaaccagcgagaaaacctggagcagccattcctgagtgtgttcaagaaggggcggcggagggtgcctgtgaggaacctgggaaaagttgtgcattacgccaaggtccagctgcggttccagcacagccaggatgtcagcgactgctacctggagctattccccgcccacctgtacttccaggcccacggctcggaaggactcacatttcaggggctgttaccgctgacggagctgagtgtctgcccgctcgaggggtcccgagagcacgccttccagatcacaggcccactgcccgcacccctcctggtgctctgccccagccgggccgagctggaccgctggctttaccacctggagaagcagacggccctcctcggggggccgcggcgctgccactcggcacccccacaggggtcctgcggagacgaactcccctggactttgcagcgccgtctaacccggctgcggacggcgtcagggcacgaacccggcggcagtgctgtctgtgcctcgagggtcaagctgcagcacctgcccgcacaggagcagtgggaccggctcttggtcctgtacccaacgtccttggccattttctccgaggagctggacgggctttgcttcaagggggagctcccactccgtgccgtccacatcaacctggaggagaaggagaagcagatccgctccttcctgattgaaggccccctcatcaacaccatccgcgtggtgtgcgccagctacgaggactacggtcactggctgctgtgccttcgcgctgtcacccacagggagggggccccgccgctgcctggtgccgagagcttcccagggtcgcaggttatgggcagtggccgaggctcactctcctcaggcggacagaccagctgggactcggggtgcttggcgcccccctccacccgcaccagccactccctgcctgagtcctcagtgccatccaccgtgggctgctcctcccagcacacaccgctgcacaggctgagcctggagagcagcccagatgcccctgaccacacttcggaaacatcacactcgcccctctatgccgacccctacacaccacccgccacctcccaccgcagggtcacagatgtccggggcctggaggagttcctcagtgccatgcagagtgcacgtggacccacgccctcgagcccactcccctcggtgcctgtgtctgtgcctgcctctgaccctcgctcctgctcctccggccccgctggcccctacttgctctccaagaagggagccctgcagtccagagccgctcagagacaccggggctcagccaaggatggggggccgcagcccccagacgcccctcagcttgtctcctctgccagggaaggttcgcccgaaccctggctgcctctgacagatggtcggtcccccaggaggagccgggaccccggctacgaccacctctgggacgagactttgtcttcctcccaccagaagtgcccccagcttggagggcctgaggccagtggggggcttgtgcagtggatctgatggccgcggtgaggtgggttctcaggaccaccctcgccaagctccagggtacctgcccctctaacccacttcaaattacaagtcagggtctgaacccagtgtgatggggggagtctctggggccctgagttcagagcccgtccctcagctcctgttccttggtgccagcagctggggcagggaagggtgggaggggccccatccaaaggatgccctggccagcgaggctgggtcacaggtcagggaggtcctggccgtccacagggtcggccctcagctcagcccgccaggagtcagggaggagactcgctgggagtgggagggcagcacgggcgtgaaggtcggaggacagagaaaggtcagcagggtcagagtatgtgaggtcagagggcatgagggtcacaggtcagcaaggtgtgaggagcacaagcca

SEQ ID NO: 166663 - DNA, 2455 bp, Homo sapiens
  Payload ID: 12810
  Gene Symbol: PLEKHN1
  Gene Name: pleckstrin homology domain containing, family N member 1
  Uniprot ID: Q494U1
  ENST ID: ENST00000379409
  CDS Start-End: 31-2022
ccagacttgccgacctgtacgactctggccatggggaacagccactgtgtccctcaggcccccaggaggctccgggcctccttctccagaaagccctcgctgaagggaaacagagaggacagcgcgcggatgtcggccggcctgccgggccccgaggctgctcgaagcggggacgccgccgccaacaagctcttccactacatcccgggcacggacatcctggacctggagaaccagcgagaaaacctggagcagccattcctgagtgtgttcaagaaggggcggcggagggtgcctgtgaggaacctgggaaaagttgtgcattacgccaaggtccagctgcggttccagcacagccaggatgtcagcgactgctacctggagctattccccgcccacctgtacttccaggcccacggctcggaaggactcacatttcaggggctgttaccgctgacggagctgagtgtctgcccgctcgaggggtcccgagagcacgccttccagatcacaggtgtttgggatgcttcccgggcccccagaggcactcctgacccaggacttggagaggggcctgccctgtggctgcggagcacgtgtgtgtatgtgtgtgccctctctgccctgcccgcaggcccactgcccgcacccctcctggtgctctgccccagccgggccgagctggaccgctggctttaccacctggagaagcagacggccctcctcggggggccgcggcgctgccactcggcacccccacaggggtcctgcggagacgaactcccctggactttgcagcgccgtctaacccggctgcggacggcgtcagggcacgaacccggcggcagtgctgtctgtgcctcgagggtcaagctgcagcacctgcccgcacaggagcagtgggaccggctcttggtcctgtacccaacgtccttggccattttctccgaggagctggacgggctttgcttcaagggggagctcccactccgtgccgtccacatcaacctggaggagaaggagaagcagatccgctccttcctgattgaaggccccctcatcaacaccatccgcgtggtgtgcgccagctacgaggactacggtcactggctgctgtgccttcgcgctgtcacccacagggagggggccccgccgctgcctggtgccgagagcttcccagggtcgcaggttatgggcagtggccgaggctcactctcctcaggcggacagaccagctgggactcggggtgcttggcgcccccctccacccgcaccagccactccctgcctgagtcctcagtgccatccaccgtgggctgctcctcccagcacacaccggaccaggccaactctgaccgtgccagcattggccgacggaggaccgagctgagacgcagtggcagcagccggtcacccgggagcaaggcccgggcagagggccgcggccctgtcaccccactgcacctggacctgacccagctgcacaggctgagcctggagagcagcccagatgcccctgaccacacttcggaaacatcacactcgcccctctatgccgacccctacacaccacccgccacctcccaccgcagggtcacagatgtccggggcctggaggagttcctcagtgccatgcagagtgcacgtggacccacgccctcgagcccactcccctcggtgcctgtgtctgtgcctgcctctgaccctcgctcctgctcctccggccccgctggcccctacttgctctccaagaagggagccctgcagtccagagccgctcagagacaccggggctcagccaaggatggggggccgcagcccccagacgcccctcagcttgtctcctctgccagggaaggttcgcccgaaccctggctgcctctgacagatggtcggtcccccaggaggagccgggaccccggctacgaccacctctgggacgagactttgtcttcctcccaccagaagtgcccccagcttggagggcctgaggccagtggggggcttgtgcagtggatctgatggccgcggtgaggtgggttctcaggaccaccctcgccaagctccagggtacctgcccctctaacccacttcaaattacaagtcagggtctgaacccagtgtgatggggggagtctctggggccctgagttcagagcccgtccctcagctcctgttccttggtgccagcagctggggcagggaagggtgggaggggccccatccaaaggatgccctggccagcgaggctgggtcacaggtcagggaggtcctggccgtccacagggtcggccctcagctcagcccgccaggagtcagggaggagactcgctgggagtgggagggcagcacgggcgtgaaggtcggaggacagagaaaggtcagcagggtcagagtatgtgaggtcagagggcatgagggtcacaggtcagcaaggtgtgaggagcacaagcca

SEQ ID NO: 166664 - DNA, 2404 bp, Homo sapiens
  Payload ID: 12810
  Gene Symbol: PLEKHN1
  Gene Name: pleckstrin homology domain containing, family N member 1
  Uniprot ID: Q494U1
  ENST ID: ENST00000379410
  CDS Start-End: 36-1871
gggacccagacttgccgacctgtacgactctggccatggggaacagccactgtgtccctcaggcccccaggaggctccgggcctccttctccagaaagccctcgctgaagggaaacagagaggacagcgcgcggatgtcggccggcctgccgggccccgaggctgctcgaagcggggacgccgccgccaacaagctcttccactacatcccgggcacggacatcctggacctggagaaccagcgagaaaacctggagcagccattcctgagtgtgttcaagaaggggcggcggagggtgcctgtgaggaacctgggaaaagttgtgcattacgccaaggtccagctgcggttccagcacagccaggatgtcagcgactgctacctggagctattccccgcccacctgtacttccaggcccacggctcggaaggactcacatttcaggggctgttaccgctgacggagctgagtgtctgcccgctcgaggggtcccgagagcacgccttccagatcacaggcccactgcccgcacccctcctggtgctctgccccagccgggccgagctggaccgctggctttaccacctggagaagcagacggccctcctcggggggccgcggcgctgccactcggcacccccacagcgccgtctaacccggctgcggacggcgtcagggcacgaacccggcggcagtgctgtctgtgcctcgagggtcaagctgcagcacctgcccgcacaggagcagtgggaccggctcttggtcctgtacccaacgtccttggccattttctccgaggagctggacgggctttgcttcaagggggagctcccactccgtgccgtccacatcaacctggaggagaaggagaagcagatccgctccttcctgattgaaggccccctcatcaacaccatccgcgtggtgtgcgccagctacgaggactacggtcactggctgctgtgccttcgcgctgtcacccacagggagggggccccgccgctgcctggtgccgagagcttcccagggtcgcaggttatgggcagtggccgaggctcactctcctcaggcggacagaccagctgggactcggggtgcttggcgcccccctccacccgcaccagccactccctgcctgagtcctcagtgccatccaccgtgggctgctcctcccagcacacaccggaccaggccaactctgaccgtgccagcattggccgacggaggaccgagctgagacgcagtggcagcagccggtcacccgggagcaaggcccgggcagagggccgcggccctgtcaccccactgcacctggacctgacccagctgcacaggctgagcctggagagcagcccagatgcccctgaccacacttcggaaacatcacactcgcccctctatgccgacccctacacaccacccgccacctcccaccgcagggtcacagatgtccggggcctggaggagttcctcagtgccatgcagagtgcacgtggacccacgccctcgagcccactcccctcggtgcctgtgtctgtgcctgcctctgaccctcgctcctgctcctccggccccgctggcccctacttgctctccaagaagggagccctgcagtccagagccgctcagagacaccggggctcagccaaggatggggggccgcagcccccagacgcccctcagcttgtctcctctgccagggaaggttcgcccgaaccctggctgcctctgacagatggtcggtcccccaggaggagccgggaccccggctacgaccacctctgggacgagactttgtcttcctcccaccagaagtgcccccagcttggagggcctgaggccagtggggggcttgtgcagtggatctgatggccgcggtgaggtgggttctcaggaccaccctcgccaagctccagggtacctgcccctctaacccacttcaaattacaagtcagggtctgaacccagtgtgatggggggagtctctggggccctgagttcagagcccgtccctcagctcctgttccttggtgccagcagctggggcagggaagggtgggaggggccccatccaaaggatgccctggccagcgaggctgggtcacaggtcagggaggtcctggccgtccacagggtcggccctcagctcagcccgccaggagtcagggaggagactcgctgggagtgggagggcagcacgggcgtgaaggtcggaggacagagaaaggtcagcagggtcagagtatgtgaggtcagagggcatgagggtcacaggtcagcaaggtgtgaggagcacaagccagggtgccccgaggaggagggtgggtgggtccttgtgtggcctggcgcgcaccacagggcagcacgggagacgttgacaccaccggacgagaaagaaaaaa

SEQ ID NO: 166665 - DNA, 698 bp, Homo sapiens
  Payload ID: 12810
  Gene Symbol: PLEKHN1
  Gene Name: pleckstrin homology domain containing, family N member 1
  ENST ID: ENST00000491024
  CDS Start-End: 1-531
agcctggagagcagcccagatgcccctgaccacacttcggaaacatcacactcgcccctctatgccgacccctacacaccacccgccacctcccaccgcagggtcacagatgtccggggcctggaggagttcctcagtgccatgcagagtgcacgtggacccacgccctcgagcccactcccctcggtgcctgtgtctgtgcctgcctctgaccctcgctcctgctcctccggccccgctggcccctacttgctctccaagaagggagccctgcagtccagagccgctcagagacaccggggctcagccaaggatggggggccgcagcccccagacgcccctcagcttgtctcctctgccagggaaggttcgcccgaaccctggctgcctctgacagatggtcggtcccccaggaggagccgggaccccggctacgaccacctctgggacgagactttgtcttcctcccaccagaagtgcccccagcttggagggcctgaggccagtggggggcttgtgcagtggatctgatggccgcggtgagagctccagccggagtgtcttgctgctcagacccctccgaggtccaagtcctgtcctgccactcagctccccctgcaccccagaagaaacgcagggtgcggttgcatttgatttcagataaacaacaacttcttagtaaaatgacctccccacta

SEQ ID NO: 166666 - DNA, 2050 bp, Homo sapiens
  Payload ID: 12811
  Gene Symbol: PLEKHO1
  Gene Name: pleckstrin homology domain containing, family O member 1
  Uniprot ID: Q53GL0
  ENST ID: ENST00000369124
  CDS Start-End: 279-1508
ggggacccgggccgcgtgggcgccgggatggagggcgccaaggggcggggagcgggcgtgcgtgtgtgtgcgagtgcgaatgcgagggaggccggccttgagtgaaaccggagctacaaagaaggggagagtccgggagcgggagggcgcgagggaggagcggcggcgccggggcagctccgacgccctcccgcggggaaggagcccccgcggtgccgccgaggccccgacgcggggccgcccctcggctcgccgccccgcgcccgcgcccgctgggaatgatgaagaagaacaattccgccaagcggggacctcaggatggaaaccagcagcctgcaccgcccgagaaggtcggctgggtccggaaattctgcgggaaagggattttcagggagatttggaaaaaccgctatgtggtgctgaaaggggaccagctctacatctctgagaaggaggtaaaagatgagaaaaatattcaagaggtatttgacctgagtgactatgagaagtgtgaagagctccggaagtccaagagcaggagcaagaaaaatcatagcaagtttactcttgcccactccaaacagcccggtaacacggcacccaacctgatcttcctggcagtgagtccagaagagaaggaatcgtggatcaatgccctcaactctgccatcacccgagccaagaaccgtatcttggatgaggtcaccgttgaggaggacagctatcttgcccatcccactcgagacagggcaaaaatccagcactcccgccgccccccaacaaggggacacctaatggctgtggcttccacctctacctcggatgggatgctgaccttggacttgatccaagaggaagacccttcccctgaggaaccaacctcttgtgctgagagctttcgggttgacctggacaagtctgtggcccagctggcagggagccggcggagagcggactcagaccgcatccagccctccgcagaccgggcaagcagtctctcccgaccttgggaaaaaacagacaaaggggccacctacaccccccaggcacccaagaagttgacgcccacagagaaaggccgctgcgcctccctggaggagatcctatctcagcgggatgctgcctctgcccgcaccctccagctgcgggctgaggaacccccaacccctgccctccccaacccggggcagctgtcccggatccaggacctggtagcaaggaaactggaggagactcaggagcttctggcagaggttcagggactgggagatgggaagcgaaaggccaaggacccccctcggtctccgccggattctgagtcagagcagctgctgctggagacggaacggctgctgggagaggcatcatcgaattggagccaggcaaagagggtgctgcaggaggtcagggagctgagagacctgtacagacagatggacctgcagaccccggactcccacctcagacagaccaccccgcacagtcagtaccggaagagcctgatgtgagggcagggtggggtctggaacttgtcgggttggacagactcttatctccgtgttgctggataaagcttttttatttacctcaatcaaaaaaagaaaacaaaaatgaactcattgctcttgctgatgcctgaccccactacaacccttattgccccacctactttccatatgcccctcgtatgcccctcaggtttgaggaagtgaccccgcagcagtagcaggaagtttttacccagccagagagagagaaggcacggtaaagacacagtctgaccactccacacaccgcccgcccccaagacggcacagggagtccactgctgctcccaaggatacagtgggcttctaagcttagagcgggagggggatgaggatgttttctgttatgtcccaccccaggccttcagtttgagggtgaagtttcagctgcccaactctagttgtagggatgtggaggccagtgtcacctgtccgtgcacatggaagtgaaatttatcccagccctgaggaggatttgtggaattaaaatctccccagccaga

SEQ ID NO: 166667 - DNA, 1809 bp, Homo sapiens
  Payload ID: 12811
  Gene Symbol: PLEKHO1
  Gene Name: pleckstrin homology domain containing, family O member 1
  ENST ID: ENST00000369126
  CDS Start-End: 1022-1702
aaggataatggtttggagacagagttctattcctgccagcattgacactgtgtctgaaaagccagcatcgacactgtgtctgcaaatccctcagctattctgagtctccgttttctccctgtgagatggagatcataaaatccgcctcatccttaggattattctcctgaagctacaataaggcctgaggcattgtacgctggaagaaacgtgtattaatagcaacttctgtcccaccccatcccccaacacgtcgatcccctccggagcataaaactttcccccagcatctgacctgcccaggccaccctagcacctaggagcgtgaattcctgatgcgggttgtgggtggcgcgccctcccggttcccgctctcgtttttgtttttggtcgggtaaggcgatgctgtagaggctggcgatctccagtcttcacgaatccgcacgtctctccattatccaccgcgcccgcccactgggccccggggcggccggcggccgggtctctcgggctccgcgtgtcgcccgagccgccgccggagcgagggtccctgccccctggggagcggtctccagccgcttcgaagccgccttcttccccctccggacctcaggatggaaaccagcagcctgcaccgcccgagaaggtcggctgggtccggaaattctgcgggaaagggattttcagggagatttggaaaaaccgctatgtggtgctgaaaggggaccagctctacatctctgagaaggaggtaaaagatgagaaaaatattcaagaggtatttgacctgagtgactatgagaagtgtgaagagctccggaagtccaagagcaggagcaagaaaaatcatagcaagtttactcttgcccactccaaacagcccggtaacacggcacccaacctgatcttcctggcagtgagtccagaagagaaggaatcgtggatcaatgccctcaactctgccatcacccgagccaagaaccgtatcttggatgaggcttccacctctacctcggatgggatgctgaccttggacttgatccaagaggaagacccttcccctgaggaaccaacctcttgtgctgagagctttcgggttgacctggacaagtctgtggcccagctggcagggagccggcggagagcggactcagaccgcatccagccctccgcagaccgggcaagcagtctctcccgaccttgggaaaaaacagacaaaggggccacctacaccccccaggcacccaagaagttgacgcccacagagaaaggccgctgcgcctccctggaggagatcctatctcagcgggatgctgcctctgcccgcaccctccagctgcgggctgaggaacccccaacccctgccctccccaacccggggcagctgtcccggatccaggacctggtagcaaggaaactggaggagactcaggagcttctggcagaggttcagggactgggagatgggaagcgaaaggccaaggacccccctcggtctccgccggattctgagtcagagcagctgctgctggagacggaacggctgctgggagaggcatcatcgaattggagccaggcaaagagggtgctgcaggaggtcagggagctgagagacctgtacagacagatggacctgcagaccccggactcccacctcagacagaccaccccgcacagtcagtaccggaagagcctgatgtgagggcagggtggggtctggaacttgtcgggttggacagactcttatctccgtgttgctggataaagcttttttatttacctcaatcaaaaaaagaaaacaaaaatgaa

SEQ ID NO: 166668 - DNA, 3720 bp, Homo sapiens
  Payload ID: 12812
  Gene Symbol: PLEKHO2
  Gene Name: pleckstrin homology domain containing, family O member 2
  Uniprot ID: Q8TD55
  ENST ID: ENST00000323544
  CDS Start-End: 129-1601
cttgggcccccggcagccggcgggacagaacgcggagagtcgccgcctggccgggcgtagacgcggtggcagagcccgcgcggcgctggaagcgagtggcggagcggcgggacctcggcggactcgccatggaggaggagggtgtgaaggaagccggtgagaagcctcggggagcacagatggtggacaaggctggctggatcaagaagagcagtgggggcctcctgggtttctggaaagaccgatatctgctcctctgccaggcccagctgctggtctatgagaatgaggatgatcagaagtgtgtggagactgtggagctgggcagctatgagaagtgccaggaccttcgtgccctcctcaagcgaaaacaccgctttatcctgctgcgatccccagggaacaaggtcagcgacatcaaattccaggcacccaccggggaggagaaggaatcctggatcaaagccctcaatgaagggattaaccgaggcaaaaacaaggctttcgatgaggtaaaggtggacaagagctgcgccctggagcatgtgacacgggaccgggtgcgagggggccagcgacgccggccaccaacgagagtccacctgaaggaggtggccagtgcagcttctgacggtcttctgcgcctggatcttgatgttccggacagtgggccaccagtgtttgcccccagcaatcatgtcagtgaagcccaacctcgggagacaccccggcccctcatgcctcctaccaagcctttcctagcacctgagaccaccagccctggtgacagggtggagacccctgtgggggagagagccccaacccctgtctcagcaagctctgaggtctcccctgagagccaagaggactcagagaccccagcagaggaggacagtggctctgagcagcctcccaacagcgtcctgcctgacaaactgaaggtgagctgggagaaccccagcccccaggaggcccctgctgcagagagtgcagaaccgtcccaggcaccctgttctgagacttctgaggctgcccccagggagggtgggaagccccctacacccccacccaagatcttatcagagaaactgaaagcctccatgggtgagatgcaggcttctgggccacctgctccaggcacagtgcaggtctcagtgaatggcatggatgacagtcctgagcctgccaagccctctcaggctgagggcaccccaggaactcctccaaaggatgcaacaacatccacagcactgcccccctgggacctgccacctcagttccatccccgctgctcctcccttggggacttgcttggggaaggcccgcggcatcccttgcagcccagggaacggctatatcgggcccagctggaggtgaaggtggcctcggaacagacggagaaactgttgaacaaggtgctgggcagtgagccggcccctgttagtgccgaaacattgctcagccaggctgtggagcagctgaggcaggccacccaggtcctgcaggaaatgagagatttgggagagctgagccaggaagcacctgggctaagggagaagcggaaggagctggtgaccctctacaggagaagtgcaccctagggccttctgggccagaggcaccatcccttctggccatccatcaagtccatcaaggcccagccctgctgagaaatgtgcttctgcttctacagcaatggctgcaggagggccattgggcatgtcagggtttggccatgacccgaagagactcctggcgtccttcctactctgctctggccagtggtgccaggtgccacccagggctactgcctggctatctggcctggcctctgggctggggctggggctgggagcacacacgctgggacctatgtgtttgtgtggtcgttccaaactgccccagggctttgggggcggcacttggggtttctgggaatgacatcatctctgttccccatccccagtagtttacattcctgacttctgaatacagcacagctgagccccctgcagctcccatctccagctattcctaggcaaagagcctcatggctaaggcagcctcaaagccagcccctcctcccacctattctgagtagctgcagaggccttgggtccaggctctaggttcatccctcagttggggggaacgtaggacccagctggagcctcttgagggagatgagaggcctctttgtgaggaggacattagctgtgtggcctctctctctttggccctgtttccttttttgcaaaacaaggacattttctgcagccccttcctctcagtgagctatgattggagggcttaggtctggaggattcaagagtggaagaggaatttaaggggtcccctagtctagtctctgcccctggatagtgtccagccttgtatatttctgaagaggtggatcccagagtggctctgatgtccacattagaaaaacttacttgtaatgatcatgtcagccttcagaagagaatccccaccaacttctgtgcctcctcagatggggatttatctggatctctgtggttccttctcagccgaaacaggtccagtatcccagtcatttcttcaaatgctgataggggtatgttggaatccgaagccacttccccgccttcaagccccagatgggctgctctcctgtaactttctaggagaagagacattttcttctttccctttcctggtccatccctgcaccctggtcctctcccagcctctcccccacattgtccctgactctaggggcacatccagtctccatcgtgctgcagcagctggactgagggcagagcctgtaggtgcagaggccctggctcccgaggtccagccactctccctggggcctctggggtgagagcagcttccgataggacctgcccagatttctgcatgtgcacttttgtttactgaaagagagaaaggggggggtcacagcaacatgccctggcctttctgctctgttccccaaccccactgaggcctgctgcacaggtcaatgccttcgttatcgttattgtactgtcactttgttcttgaggtagtagtcaaggatcaggaggggcagatgtcttctctgggctgcgtggggccggagcagaggtgagcagcaatgcactggttcgggagcccccatcagcctccttgtgcaaactgggcccccatgccacagtctggctttccctccatctgccccaggacaagagcaagaaggacatcagttgcccagtcatgtgatcccctgccatcttgccttaggaacagccttcccccaccagcagccatggctggctggggctttagccaagccacctactgccaggaattggagcctcagttccctcctgtgtcaagtagctaactgcagcagctggactgagggcagagtctgtgggtgcagagaccctgcatgtaggtcacaggttgaggcccagccactctccctggggcctggtgggtaggcaagtagctctggggccacctcaagtgaccaaatgctattaatttccatcctttagcaggctgggccctaggcaggaagctggcttctgggagaggagtgagaacgtgcagggcctgcctagcttgcgtgcttgaggaaggtggcattccgtgcttgcctccttgaggagggtggcattctgtgtcttctgcttatgaagcgcctttcttaaagtttggcaataaatccatttttatggaacttca

SEQ ID NO: 166669 - DNA, 3569 bp, Homo sapiens
  Payload ID: 12812
  Gene Symbol: PLEKHO2
  Gene Name: pleckstrin homology domain containing, family O member 2
  Uniprot ID: Q8TD55
  ENST ID: ENST00000616065
  CDS Start-End: 135-1457
aagtttcttgggcccccggcagccggcgggacagaacgcggagagtcgccgcctggccgggcgtagacgcggtggcagagcccgcgcggcgctggaagcgagtggcggagcggcgggacctcggcggactcgccatggaggaggaggatgatcagaagtgtgtggagactgtggagctgggcagctatgagaagtgccaggaccttcgtgccctcctcaagcgaaaacaccgctttatcctgctgcgatccccagggaacaaggtcagcgacatcaaattccaggcacccaccggggaggagaaggaatcctggatcaaagccctcaatgaagggattaaccgaggcaaaaacaaggctttcgatgaggtaaaggtggacaagagctgcgccctggagcatgtgacacgggaccgggtgcgagggggccagcgacgccggccaccaacgagagtccacctgaaggaggtggccagtgcagcttctgacggtcttctgcgcctggatcttgatgttccggacagtgggccaccagtgtttgcccccagcaatcatgtcagtgaagcccaacctcgggagacaccccggcccctcatgcctcctaccaagcctttcctagcacctgagaccaccagccctggtgacagggtggagacccctgtgggggagagagccccaacccctgtctcagcaagctctgaggtctcccctgagagccaagaggactcagagaccccagcagaggaggacagtggctctgagcagcctcccaacagcgtcctgcctgacaaactgaaggtgagctgggagaaccccagcccccaggaggcccctgctgcagagagtgcagaaccgtcccaggcaccctgttctgagacttctgaggctgcccccagggagggtgggaagccccctacacccccacccaagatcttatcagagaaactgaaagcctccatgggtgagatgcaggcttctgggccacctgctccaggcacagtgcaggtctcagtgaatggcatggatgacagtcctgagcctgccaagccctctcaggctgagggcaccccaggaactcctccaaaggatgcaacaacatccacagcactgcccccctgggacctgccacctcagttccatccccgctgctcctcccttggggacttgcttggggaaggcccgcggcatcccttgcagcccagggaacggctatatcgggcccagctggaggtgaaggtggcctcggaacagacggagaaactgttgaacaaggtgctgggcagtgagccggcccctgttagtgccgaaacattgctcagccaggctgtggagcagctgaggcaggccacccaggtcctgcaggaaatgagagatttgggagagctgagccaggaagcacctgggctaagggagaagcggaaggagctggtgaccctctacaggagaagtgcaccctagggccttctgggccagaggcaccatcccttctggccatccatcaagtccatcaaggcccagccctgctgagaaatgtgcttctgcttctacagcaatggctgcaggagggccattgggcatgtcagggtttggccatgacccgaagagactcctggcgtccttcctactctgctctggccagtggtgccaggtgccacccagggctactgcctggctatctggcctggcctctgggctggggctggggctgggagcacacacgctgggacctatgtgtttgtgtggtcgttccaaactgccccagggctttgggggcggcacttggggtttctgggaatgacatcatctctgttccccatccccagtagtttacattcctgacttctgaatacagcacagctgagccccctgcagctcccatctccagctattcctaggcaaagagcctcatggctaaggcagcctcaaagccagcccctcctcccacctattctgagtagctgcagaggccttgggtccaggctctaggttcatccctcagttggggggaacgtaggacccagctggagcctcttgagggagatgagaggcctctttgtgaggaggacattagctgtgtggcctctctctctttggccctgtttccttttttgcaaaacaaggacattttctgcagccccttcctctcagtgagctatgattggagggcttaggtctggaggattcaagagtggaagaggaatttaaggggtcccctagtctagtctctgcccctggatagtgtccagccttgtatatttctgaagaggtggatcccagagtggctctgatgtccacattagaaaaacttacttgtaatgatcatgtcagccttcagaagagaatccccaccaacttctgtgcctcctcagatggggatttatctggatctctgtggttccttctcagccgaaacaggtccagtatcccagtcatttcttcaaatgctgataggggtatgttggaatccgaagccacttccccgccttcaagccccagatgggctgctctcctgtaactttctaggagaagagacattttcttctttccctttcctggtccatccctgcaccctggtcctctcccagcctctcccccacattgtccctgactctaggggcacatccagtctccatcgtgctgcagcagctggactgagggcagagcctgtaggtgcagaggccctggctcccgaggtccagccactctccctggggcctctggggtgagagcagcttccgataggacctgcccagatttctgcatgtgcacttttgtttactgaaagagagaaaggggggggtcacagcaacatgccctggcctttctgctctgttccccaaccccactgaggcctgctgcacaggtcaatgccttcgttatcgttattgtactgtcactttgttcttgaggtagtagtcaaggatcaggaggggcagatgtcttctctgggctgcgtggggccggagcagaggtgagcagcaatgcactggttcgggagcccccatcagcctccttgtgcaaactgggcccccatgccacagtctggctttccctccatctgccccaggacaagagcaagaaggacatcagttgcccagtcatgtgatcccctgccatcttgccttaggaacagccttcccccaccagcagccatggctggctggggctttagccaagccacctactgccaggaattggagcctcagttccctcctgtgtcaagtagctaactgcagcagctggactgagggcagagtctgtgggtgcagagaccctgcatgtaggtcacaggttgaggcccagccactctccctggggcctggtgggtaggcaagtagctctggggccacctcaagtgaccaaatgctattaatttccatcctttagcaggctgggccctaggcaggaagctggcttctgggagaggagtgagaacgtgcagggcctgcctagcttgcgtgcttgaggaaggtggcattccgtgcttgcctccttgaggagggtggcattctgtgtcttctgcttatgaagcgcctttcttaaagtttggcaataaatccatttttatgg

SEQ ID NO: 166670 - DNA, 3403 bp, Homo sapiens
  Payload ID: 12813
  Gene Symbol: PLEKHS1
  Gene Name: pleckstrin homology domain containing, family S member 1
  ENST ID: ENST00000354462
  CDS Start-End: 159-755
aagccactcaagatgtgaaggaagagaatcattatcttactcctcgaagtgttcttttagagttggataatatcattgcttccagtgattctggtgaatccattgaaactgatggtccagaccaggtctctggaagaattgagtgtcattatgagccaatggaatcctattttttcaaagagacatcccatgagtctgtggatagcagcaaagaggaaccccagacccttccagagacccaggatggggacctccacctgcaagaacaaggctcaggaattgattggtgtctttcccctgccgatgtggaagcacagaccacaaatgaccaaaagggtaatatccccgatgaaagccaagtggagaaactgaacgttttcctttctcctcctgatgtcatcaactatcttgctctcacagaagccacaggacggatatgtgtgtctcagtgggaaggccccccacgtttgggatgcatattttgccacggagatcatcttctggcagtgaatgacctgaaaccccagagcctggaggaggtctccctgtttcttacccggtccatccagaaggagaaattaaagcttaccatcggcaggatcccaaattcagagacattccatgctgcatcctgtatgtgtccctcaaaatgccaaagtgctgcaccttctcagctggataagcctagactgaacagagctcccaagaggagtccggccattaaaaagagccagcagaaaggagccagggagtaacgcaccccagacccatggcagcagaaccaggatggagctgggactgtccagctctgccccctgctgctgccatgtgataggagacagtcggcacccccctctgaatttctgcatctgcatcttaacaatggggatgactatcccctctctggttattgtatcagagatgctaagagggtcatgtggcatgattggagaacctgggggaattggaaggccttattatctcagctattgtcccaaacaccacagacacagattgggtcagtccttcatgtaatacatgctgtgttctgtgaggatgtggtccacacaattccttctttgttaagggacatacagttgcaaatactcactgcatgaaggcaagattcccaagggagatgtgatagctgatcaggcttcccagacacctccttcccaaacacctccttcccaacacctccttccccaacatccttcccaacacctccttcccaacacctccttcccaaacacctccttcccaaacacctccttcccaacacctccttccccaacacctccttcccaaacacctctttcccaaacacctccttcccagacacctccttcccaacacctccttcccaacacctccttcccaaacccctctttcccaaacacctccttccccaacacctccttcccaacacctccttcccccttccccaacacctccttccccaacacctccttcccaacacctccttcccaaacccctccttccccaacatccttcccaacacctccttcccaacacctccttcccaaacacctccttcccaaacacctccttcccaacacctccttccccaacacctccttcccaaacacctctttcccaaacacctccttcccagacacctccttcccaacaccgccttcccaacacctccttcccaaacccctctttcccaaacacctccttccccaacacctccttccccaacacctccttcccaacacctccttcccccttccccaacaactccttccccaacacctccttcccaaacatccccttcccaaacacctgcctctcttcaaccccacaggccagagtgctgagacagagtggccttttggattcaataagtatcttgttctcttaaagactcagcaacgattttagaagtcgcagcagttttacatcacatgcagccaagatcagcttgctctacaagcaataacagaactacttagcacttcaaggttgaaagttcttcactaatggatccattgactaattgatcctggaaggccaaaggaataaaattcttttatataaataggaaaacaaaggcagagagctaaagcactaatcaaatcggggggtgttagagcaaaaacaggcttcagaaagagtattttaccatgcttcacatggaaaaaatcgagccccggagcgatgaaaggcatattttctttgtttctccaagtttcataaccgttcagttgcagaaccaagaatctaaaaccagctctgggaaacaaatgtccagatgccagcctcatagttgaacttggatttgaaaataccttcagcacttagaagagacattcaaatacatttcatttcctgttacccagattgttcggaaagtattaaaaatttttcatttacatgctgatacggtttggatctgtgtccctaacaaatcccatgtcgagctgtggtccccggtgttggagatggagcctggtgggaggcagctggatcgtgaggtcgtgggggtggagttctcacgaaggagttagcatcatccccttggcgctgttctcgtgatagtaagttctcgtgagatctggttgtttaaaagtgtgcagcacctctccgctcactctcttcctcctgctcctgccgtgtaagatgcctgctctgtctgccacaagtgaaagcttcctgaggtctccccggaagcagatgctgccacgcttcctgtacagcctgcagaactgtggaccaatcaaacctcttttcttataaattacctggtcttggggatttctttatttaatgtgagaacgcatgcccttttggatctgctgtttctacttttataaatttatcatgcagaaatacacaaatacacaaagatacatgtaaaaaaagtagtttactgcagtactgtttgtaataataaaaaatcaggctggacgtggtggttcatgcctataattccaaccctttgggaggccgggacaggtggatcacctgaggtctggagctcgagaacaacctgaccaacatggagaaaccctgtctctactaaaaatacaaaactagctgggcattgtggcacatgcctgcaatcccagctacttgagaggctggggcaggagaatcactagaaccgggaggcggaagttgcagtgagccaagatcatgccattgcactccagcctgggcaacaagaggaaaacccagtctcaaaaaaaaaaaaaaaatcatgtgggtattgcttaattctgatttcatatcattgaacactgtagatattaaaatgttcagcaggcacagttctgtaaaattgttcgtgatacattaagaatgaaagaatcaagttgtataataaggataacatcatcccacttttgtacaaataaatgtttggtgtttgtgtgta

SEQ ID NO: 166671 - DNA, 3249 bp, Homo sapiens
  Payload ID: 12813
  Gene Symbol: PLEKHS1
  Gene Name: pleckstrin homology domain containing, family S member 1
  Uniprot ID: Q5SXH7
  ENST ID: ENST00000361048
  CDS Start-End: 328-1419
attattaatgtgtttgctttcatttttggtgctaggcagctgggacaccaaggagagttctgtggcaagccacaagtatgaaggcccagaacttcccctgagggcatagcttccatttcagtttggggcaagaataaaatctgctcaaggatattagtttgggaacttcctggtggttcagatttcaagcagagtttgtgcttaatcctcacccaggcaccaaggctcagagtcagcaggagtgagttcaggaatcctcgggacaaggcactttcctgagcactggaccagcgacctcttggcttccagggaggacacacagccatcatggaacccaaacctcagaagagtccaggcaaacaatttacattttcttatgaaaatgaagtctgcaaacaagattactttattaaatcaccaccttctcagctgttctcctctgtgacctcttggaaaaagcggtttttcatcctgtcaaaggctggggaaaagagctttagtctttcctattataaagaccatcatcaccgaggttccattgaaattgatcaaaattccagtgtagaagttggcataagtagccaggaaaagatgcaatctgtgcagaagatgtttaaatgccaccctgatgaggtcatgtccatcagaaccactaacagggaatacttcctcattggccacgacagggagaagattaaagactgggtctccttcatgtcatcatttcgccaggatataaaagcaacacagcagaacacagaggaggaactctcattgggtaataaaagaaccctcttctactccagccctctccttggcccttccagcacatcagaggctgttggctccagctcaccaagaaatggtctccaagacaagcatttaatggaacaaagttctccaggatttaggcaaactcacctacaagatttatcagaagccactcaagatgtgaaggaagagaatcattatcttactcctcgaagtgttcttttagagttggataatatcattgcttccagtgattctggtgaatccattgaaactgatggtccagaccaggtctctggaagaattgagtgtcattatgagccaatggaatcctattttttcaaagagacatcccatgagtctgtggatagcagcaaagaggaaccccagacccttccagagacccaggatggggacctccacctgcaagaacaaggctcaggaattgattggtgtctttcccctgccgatgtggaagcacagaccacaaatgaccaaaaggggtcggcctcactaactgttgtgcaattgtctatattaatcaataatatccccgatgaaagccaagtggagaaactgaacgttttcctttctcctcctgatgtcatcaactatcttgctctcacagaagccacaggacggatatgaaattaaagcttaccatcggcaggatcccaaattcagagacattccatgctgcatcctgtatgtgtccctcaaaatgccaaagtgctgcaccttctcagctggataagcctagactgaacagagctcccaagaggagtccggccattaaaaagagccagcagaaaggagccagggagtaacgcaccccagacccatggcagcagaaccaggatggagctgggactgtccagctctgccccctgctgctgccatgtgataggagacagtcggcacccccctctgaatttctgcatctgcatcttaacaatggggatgactatcccctctctggttattgtatcagagatgctaagagggtcatgtggcatgattggagaacctgggggaattggaaggccttattatctcagctattgtcccaaacaccacagacacagattgggtcagtccttcatgtaatacatgctgtgttctgtgaggatgtggtccacacaattccttctttgttaagggacatacagttgcaaatactcactgcatgaaggcaagattcccaagggagatgtgatagctgatcaggcttcccagacacctccttcccaaacacctccttcccaacacctccttccccaacatccttcccaacacctccttcccaacacctccttcccaaacacctccttcccaaacacctccttcccaacacctccttccccaacacctccttcccaaacacctctttcccaaacacctccttcccagacacctccttcccaacacctccttcccaacacctccttcccaaacccctctttcccaaacacctccttccccaacacctccttcccaacacctccttcccccttccccaacacctccttccccaacacctccttcccaacacctccttcccaaacccctccttccccaacatccttcccaacacctccttcccaacacctccttcccaaacacctccttcccaaacacctccttcccaacacctccttccccaacacctccttcccaaacacctctttcccaaacacctccttcccagacacctccttcccaacaccgccttcccaacacctccttcccaaacccctctttcccaaacacctccttccccaacacctccttccccaacacctccttcccaacacctccttcccccttccccaacaactccttccccaacacctccttcccaaacatccccttcccaaacacctgcctctcttcaaccccacaggccagagtgctgagacagagtggccttttggattcaataagtatcttgttctcttaaagactcagcaacgattttagaagtcgcagcagttttacatcacatgcagccaagatcagcttgctctacaagcaataacagaactacttagcacttcaaggttgaaagttcttcactaatggatccattgactaattgatcctggaaggccaaaggaataaaattcttttatataaataggaaaacaaaggcagagagctaaagcactaatcaaatcggggggtgttagagcaaaaacaggcttcagaaagagtattttaccatgcttcacatggaaaaaatcgagccccggagcgatgaaaggcatattttctttgtttctccaagtttcataaccgttcagttgcagaaccaagaatctaaaaccagctctgggaaacaaatgtccagatgccagcctcatagttgaacttggatttgaaaataccttcagcacttagaagagacattcaaatacatttcatttcctgttacccagattgttcggaaagtattaaaaatttttcatttacatgctg

SEQ ID NO: 166672 - DNA, 2534 bp, Homo sapiens
  Payload ID: 12813
  Gene Symbol: PLEKHS1
  Gene Name: pleckstrin homology domain containing, family S member 1
  ENST ID: ENST00000369309
  CDS Start-End: 34-882
gaaaaatatggagcaggaacaggaaagcatttaatggaacaaagttctccaggatttaggcaaactcacctacaagatttatcagaagccactcaagatgtgaaggaagagaatcattatcttactcctcgaagtgttcttttagagttggataatatcattgcttccagtgattctggtgaatccattgaaactgatggtccagaccaggtctctggaagaattgagtgtcattatgagccaatggaatcctattttttcaaagagacatcccatgagtctgtggatagcagcaaagaggaaccccagacccttccagagacccaggatggggacctccacctgcaagaacaaggctcaggaattgattggtgtctttcccctgccgatgtggaagcacagaccacaaatgaccaaaaggggtcggcctcactaactgttgtgcaattgtctatattaatcaataatatccccgatgaaagccaagtggagaaactgaacgttttcctttctcctcctgatgtcatcaactatcttgctctcacagaagccacaggacggatatgtgtgtctcagtgggaaggccccccacgtttgggatgcatattttgccacggagatcatcttctggcagtgaatgacctgaaaccccagagcctggaggaggtctccctgtttcttacccggtccatccagaaggagaaattaaagcttaccatcggcaggatcccaaattcagagacattccatgctgcatcctgtatgtgtccctcaaaatgccaaagtgctgcaccttctcagctggataagcctagactgaacagagctcccaagaggagtccggccattaaaaagagccagcagaaaggagccagggagtaacgcaccccagacccatggcagcagaaccaggatggagctgggactgtccagctctgccccctgctgctgccatgtgataggagacagtcggcacccccctctgaatttctgcatctgcatcttaacaatggggatgactatcccctctctggttattgtatcagagatgctaagagggtcatgtggcatgattggagaacctgggggaattggaaggccttattatctcagctattgtcccaaacaccacagacacagattgggtcagtccttcatgtaatacatgctgtgttctgtgaggatgtggtccacacaattccttctttgttaagggacatacagttgcaaatactcactgcatgaaggcaagattcccaagggagatgtgatagctgatcaggcttcccagacacctccttcccaaacacctccttcccaacacctccttccccaacatccttcccaacacctccttcccaacacctccttcccaaacacctccttcccaaacacctccttcccaacacctccttccccaacacctccttcccaaacacctctttcccaaacacctccttcccagacacctccttcccaacacctccttcccaacacctccttcccaaacccctctttcccaaacacctccttccccaacacctccttcccaacacctccttcccccttccccaacacctccttccccaacacctccttcccaacacctccttcccaaacccctccttccccaacatccttcccaacacctccttcccaacacctccttcccaaacacctccttcccaaacacctccttcccaacacctccttccccaacacctccttcccaaacacctctttcccaaacacctccttcccagacacctccttcccaacaccgccttcccaacacctccttcccaaacccctctttcccaaacacctccttccccaacacctccttccccaacacctccttcccaacacctccttcccccttccccaacaactccttccccaacacctccttcccaaacatccccttcccaaacacctgcctctcttcaaccccacaggccagagtgctgagacagagtggccttttggattcaataagtatcttgttctcttaaagactcagcaacgattttagaagtcgcagcagttttacatcacatgcagccaagatcagcttgctctacaagcaataacagaactacttagcacttcaaggttgaaagttcttcactaatggatccattgactaattgatcctggaaggccaaaggaataaaattcttttatataaataggaaaacaaaggcagagagctaaagcactaatcaaatcggggggtgttagagcaaaaacaggcttcagaaagagtattttaccatgcttcacatggaaaaaatcgagccccggagcgatgaaaggcatattttctttgtttctccaagtttcataaccgttcagttgcagaaccaagaatctaaaaccagctctgggaaacaaatgtccagatgccagcctcatagttgaacttggatttgaaaataccttcagcacttagaagagacattcaaatacatttcatttcctgttacccagattgttcggaaagtattaaaaatttttcatttacatgctga

SEQ ID NO: 166673 - DNA, 2046 bp, Homo sapiens
  Payload ID: 12813
  Gene Symbol: PLEKHS1
  Gene Name: pleckstrin homology domain containing, family S member 1
  Uniprot ID: Q5SXH7
  ENST ID: ENST00000369310
  CDS Start-End: 563-1960
atgcctttaagtgcactaatcttttcttgtacaatatttaatctgctcttactcccatccagtgttgttgctgtttttttgagacattgtagttttcatctttaaaatttcactttaggtcttctttatatcttttatatctctccctaactttttgaaaatatagtgataataactgctttaattactttctctgccaattctaacatctgtgtcagttctaggcctgttttgattgattgactttcttctcattattgatcatgttttccttcctctttgtatgcctggtaaactttgattgactgccaaacatcgcaaattttaccttgttgtttcctgaatatctttgtattcctatgaatcttgagctttgttctgggatacagttaaattttttgggaacaactttcttctaagtctttcatgattttttaggtgggtttggagcagtgctcagtgtagaactagtaattagtgtagagctaattattcctcacactgaggcaagacattcctgagtactctacccaatgccctgtaaattataagtttttccagtatggctggaggcaaacaatttacattttcttatgaaaatgaagtctgcaaacaagattactttattaaatcaccaccttctcagctgttctcctctgtgacctcttggaaaaagcggtttttcatcctgtcaaaggctggggaaaagagctttagtctttcctattataaagaccatcatcaccgaggttccattgaaattgatcaaaattccagtgtagaagttggcataagtagccaggaaaagatgcaatctgtgcagaagatgtttaaatgccaccctgatgaggtcatgtccatcagaaccactaacagggaatacttcctcattggccacgacagggagaagattaaagactgggtctccttcatgtcatcatttcgccaggatataaaagcaacacagcagaacacagaggaggaactctcattgggtaataaaagaaccctcttctactccagccctctccttggcccttccagcacatcagaggctgttggctccagctcaccaagaaatggtctccaagacaagcatttaatggaacaaagttctccaggatttaggcaaactcacctacaagatttatcagaagccactcaagatgtgaaggaagagaatcattatcttactcctcgaagtgttcttttagagttggataatatcattgcttccagtgattctggtgaatccattgaaactgatggtccagaccaggtctctggaagaattgagtgtcattatgagccaatggaatcctattttttcaaagagacatcccatgagtctgtggatagcagcaaagaggaaccccagacccttccagagacccaggatggggacctccacctgcaagaacaaggctcaggaattgattggtgtctttcccctgccgatgtggaagcacagaccacaaatgaccaaaagggtaatatccccgatgaaagccaagtggagaaactgaacgttttcctttctcctcctgatgtcatcaactatcttgctctcacagaagccacaggacggatatgtgtgtctcagtgggaaggccccccacgtttgggatgcatattttgccacggagatcatcttctggcagtgaatgacctgaaaccccagagcctggaggaggtctccctgtttcttacccggtccatccagaaggaggactctttcaggattctttcatatcaagtagcatttggagaaggcactgagctaagagacagagcacctgggttcaggacctcagatcggcatgatgtagcaaaaagagcttgcatggaatcagactggtgcagggattccaaaacagctccttcaaccaatttgtgcctcagttttcttttctgtaaaattatgactaatgatggtgctggttgttggataattaaatgaggtaatatgtgtaacgtgcttacaaaggtgactggcacatattaggtgctcaataaagctactagttacttttacttctactacaa

SEQ ID NO: 166674 - DNA, 3443 bp, Homo sapiens
  Payload ID: 12813
  Gene Symbol: PLEKHS1
  Gene Name: pleckstrin homology domain containing, family S member 1
  Uniprot ID: Q5SXH7
  ENST ID: ENST00000369312
  CDS Start-End: 692-1792
attattaatgtgtttgctttcatttttggtgctaggcagctgggacaccaaggagagttctgtggcaagccacaagtatgaaggcccagaacttcccctgagggcatagcttccatttcagtttggggcaagaataaaatctgctcaaggatattagtttgggaacttcctggtggttcagatttcaagcagagtttgtgcttaatcctcacccaggcaccaaggctcagagtcagcaggagtgagttcaggaatcctcgggacaaggcactttcctgagcactggaccagcgacctcttggcttccagggaggacacacagccatcatggaacccaaacctcagaagagtccaggtacccgaggggtataatcgcagaagcagaaatctttttattgaaaatgccccacggtttccttcaagctaaccaggatacagaacttggtggtttttgtgcaaacaatttacattttcttatgaaaatgaagtctgcaaacaagattactttattaaatcaccaccttctcagctgttctcctctgtgacctcttggaaaaagcggtttttcatcctgtcaaaggctggggaaaagagctttagtctttcctattataaagaccatcatcaccgaggttccattgaaattgatcaaaattccagtgtagaagttggcataagtagccaggaaaagatgcaatctgtgcagaagatgtttaaatgccaccctgatgaggtcatgtccatcagaaccactaacagggaatacttcctcattggccacgacagggagaagattaaagactgggtctccttcatgtcatcatttcgccaggatataaaagcaacacagcagaacacagaggaggaactctcattgggtaataaaagaaccctcttctactccagccctctccttggcccttccagcacatcagaggctgttggctccagctcaccaagaaatggtctccaagacaagcatttaatggaacaaagttctccaggatttaggcaaactcacctacaagatttatcagaagccactcaagatgtgaaggaagagaatcattatcttactcctcgaagtgttcttttagagttggataatatcattgcttccagtgattctggtgaatccattgaaactgatggtccagaccaggtctctggaagaattgagtgtcattatgagccaatggaatcctattttttcaaagagacatcccatgagtctgtggatagcagcaaagaggaaccccagacccttccagagacccaggatggggacctccacctgcaagaacaaggctcaggaattgattggtgtctttcccctgccgatgtggaagcacagaccacaaatgaccaaaagggtaatatccccgatgaaagccaagtggagaaactgaacgttttcctttctcctcctgatgtcatcaactatcttgctctcacagaagccacaggacggatatgtgtgtctcagtgggaaggccccccacgtttgggatgcatattttgccacggagatcatcttctggcagtgaatgacctgaaaccccagagcctggaggaggtctccctgtttcttacccggtccatccagaaggagaaattaaagcttaccatcggcaggatcccaaattcagagacattccatgctgcatcctgtatgtgtccctcaaaatgccaaagtgctgcaccttctcagctggataagcctagactgaacagagctcccaagaggagtccggccattaaaaagagccagcagaaaggagccagggagtaacgcaccccagacccatggcagcagaaccaggatggagctgggactgtccagctctgccccctgctgctgccatgtgataggagacagtcggcacccccctctgaatttctgcatctgcatcttaacaatggggatgactatcccctctctggttattgtatcagagatgctaagagggtcatgtggcatgattggagaacctgggggaattggaaggccttattatctcagctattgtcccaaacaccacagacacagattgggtcagtccttcatgtaatacatgctgtgttctgtgaggatgtggtccacacaattccttctttgttaagggacatacagttgcaaatactcactgcatgaaggcaagattcccaagggagatgtgatagctgatcaggcttcccagacacctccttcccaaacacctccttcccaacacctccttccccaacatccttcccaacacctccttcccaacacctccttcccaaacacctccttcccaaacacctccttcccaacacctccttccccaacacctccttcccaaacacctctttcccaaacacctccttcccagacacctccttcccaacacctccttcccaacacctccttcccaaacccctctttcccaaacacctccttccccaacacctccttcccaacacctccttcccccttccccaacacctccttccccaacacctccttcccaacacctccttcccaaacccctccttccccaacatccttcccaacacctccttcccaacacctccttcccaaacacctccttcccaaacacctccttcccaacacctccttccccaacacctccttcccaaacacctctttcccaaacacctccttcccagacacctccttcccaacaccgccttcccaacacctccttcccaaacccctctttcccaaacacctccttccccaacacctccttccccaacacctccttcccaacacctccttcccccttccccaacaactccttccccaacacctccttcccaaacatccccttcccaaacacctgcctctcttcaaccccacaggccagagtgctgagacagagtggccttttggattcaataagtatcttgttctcttaaagactcagcaacgattttagaagtcgcagcagttttacatcacatgcagccaagatcagcttgctctacaagcaataacagaactacttagcacttcaaggttgaaagttcttcactaatggatccattgactaattgatcctggaaggccaaaggaataaaattcttttatataaataggaaaacaaaggcagagagctaaagcactaatcaaatcggggggtgttagagcaaaaacaggcttcagaaagagtattttaccatgcttcacatggaaaaaatcgagccccggagcgatgaaaggcatattttctttgtttctccaagtttcataaccgttcagttgcagaaccaagaatctaaaaccagctctgggaaacaaatgtccagatgccagcctcatagttgaacttggatttgaaaataccttcagcacttagaagagacattcaaatacatttcatttcctgttacccagattgttcggaaagtattaaaaatttttcatttacatgctg

SEQ ID NO: 166675 - DNA, 679 bp, Homo sapiens
  Payload ID: 12813
  Gene Symbol: PLEKHS1
  Gene Name: pleckstrin homology domain containing, family S member 1
  ENST ID: ENST00000448805
  CDS Start-End: 1-589
gcaagaacaaggctcaggaattgattggtgtctttcccctgccgatgtggaagcacagaccacaaatgaccaaaaggggtcggcctcactaactgttgtgcaattgtctatattaatcaataatatccccgatgaaagccaagtggagaaactgaacgttttcctttctcctcctgatgtcatcaactatcttgctctcacagaagccacaggacggatatgtgtgtctcagtgggaaggccccccacgtttgggatgcatattttgccacggagatcatcttctggcagtgaatgacctgaaaccccagagcctggaggaggtctccctgtttcttacccggtccatccagaaggaggactctttcaggattctttcatatcaagtagcatttggagaaggcactgagctaagagacagagcacctgggttcaggacctcagatcggcatgatgtagcaaaaagagcttgcatggaatcagactggtgcagggattccaaaacagctccttcaaccaatttgtgcctcagttttcttttctgtaaaattatgactaatgatggtgctggttgttggataattaaatgaggtaatatgtgtaacgtgcttacaaaggtgactggcacatattaggtgctcaataaagctactagttacttttacttctactacaactga

SEQ ID NO: 166676 - DNA, 3247 bp, Homo sapiens
  Payload ID: 12813
  Gene Symbol: PLEKHS1
  Gene Name: pleckstrin homology domain containing, family S member 1
  Uniprot ID: Q5SXH7
  ENST ID: ENST00000619563
  CDS Start-End: 496-1596
attattaatgtgtttgctttcatttttggtgctaggcagctgggacaccaaggagagttctgtggcaagccacaagtatgaaggcccagaacttcccctgagggcatagcttccatttcagtttggggcaagaataaaatctgctcaaggatattagtttgggaacttcctggtggttcagatttcaagcagagtttgtgcttaatcctcacccaggcaccaaggctcagagtcagcaggagtgagttcaggaatcctcgggacaaggcactttcctgagcactggaccagcgacctcttggcttccagggaggacacacagccatcatggaacccaaacctcagaagagtccaggtacccgaggggtataatcgcagaagcagaaatctttttattgaaaatgccccacggtttccttcaagctaaccaggatacagaacttggtggtttttgtaaattccagtgtagaagttggcataagtagccaggaaaagatgcaatctgtgcagaagatgtttaaatgccaccctgatgaggtcatgtccatcagaaccactaacagggaatacttcctcattggccacgacagggagaagattaaagactgggtctccttcatgtcatcatttcgccaggatataaaagcaacacagcagaacacagaggaggaactctcattgggtaataaaagaaccctcttctactccagccctctccttggcccttccagcacatcagaggctgttggctccagctcaccaagaaatggtctccaagacaagcatttaatggaacaaagttctccaggatttaggcaaactcacctacaagatttatcagaagccactcaagatgtgaaggaagagaatcattatcttactcctcgaagtgttcttttagagttggataatatcattgcttccagtgattctggtgaatccattgaaactgatggtccagaccaggtctctggaagaattgagtgtcattatgagccaatggaatcctattttttcaaagagacatcccatgagtctgtggatagcagcaaagaggaaccccagacccttccagagacccaggatggggacctccacctgcaagaacaaggctcaggaattgattggtgtctttcccctgccgatgtggaagcacagaccacaaatgaccaaaagggtaatatccccgatgaaagccaagtggagaaactgaacgttttcctttctcctcctgatgtcatcaactatcttgctctcacagaagccacaggacggatatgtgtgtctcagtgggaaggccccccacgtttgggatgcatattttgccacggagatcatcttctggcagtgaatgacctgaaaccccagagcctggaggaggtctccctgtttcttacccggtccatccagaaggagaaattaaagcttaccatcggcaggatcccaaattcagagacattccatgctgcatcctgtatgtgtccctcaaaatgccaaagtgctgcaccttctcagctggataagcctagactgaacagagctcccaagaggagtccggccattaaaaagagccagcagaaaggagccagggagtaacgcaccccagacccatggcagcagaaccaggatggagctgggactgtccagctctgccccctgctgctgccatgtgataggagacagtcggcacccccctctgaatttctgcatctgcatcttaacaatggggatgactatcccctctctggttattgtatcagagatgctaagagggtcatgtggcatgattggagaacctgggggaattggaaggccttattatctcagctattgtcccaaacaccacagacacagattgggtcagtccttcatgtaatacatgctgtgttctgtgaggatgtggtccacacaattccttctttgttaagggacatacagttgcaaatactcactgcatgaaggcaagattcccaagggagatgtgatagctgatcaggcttcccagacacctccttcccaaacacctccttcccaacacctccttccccaacatccttcccaacacctccttcccaacacctccttcccaaacacctccttcccaaacacctccttcccaacacctccttccccaacacctccttcccaaacacctctttcccaaacacctccttcccagacacctccttcccaacacctccttcccaacacctccttcccaaacccctctttcccaaacacctccttccccaacacctccttcccaacacctccttcccccttccccaacacctccttccccaacacctccttcccaacacctccttcccaaacccctccttccccaacatccttcccaacacctccttcccaacacctccttcccaaacacctccttcccaaacacctccttcccaacacctccttccccaacacctccttcccaaacacctctttcccaaacacctccttcccagacacctccttcccaacaccgccttcccaacacctccttcccaaacccctctttcccaaacacctccttccccaacacctccttccccaacacctccttcccaacacctccttcccccttccccaacaactccttccccaacacctccttcccaaacatccccttcccaaacacctgcctctcttcaaccccacaggccagagtgctgagacagagtggccttttggattcaataagtatcttgttctcttaaagactcagcaacgattttagaagtcgcagcagttttacatcacatgcagccaagatcagcttgctctacaagcaataacagaactacttagcacttcaaggttgaaagttcttcactaatggatccattgactaattgatcctggaaggccaaaggaataaaattcttttatataaataggaaaacaaaggcagagagctaaagcactaatcaaatcggggggtgttagagcaaaaacaggcttcagaaagagtattttaccatgcttcacatggaaaaaatcgagccccggagcgatgaaaggcatattttctttgtttctccaagtttcataaccgttcagttgcagaaccaagaatctaaaaccagctctgggaaacaaatgtccagatgccagcctcatagttgaacttggatttgaaaataccttcagcacttagaagagacattcaaatacatttcatttcctgttacccagattgttcggaaagtattaaaaatttttcatttacatgctg

SEQ ID NO: 166677 - DNA, 10460 bp, Homo sapiens
  Payload ID: 12814
  Gene Symbol: PHIP
  Gene Name: pleckstrin homology domain interacting protein
  Uniprot ID: Q8WWQ0
  ENST ID: ENST00000275034
  CDS Start-End: 169-5634
gttgtttcctcctcctcctcctccgcctccgccgccgttgcttgaatggtggagccgaagctcggctcgtgaacacacactgacagctatagggcaggcggcggcaccgtccccgcttcccctcggcggcggggtgtcccgtcggcggccctgaagtgacccataaacatgtcttgtgagaggaaaggcctctcggagctgcgatcggagctctacttcctcatcgcccggttcctggaagatggaccctgtcagcaggcggctcaggtgctgatccgcgaggtggccgagaaggagctgctgccccggcgcaccgactggaccgggaaggagcatcccaggacctaccagaatctggtgaagtattacagacacttagcacctgatcacttgctgcaaatatgtcatcgactaggacctcttcttgaacaagaaattcctcaaagtgttcctggagtacaaactttattaggagctggaagacagtctttactacgcacaaataaaagctgcaagcatgttgtgtggaaaggatctgctctggctgcgttgcactgtggaagaccacctgagtcaccagttaactatggtagcccacccagcattgcggatactctgttttcaaggaagctgaatgggaaatacagacttgagcgacttgttccaactgcagtgtatcagcacatgaaaatgcataaacgaattcttggacacttgtcatctgtgtactgtgtaacttttgatcgaactggcagacggatatttactggttctgatgactgtcttgtgaaaatatgggcaacagatgatgggaggttgttagctaccttaagaggacatgctgctgaaatatcagacatggctgtaaactatgagaataccatgatagcagctggaagttgtgataaaatgatccgagtctggtgtcttcgaacctgtgcacctttggctgttcttcagggccatagtgcatctattacatcactacagttctcaccattgtgcagtggctcaaagagatatctatcttctactggggcagatggcactatttgtttttggctctgggatgctggaacccttaaaataaacccaagacctgcaaaatttacagagcgccctcggcctggagttcaaatgatctgttcttcttttagtgctggtggaatgtttctggcgacgggaagcacagatcatattattcgggtttatttttttggatcaggtcagccagagaaaatatcagaattggagtttcatactgacaaagttgacagtatccagttttccaacactagtaacaggtttgtaagtggcagtcgtgatgggacagcacgtatttggcaatttaaacgaagagagtggaagagcattttgttggatatggctactcgtccagcaggccaaaaccttcaaggaatagaagataaaatcacaaaaatgaaggttactatggtagcttgggatcgacatgacaatacagttataactgcagttaataacatgactctgaaagtttggaattcttacactggtcaactaattcatgtcctgatgggtcatgaagatgaggtatttgttcttgaaccacacccgttcgatcctagagttctcttttctgctggtcatgatggaaacgtgatagtgtgggatctggcaagaggagtcaaaatacgatcttatttcaatatgattgaaggccaaggacatggcgcagtatttgactgcaaatgctctcctgatggtcagcattttgcatgcacagactctcatggacatcttttaatttttggctttgggtccagtagcaaatatgacaagatagcagatcagatgttctttcatagtgattatcggccacttattcgtgatgccaacaattttgtattagatgaacagactcagcaagcacctcatcttatgcctcccccttttttggttgatgttgatggtaaccctcatccatcaagatatcaaagattagttcctggccgtgaaaattgcagggaggagcaactcatccctcagatgggagtaacttcctcaggactgaatcaagttttaagtcagcaagcaaaccaggagatcagcccactggacagcatgattcaaagactacaacaggagcaagacctgagacgttctggtgaagcagttatcagtaataccagccgtttaagtagaggctccataagttctacctcagaggttcattcaccaccaaacgtaggactaagacgtagtggacaaattgaaggtgtacggcaaatgcacagcaacgcaccaagaagtgaaatagccacagagcgggatctggtagcttggagtcgaagggtggtagtacccgagctatcagctggtgtagccagtaggcaagaagaatggagaactgcaaagggagaagaagaaataaagacttacaggtcagaagagaaaagaaaacacttaactgttccaaaagagaataaaatacccactgtctcaaagaatcatgctcatgagcatttcctggatcttggagaatccaaaaagcaacagacaaatcaacacaattatcgtacaagatctgcattggaagagactcctagaccctcagaagagatagaaaatggcagtagttcttcagatgaaggcgaagtagttgctgtcagtggtggaacatccgaagaagaagagagagcatggcacagtgatggcagttctagtgactactccagtgattactctgactggacagcagatgcaggaattaatctgcagccaccaaagaaagttcctaagaataaaaccaagaaagcagaaagcagttcagatgaagaagaagaatctgaaaaacagaagcaaaaacagattaaaaaggaaaagaaaaaagtaaatgaagaaaaagatggaccaatatcaccaaagaaaaagaagcccaaagaaagaaaacaaaagagattggctgtgggagaactaactgaaaatggtttgacattagaagaatggttgccatcaacatggattacagataccattccccgaagatgtccatttgtgccacagatgggtgatgaggtttattatttccgacaaggacatgaagcctatgtcgaaatggcccggaaaaataaaatatatagtatcaatcccaaaaaacaaccatggcataaaatggagctacgggaacaagaacttatgaaaatagttggcataaagtatgaagtgggattacctaccctttgctgccttaaacttgcttttctagatcctgatactggtaaactgactggcggatcatttaccatgaaataccatgatatgcctgacgttatagatttcctagtcttgagacaacaatttgatgatgcaaaatacaggcgatggaatataggtgaccgcttcaggtctgtcatagatgatgcctggtggtttggaacaatcgaaagccaggaacctcttcaacttgagtaccctgatagtctgtttcaatgctacaatgtttgctgggacaatggagatacagaaaagatgagtccttgggatatggagcttatacctaataatgctgtatttcctgaagaactaggtaccagtgttcctttaactgatggtgagtgcagatcactaatctataaacctcttgatggagaatggggtaccaatcccagggatgaagaatgtgaaagaattgtggcaggaataaaccagttgatgacactagatattgcctcagcatttgtggcccccgtggatctgcaagcctatcccatgtattgcacagtagtggcatatccaacggatctaagtacaattaaacaaagactggaaaacaggttttacaggcgggtttcttccctaatgtgggaagttcgatatatagagcataatacacgaacatttaatgagcctggaagccctattgtgaaatctgctaaattcgtgactgatcttcttctacattttataaaggatcagacttgttataacataattccactttataattcaatgaagaagaaagttttgtctgattctgaggatgaagagaaagatgctgatgtgccaggaacttctactcgaaaaaggaaggaccatcagcctagaagaagattacgtaatagagcccagtcttacgatattcaagcatggaagaaacagtgtgaagaattgttaaatctcatatttcaatgtgaagattcagagcctttccgtcagccggtagatctccttgaatatccagactacagagacatcattgacactccaatggattttgctaccgttagagaaactttagaggctgggaattatgagtcaccaatggagttatgtaaagatgtcagacttattttcagtaattccaaagcatatacaccaagcaaaagatcaaggatttacagcatgagtttgcgcctgtctgctttctttgaagaacacattagttcagttttatcagattataaatctgctcttcgttttcataaaagaaataccataaccaaaaggaggaagaaaagaaacagaagcagctctgtttccagtagtgctgcatcaagccctgaaaggaaaaaaaggatcttaaaaccccagctaaaatcagaaagctctacctctgcattctctacacctacacgatcaataccgccaagacacaatgctgctcagataaacggtaaaacagaatctagttctgtggttcgaaccagaagcaaccgagtggttgtagatccagttgtcactgagcaaccatctacttcttcagctgcaaagacttttattacaaaagctaatgcatctgcaataccagggaaaacaatactagagaattctgtgaaacattccaaagctttgaatactctttccagtcctggtcaatccagttttagtcatggcactaggaataattctgcaaaagaaaacatggaaaaggaaaagccagtcaaacgtaaaatgaagtcatctgtactcccaaaggcgtccactctttcaaagtcatcagctgtcattgagcaaggagattgtaagaacaacgctcttgtaccaggaaccattcaagtaaatggccatggaggacagccatcaaaacttgtgaagaggggacctggaaggaaacctaaagtagaagttaataccaatagtggtgaaattatacacaagaaaaggggtagaaagcccaaaaagctacagtatgcaaagccagaagatttagagcaaaataatgtgcatcccatcagagatgaagtacttccttcttcaacatgcaattttctttctgaaactaataatgtaaaggaagatttgttacagaaaaagaatcgtggaggtaggaagcccaaaaggaagatgaagacacaaaaattagatgcagatctcctagtccctgcaagtgtcaaagtgttaaggagaagtaaccgaaaaaagatagatgatcctatagatgaggaagaagagtttgaagaactcaaaggctctgaaccccacatgagaactagaaatcaaggtcgaaggacagctttctataatgaggatgactctgaagaggagcaaaggcagctgttgttcgaagacacctctttaacttttggaacttctagtagaggacgagtccgaaagttgactgaaaaagcaaaagctaatttaattggttggtaacttgtaccaaaatattttacttcaaaatctataaagcaggtacagttaaggaataagtagaactaaggcttctgcttccttgctgctgtggtggagtagggaatgttatgatttgatttgcaaaaaaaaaaaaaaaaaaaaaaacaaacttacgagacacttcacttctttaaatgaatatatatatatatatataaatatatacatatatattttaaatgtttgctatttattgcccttagataggttatgcattttcacattcatttcattcactgtttgaaacgaaagaaattgatctataatgaattcctgatttatttatagaaaagacaattctgctacactctttaggagcataatattcctagtgatagagcatttcatgttaaaatgaattatttttgaccaagtgaggtacatttctattgatacaagtcatgcccctaaaagatagatgttatacagagtagcagtgaattaagaaatgtttcctctaaaagataaatataaaatttccaccatttgataccctaaacagtttaattttaattatagaatgttcatctacaaagtatctagaggaggcttttgctttattccatttctgccaaacaagagaaaatgtactgatgaagggaaacatatccacattggaaaacatttgactgtctaatttttcagaccttgattcttatatcactcaatctctgtttattgtgccaaagactgagaatcagtgcagtggaaagcctgtttttgacgtcaggacagcatacacttttcaatattggaaaggctatatattctaaagagcaagttattaaagagttatgctgagatatatctttttttggtactaatagaaaataatgcactggtgggtcctttgacagagatgttctagaggaaatgtttaagtggttaaaggattcaaggaaaatacaggaaaaaaggtatgggatttgatgtttacttgttgatctggattaatgtcatttctaaactttagacatatctaatagcctaaaatgacttacaaagaaacgtgtctgtgtgtgtatgtgtatatattgataaatgggtataattaaatatatatacaaacacatacttatatactattacccaggtataaattcttttttcaggattttttagatagcagtagaataaaaataattttaaaatgtcatactttatagtttaattttaagggggaaattggttattttcaattattaaaggttaaaataggccaaatcactttttatgcaatcatgttttatacagtggtctcattgcacattgtgttttttctgcactttttacggtatccttatcatgctggtatgtcaatatacaccctaaagaaaaactccatttaatgattgtgccttgtattctattattttttgcatcattagtaaaattaagttgtctattgtaaatgataactatatgacttaggagaatgtattgctatatgtactgctatggaaaaggaaagcagttatttatttgtttatggtacagttagttattttataccttaaaaaccaacatacttaccatttctattgtttaaaaattactgtccatttttttaaaaatttaaagaatgtagtattttctgaggactggtatggtacaaaaatgtaatcaaaattttcagatactacatttttaaaaagtgaggatggggaaaatatgtatcagcatgaccctgatgtagaaaaataaagtctgcaattgaaccttggcaaaatacattacataattatttctgataaggataaatattagctgtcatttaactgtcgtgaagaatgaaaaagtgatacatttgggctttttagatcatttgtaactaaatttgtacagaaattctcctgtgaaattaagtaaaccattttccagatcttgactgcattgctgagattttgcagttgaaaaataatttcaaatttttcaggttttttgtatatttatttttttctaacaaatatatttaactataaaattaaaattcagtagttaaactcttcataatgcagaaatggatggcttgattgtatagaaaaatgagtctttcagttacaccattcttgaaaataatagtgtatgtttgaaatttgtcattaattagttgcttttgaaggcaatctatttgaaatatgtaatttcctgatgttatctgcattgtgttaagaaaaaaataataggctataaaatcaatttttgtaaaaaaaatgtacagttttaagttgtgtacagaaaaaggaagagcgtacacagtcttagagtggaatatacctctagtacagtgtatgtgttaattccaactcaagcaaagaaatgagtatttaccatctttcctataacatgtaaatgtattattcctgttctacagacactgtatatttatgaccttatttggacattattagacactggtttcttagtaaagcacagtaacttggatcagattctttgtaaccgaaacacttaaacatgtattagtaataccaatatatttagattttatatttttataatttagcttctatgcattacagaagttgaattaagaaatttaagtcatcaccatatttttgttttctttaccacttgggaaaataatcctctttgaggcagtaacactatgtatgtactgttaataggccagaaagaaatattggcagttgtcttaggtaagcaataaaaacatctccaatttactgaaagttcagaaatataactcttacatgcatggaaagtgtaaaccaatttaggtatttctaagtacccaaccctagtattctctccctcaactccaacattctcaagtcccagatgaaaagtttcagtggagcattagtttaaatatttagtctaatcagagactcacagccctgggcaatagatacatagctttttaaaattttatcctttgtgacctgctatagtggcattggactattttctgcatgtattataaactaaagattggccttatttcaattgtttttattgcacaacttcactacaaatttaaagactgctggcattattataaaactgtcttcctccaatccaagtaaataagtatgtggaatatttgtgagctggattaggtaacatctgagacttgggattgactaaatttagttatcacttggaaatgaattacataagatacagtaatcagagaaaatatctttatgcagcatgtatgttaacatctagaactgtccctcatctgcagtgcagtagaggaatcagacattttaagaaatgtattcaaatatttttatcttatatgttagcagcatttacatgttttcagatatgatttgtaatataaattaatttctccagttaacaatgtttacttcaattctgacattccattttatacatatatacctactgtatatctctctcaaatgtcagctagaagcaactttttcagttttctatctaatgaaaacggatatattctgaatgtttttgttacctgaaatttatttttgagtaggttgaaaggaccaagatacttgagtgattaaaggactgtaagtgttctgcttatatgcaggagttacatgattttaaaagtcataataggggaagtagttttatcatctgattactcctattaacctaaaaagtatttctaacataacagattgagcagtggttttgttacacttaggcaagaatttattttcccattaaaatttgaaaaatacacttttctttgcttctacccttgcagtttcccttagttcccctaatttccaagtgatctgaactaaaattaatattacatttactaagaaactatttttgttaattatactgagcaaagtttgctccaaatgaaaagtcattacgaactatgtatagtacccaagaaaaggtcaaattgagtcagaagactgtaagtaccacttttggcgctccagagataaaccttgtacacactgcagtagaacagtgagtagaaaatatgagctataaatagatattatttttagttttgatagctctgtgttgaaatacttttttaatgcagataaaaattatcaggaaattaaccttatggcacagaccaaatacttagtgcatggctgagtttctacaattcaaggagccaagaaaataggttcaagatggaatatagtacatgcatataaggcagatgcacacatgctggttactttaagattgtgtgtgttgattagtcacaatgatagactataacatgagacaatacaaagttacatttttggaccatattaaaactgcaagaagacaggggtcttactgaagatcttttagaaaacttaaatcctgtcacaggatatttagacatgtgtagaatgtagctcaatttttaaaaagtaactgacctagagggtgaaagttgaaactgacacattttcaaattaagattatgcttattttgtacagaaaacaatgtttaaacacaagcagatctgttgtatgtaataagtaacacagagttttaaaacaaattaattatttagctttattgaagtttgtttttttccttccgaacctggagtatcatattataaacagcagtttcacaccagaatagcagtgccctttctttttgtacatactgattggacctttctttactgttacgtggacactttctatgttagttttgatgcataattctttgaatccttttatacaaactagaatgtatgtgtaagaatacctgtccctgcaatgtagtaactacaaacttatttttaaataaatagaaaacttgtttttctaagcta

SEQ ID NO: 166678 - DNA, 8069 bp, Homo sapiens
  Payload ID: 12815
  Gene Symbol: PHLDA1
  Gene Name: pleckstrin homology-like domain, family A, member 1
  Uniprot ID: Q8WV24
  ENST ID: ENST00000266671
  CDS Start-End: 2192-3397
tttttttttttaagttattttctgtaatgcattttctgtgaatttattgtcttaaaaattggcaaatatggccattttgacatatttgccaaatatgagcatatggcaactatgctcttaatttgttaagtcaccaactgttggtggtaactgttgaaataacaagagcaaagttatcaccaatctacgggatccttacactactgatattttcaataatgcaccgtagtcagacattgtagacttaacctctgagctgctcacaaaattactaaatcattctgaaatacgtaactgcaaattctgggctttaaagtctctagttaaatgggtgattttgaaaattggtggctgttcagacattttcaaatgagaatagaatgcatttgtttcagactgataaactgcagaaggttagataacaccaaacacatttgagtttctcctaagaaaatgacttgggcctccagattacatctcattttttttttttttaccctatcaagtttgtttttccatatgaaatgtctttcccaactacacctgcccttggagactgtgaataacagacttaaaggaagtatcctttccagatgagctgaagaatgtcatcctcttaaaagaatgaacagctggtcatgtagaaattctctggaatgctcacttgtcctacaaaggcaggggagcagaaaacatgtagtttttttgttattggtatacataattgtaaatcttcgagataattttactagaagtccacataattttaataattgcctttctcctgaaaagattgctaataaattaacaatgtgaaggctagaaagctggccaagcataatccggtgggactcaggattgctggctggattgtcccgtttgatcagacattgtttcttagatgaatattcaggacgccctcgtgtataaaagttgtcctttgttctgactaccttggtattaagttcgaatttcttaccatgacacacaaaggattcgattcttgcttagctctctaagctcctctcactttctcttcccctcttgaattctttgctcttgccacacaactagcagatgaactaatctatctgttccaacgtgggcacagtagcagccgtaactcttaccttggcccactctgacttgtccagccctggttgaattcttcgtatccccgtgagggtccgcacgtagttggggctgtttactaaacggatgaacttccctaccgggaggctaggtctcggttatgccttacttcccaggaagcggcttctataggcattgtttaaatgtaggagtaggagggagctgggggtattgcattccccaggtcacagataaatgagattccaaaaccaagatctggctaggccttggaaagagggacctgcgaggccgaccagacgtttggaactgcgccttgcagtgtgggatctcagcaccggatattaccccggtttgtagagagttgagttactgttttaagagacgttgcaaaccgtacgggtcaagaagaaagccgaagacgggttagcgcctgcggtcggggtcgagaaaagcaggcgagatgcgacctgacgtgggtccgcctctctccacccgtggcaagcccgacagtcgcactattgctttaacaatcgccctctttccaagaagagctacttagtgaccgtgagcgaatatgcgtgggaagacacgatgtcctctcggcctctgtgcgctcagttgtttacctaggcgtccgggggaggcacactcgcgggactcgcgggactcggccccggcctcccagctcgcccaggacacgacgctggttctgcgggctctcggagcccagcgcgaatcccccgggctaattcccaagaaccgagaggcagcactgcctggaggctgcccccgcctccgcgcccccgtcctcactttctgaggctgttagcagagagtcccgcgggccggggagaagcgggacgcgggggatggcctcgcagcgccctgtgagcgtcggcagtagtcaggcagccagggctccttgggcgatcgccctgggtagaggagaggagtttccggggctcgggtccgggtcgccttccaggggaacgagcgcggaagcaagtgggcggcgagaggcggagcaagagacgctggagggcgtggacgcagcgggctttggaaaggccccaagttaatgaggcgtgcgccggctgccgagcgcctcttggagctgggctttcccccgcggtgcgggcgccaggagccgccttttccgctgggtgtcactcgggggtggggaagatggcccattcaaaagcgccgcgagggggcccggccagtgcccttcagtgagcgctcgcaagaggacggcagaggcccggcagctcggagctccgggaccttgtggcgcatcaggacgcggctgtccctctgccgggacccagagccgccgccgccgctctgcctcctgcgtgttagcctcctctgcgcgctccgggcaggcggccgtgggagccgctggggcgaggacggcgcgaggctgctgctgctgcccccggcccgcgcggctggaaacggagaggccgagccaagcggcggcccctcttatgctgggaggatgctggagagtagcggctgcaaagcgctgaaggagggcgtgctggagaagcgcagcgacgggttgttgcagctctggaagaaaaagtgttgcatcctcaccgaggaagggctgctgcttatcccgcccaagcagctgcaacaccagcagcagcagcagcaacagcagcagcagcagcagcaacaacagcccgggcaggggccggccgagccgtcccaacccagtggccccgctgtcgccagcctcgagccgccggtcaagctcaaggaactgcacttctccaacatgaagaccgtggactgtgtggagcgcaagggcaagtacatgtacttcactgtggtgatggcagagggcaaggagatcgactttcggtgcccgcaagaccagggctggaacgccgagatcacgctgcagatggtgcagtacaagaatcgtcaggccatcctggcggtcaaatccacgcggcagaagcagcagcacctggtccagcagcagcccccctcgcagccgcagccgcagccgcagctccagccccaaccccagcctcagcctcagccgcaaccccagccccaatcacaaccccagcctcagccccaacccaagcctcagccccagcagctccacccgtatccgcatccacatccacatccacactctcatcctcactcgcacccacaccctcacccgcacccgcatccgcaccaaataccgcacccacacccacagccgcactcgcagccgcacgggcaccggcttctccgcagcacctccaactctgcctgaaaggggcagctcccgggcaagacaaggttttgaggacttgaggaagtgggacgagcacatttctattgtcttcacttggatcaaaagcaaaacagtctctccgccccgcaccagatcaagtagtttggacatcaccctactgaaaacttgcgattcttcttagttttctgcatacttttcatcacgatgcaggaaacgatttcgagtcaagaagacttttatttatgaacctttgaaaggatcgtcttgtatggtgaattttctaggagcgatgatgtactgtaattttattttaatgtattttgatttatgattatttattagtttttttttaaatgcttgttctaagacatttctgaatgtagaccattttccaaaaaggaaactttattttcaaaaacctaatccgtagtaattcctaatcttggagaataaaaaagggcggtggaggggaaaacattaagaatttattcattatttctcgagtactttcagaaagtctgacactttcattgttgtgccagctggttgaaattaaaactctgatattactttttttgaggatttttatttttgtttttgcttaaacatatagtttgtctagaagtttaaaaagctaaaagttaaaaatggtgtaattatgaaaatctaacactcaagatagtttctaaaaggaaatcagtagttaaggatacctgatttcaaaatatttaaagcataacctaactgatggtaggatgattgtatcttgaatatgtggtagggccacatctattgtaggaaaaccttgcttttatcatctgtgtgtaaagggcttaataaggagaagaggccttttgactgatttgtgagtataaatgcatttgctgtttcatttcaaaaatgttgtggaggaaaagagtacatttaacttgtataagagaatatttgtactcctgtccaggctgcaggacctttcttcgagagctttgcacacttgacttgaaccacattttctgatccctttactttgttttagaagcacactgaaaaatctcgttgtttaaagtacaatttgtaaatatttcaaaggtctaggagtcataacttttgttttcatactgaaaatgatgttgatcagagaaaccaactgttttgcttttcattgctctgtgagaaatttgaggattctgttttgctgttaggtaagctaaactcagaaattgaaaaggaaaagactggataaacacaggattttcagtaagaaaacaaccccagtcttgtcttagaagccacttgttgaggagtctgttgggggaaaaaagaggatatgcttttaaaggtagaacaaaccttcttctgtgttaaatcaaaaggatgttcaaaatccaccaggacagatgctacttgggtttaaatggagccatagatgatacaaagtcctcttggggctgaaaatcacttcctatttgcatggctttactaactggtttctgttttccattatctttttcacagaaagtcttggtcagtatttttccagcatttaaattgaaacggtcagtattagaccactgctaggttatgtagtcaagaaataaaaatagaattacatgctacagatgtctttattctccttccatctagaaaggagttccaaggtcaaattactttttagtgcaatagttaaatgacattttgagatcataactcatatccaaaaagttgcagggaaaattaaaatagctttcccctattaagctaatggcaaacaaaacttaagtggacccccacttccagtggttgtttaggttgcagttgtgaaaatatgctgccaacatttaaaaacttgtttcatatgtatatatgtatacacatatatgaatatgtatgtatatatacatatatgagaacatgtgtgtacacatatatgaatatgtatatatgtgtatgtatgtatatatgtatatgaaatgagagccacatctaaagatttcttaaatcaagtttggttcagcttccttagaactgtggctgtactttttgaggagtacctcatagtactatatttttaatgcatgcaaatcataatagctccaaatgaaccacagttttttcccaatggaggatttttttttaattcttgtactaaaaaaaaaaaatccataccaaatatttttacaaattaagattgatgtaggttttaaaaaaggcatttgtatgttgttagcttacatatggggctaggtaatttcattgcttaaaaagatgcgcctaggctccctcttggtggctggatttctttttcttcgcccgtggtggccatggttcttaatagggccaccggaatcatggtttctttttttttttttttttttgagatggagtctcgccctgtgacccaggctggagtgcagtggcacgatctcggctcactgcaacctctgcctcctgggttcacgccattctcctgtctcagcctcctgagtagctgggactacaggtgaatgccaccacgcccggctgatttttgtatttttagtagagatggggtttcaccatagtggtcaggctgttctcgaactcctgacctcaggtgatccacctgccttggcctcccaaagtgctaggattacaggtgtgagccaccacacccggccccagaataatggtttcttgactttctgtagcccttgttccttagtctgctgtgatatttatgttgacctttatcattttctattctgaacccctcttagcatttaatgtgaaatctaagaaattagaagtagaatggcttttattgttttgacacctttgaaattattattaataatttttccagagcaaaaaagcaaacacgctcaataagactaaacaaaacaaaatataaatgtacatcatttaatgtcccagtggctctattctacctgtaagaaaatgatacaaaaccacctaagatattttgaagcctgacaaatcagcttcatggaaaaaggtaaaaaatgcatttttcaaccgaaagggcagatccaatagaagacccgctccttaaataaacataaaatgtaaaaagttggaaaattaagagtaatgttccatctggaaactgaacttttgtccttgaacttgtgttggcaccaagcctcatacacagtgagctcaataactgttgggacaaaggaaggaaggacaaaatgtgtaacttcccagcatctgggagatgctgtctcttgcctcactgagtgttccttttctttgctctcatgtcattccctgagaacaatgaattctgggacaggctaaacatcatgatgaagtttcttaaacagactttcttagtggaaatccatttagatctgggtgtgctctatggggagtgctgacgtcaaagagcaaatgtctataaggggcccttttaaaatgaacattttcctcattgagcaagctgggattctctaatgtagaaatcaagccatctttataatttcacttcagatgtttatgtttttgttttttttgtctccaatgatggtaaaaataaaaactacgcattacttaaaggagtttccctcacatgtaaacactgttaggaagtctggattaagttgaaagtcctgttttaactttttttctctcatataccaaacactctgtatttctcttaaagaagccctttaagagaaagccctaattttatatctgacagtaaagtttgctgcaagtgtatgagttcaaacacatcccttgttttctgtccctaggggaaaagtcatgtagttttagcttggctccagtgttaatattatattcagtagcagccttagaagagtggtctaagacttgaacctggagcaattttatagcacagaatcctacgaagataggactgtgaacatttgttttctttttcgtgtgtgtcaaactaactggtttttgctttaccaataaaatgtcctcggcagagtaaattttaaacgtgaaaattatagatcttgatattgaatccatcagtgattcaagagatacacctatttgcctaaaacaacctaagatgtattggttatggaatcatgtgttggataggttcttaagacctgtttcctcaaatcttgacacagttttcaagggtggcttattgacttgcacggttgggcagataatccagatttacctaagattgggtaaaaaagtcatctgtgactttgctggcagggcatttgctaagtggagtacaggatctaaaagggttttcttagaaagggcaatattgtccaatgaagtaagcagaaggactctgggttagaagcatctgcacaaaaactggtgagacctactctccactgctctgcagctggatggctgatggcaggctgagcagtggggaagcaggttttaacaacagggagtccttccaggtcactgtatattgagaagaaacataaaactattgtctgttacattccgaggtcagccttcttcttaacgttttataatatgcaaatgccagcttctggaaagcaagtatcatcatgtaccaaatgctttatacaccatcacattcatgaattttttagcatggtcagaacttgtgtaaatatgtctcttagatgattttggggagatgtgatttatttttcatattttcaaaatgcatttcatttcaaataaagttatctattgagacaaccga

SEQ ID NO: 166679 - DNA, 5741 bp, Homo sapiens
  Payload ID: 12815
  Gene Symbol: PHLDA1
  Gene Name: pleckstrin homology-like domain, family A, member 1
  ENST ID: ENST00000602540
  CDS Start-End: 287-1069
ccggccagtgcccttcagtgagcgctcgcaagaggacggcagaggcccggcagctcggagctccgggaccttgtggcgcatcaggacgcggctgtccctctgccgggacccagagccgccgccgccgctctgcctcctgcgtgttagcctcctctgcgcgctccgggcaggcggccgtgggagccgctggggcgaggacggcgcgaggctgctgctgctgcccccggcccgcgcggctggaaacggagaggccgagccaagcggcggcccctcttatgctgggaggatgctggagagtagcggctgcaaagcgctgaaggagggcgtgctggagaagcgcagcgacgggttgttgcagctctggaagaaaaagtgttgcatcctcaccgaggaagggctgctgcttatcccgcccaagcagctgcaacaccagcagcagcagcagcaacagcagcagcagcagcagcaacaacagcccgggcaggggccggccgagccgtcccaacccagtggccccgctgtcgccagcctcgagccgccggtcaagctcaaggaactgcacttctccaacatgaagaccgtggactgtgtggagcgcaagggcaagtacatgtacttcactgtggtgatggcagagggcaaggagatcgactttcggtgcccgcaagaccagggctggaacgccgagatcacgctgcagatggtgcagtacaagaatcgtcaggccatcctggcggtcaaatccacgcggcagaagcagcagcacctggtccagcagcagcccccctcgcagccgcagccgcagccgcagctccagccccaaccccagcctcagcctcagccgcaaccccagccccaatcacaaccccagcctcagccccaacccaagcctcagccccagcagctccacccgtatccgcatccacatccacatccacactctcatcctcactcgcacccacaccctcacccgcacccgcatccgcaccaaataccgcacccacacccacagccgcactcgcagccgcacgggcaccggcttctccgcagcacctccaactctgcctgaaaggggcagctcccgggcaagacaaggttttgaggacttgaggaagtgggacgagcacatttctattgtcttcacttggatcaaaagcaaaacagtctctccgccccgcaccagatcaagtagtttggacatcaccctactgaaaacttgcgattcttcttagttttctgcatacttttcatcacgatgcaggaaacgatttcgagtcaagaagacttttatttatgaacctttgaaaggatcgtcttgtatggtgaattttctaggagcgatgatgtactgtaattttattttaatgtattttgatttatgattatttattagtttttttttaaatgcttgttctaagacatttctgaatgtagaccattttccaaaaaggaaactttattttcaaaaacctaatccgtagtaattcctaatcttggagaataaaaaagggcggtggaggggaaaacattaagaatttattcattatttctcgagtactttcagaaagtctgacactttcattgttgtgccagctggttgaaattaaaactctgatattactttttttgaggatttttatttttgtttttgcttaaacatatagtttgtctagaagtttaaaaagctaaaagttaaaaatggtgtaattatgaaaatctaacactcaagatagtttctaaaaggaaatcagtagttaaggatacctgatttcaaaatatttaaagcataacctaactgatggtaggatgattgtatcttgaatatgtggtagggccacatctattgtaggaaaaccttgcttttatcatctgtgtgtaaagggcttaataaggagaagaggccttttgactgatttgtgagtataaatgcatttgctgtttcatttcaaaaatgttgtggaggaaaagagtacatttaacttgtataagagaatatttgtactcctgtccaggctgcaggacctttcttcgagagctttgcacacttgacttgaaccacattttctgatccctttactttgttttagaagcacactgaaaaatctcgttgtttaaagtacaatttgtaaatatttcaaaggtctaggagtcataacttttgttttcatactgaaaatgatgttgatcagagaaaccaactgttttgcttttcattgctctgtgagaaatttgaggattctgttttgctgttaggtaagctaaactcagaaattgaaaaggaaaagactggataaacacaggattttcagtaagaaaacaaccccagtcttgtcttagaagccacttgttgaggagtctgttgggggaaaaaagaggatatgcttttaaaggtagaacaaaccttcttctgtgttaaatcaaaaggatgttcaaaatccaccaggacagatgctacttgggtttaaatggagccatagatgatacaaagtcctcttggggctgaaaatcacttcctatttgcatggctttactaactggtttctgttttccattatctttttcacagaaagtcttggtcagtatttttccagcatttaaattgaaacggtcagtattagaccactgctaggttatgtagtcaagaaataaaaatagaattacatgctacagatgtctttattctccttccatctagaaaggagttccaaggtcaaattactttttagtgcaatagttaaatgacattttgagatcataactcatatccaaaaagttgcagggaaaattaaaatagctttcccctattaagctaatggcaaacaaaacttaagtggacccccacttccagtggttgtttaggttgcagttgtgaaaatatgctgccaacatttaaaaacttgtttcatatgtatatatgtatacacatatatgaatatgtatgtatatatacatatatgagaacatgtgtgtacacatatatgaatatgtatatatgtgtatgtatgtatatatgtatatgaaatgagagccacatctaaagatttcttaaatcaagtttggttcagcttccttagaactgtggctgtactttttgaggagtacctcatagtactatatttttaatgcatgcaaatcataatagctccaaatgaaccacagttttttcccaatggaggatttttttttaattcttgtactaaaaaaaaaaaatccataccaaatatttttacaaattaagattgatgtaggttttaaaaaaggcatttgtatgttgttagcttacatatggggctaggtaatttcattgcttaaaaagatgcgcctaggctccctcttggtggctggatttctttttcttcgcccgtggtggccatggttcttaatagggccaccggaatcatggtttctttttttttttttttttttgagatggagtctcgccctgtgacccaggctggagtgcagtggcacgatctcggctcactgcaacctctgcctcctgggttcacgccattctcctgtctcagcctcctgagtagctgggactacaggtgaatgccaccacgcccggctgatttttgtatttttagtagagatggggtttcaccatagtggtcaggctgttctcgaactcctgacctcaggtgatccacctgccttggcctcccaaagtgctaggattacaggtgtgagccaccacacccggccccagaataatggtttcttgactttctgtagcccttgttccttagtctgctgtgatatttatgttgacctttatcattttctattctgaacccctcttagcatttaatgtgaaatctaagaaattagaagtagaatggcttttattgttttgacacctttgaaattattattaataatttttccagagcaaaaaagcaaacacgctcaataagactaaacaaaacaaaatataaatgtacatcatttaatgtcccagtggctctattctacctgtaagaaaatgatacaaaaccacctaagatattttgaagcctgacaaatcagcttcatggaaaaaggtaaaaaatgcatttttcaaccgaaagggcagatccaatagaagacccgctccttaaataaacataaaatgtaaaaagttggaaaattaagagtaatgttccatctggaaactgaacttttgtccttgaacttgtgttggcaccaagcctcatacacagtgagctcaataactgttgggacaaaggaaggaaggacaaaatgtgtaacttcccagcatctgggagatgctgtctcttgcctcactgagtgttccttttctttgctctcatgtcattccctgagaacaatgaattctgggacaggctaaacatcatgatgaagtttcttaaacagactttcttagtggaaatccatttagatctgggtgtgctctatggggagtgctgacgtcaaagagcaaatgtctataaggggcccttttaaaatgaacattttcctcattgagcaagctgggattctctaatgtagaaatcaagccatctttataatttcacttcagatgtttatgtttttgttttttttgtctccaatgatggtaaaaataaaaactacgcattacttaaaggagtttccctcacatgtaaacactgttaggaagtctggattaagttgaaagtcctgttttaactttttttctctcatataccaaacactctgtatttctcttaaagaagccctttaagagaaagccctaattttatatctgacagtaaagtttgctgcaagtgtatgagttcaaacacatcccttgttttctgtccctaggggaaaagtcatgtagttttagcttggctccagtgttaatattatattcagtagcagccttagaagagtggtctaagacttgaacctggagcaattttatagcacagaatcctacgaagataggactgtgaacatttgttttctttttcgtgtgtgtcaaactaactggtttttgctttaccaataaaatgtcctcggcagagtaaattttaaacgtgaaaattatagatcttgatattgaatccatcagtgattcaagagatacacctatttgcctaaaacaacctaagatgtattggttatggaatcatgtgttggataggttcttaagacctgtttcctcaaatcttgacacagttttcaagggtggcttattgacttgcacggttgggcagataatccagatttacctaagattgggtaaaaaagtcatctgtgactttgctggcagggcatttgctaagtggagtacaggatctaaaagggttttcttagaaagggcaatattgtccaatgaagtaagcagaaggactctgggttagaagcatctgcacaaaaactggtgagacctactctccactgctctgcagctggatggctgatggcaggctgagcagtggggaagcaggttttaacaacagggagtccttccaggtcactgtatattgagaagaaacataaaactattgtctgttacattccgaggtcagccttcttcttaacgttttataatatgcaaatgccagcttctggaaagcaagtatcatcatgtaccaaatgctttatacaccatcacattcatgaattttttagcatggtcagaacttgtgtaaatatgtctcttagatgattttggggagatgtgatttatttttcatattttcaaaatgcatttcatttcaaataaagttatctattgagacaaccga

SEQ ID NO: 166680 - DNA, 5913 bp, Homo sapiens
  Payload ID: 12815
  Gene Symbol: PHLDA1
  Gene Name: pleckstrin homology-like domain, family A, member 1
  Uniprot ID: Q8WV24
  ENST ID: ENST00000619060
  CDS Start-End: 36-1241
gtggacgcagcgggctttggaaaggccccaagttaatgaggcgtgcgccggctgccgagcgcctcttggagctgggctttcccccgcggtgcgggcgccaggagccgccttttccgctgggtgtcactcgggggtggggaagatggcccattcaaaagcgccgcgagggggcccggccagtgcccttcagtgagcgctcgcaagaggacggcagaggcccggcagctcggagctccgggaccttgtggcgcatcaggacgcggctgtccctctgccgggacccagagccgccgccgccgctctgcctcctgcgtgttagcctcctctgcgcgctccgggcaggcggccgtgggagccgctggggcgaggacggcgcgaggctgctgctgctgcccccggcccgcgcggctggaaacggagaggccgagccaagcggcggcccctcttatgctgggaggatgctggagagtagcggctgcaaagcgctgaaggagggcgtgctggagaagcgcagcgacgggttgttgcagctctggaagaaaaagtgttgcatcctcaccgaggaagggctgctgcttatcccgcccaagcagctgcaacaccagcagcagcagcagcaacagcagcagcagcagcagcaacaacagcccgggcaggggccggccgagccgtcccaacccagtggccccgctgtcgccagcctcgagccgccggtcaagctcaaggaactgcacttctccaacatgaagaccgtggactgtgtggagcgcaagggcaagtacatgtacttcactgtggtgatggcagagggcaaggagatcgactttcggtgcccgcaagaccagggctggaacgccgagatcacgctgcagatggtgcagtacaagaatcgtcaggccatcctggcggtcaaatccacgcggcagaagcagcagcacctggtccagcagcagcccccctcgcagccgcagccgcagccgcagctccagccccaaccccagcctcagcctcagccgcaaccccagccccaatcacaaccccagcctcagccccaacccaagcctcagccccagcagctccacccgtatccgcatccacatccacatccacactctcatcctcactcgcacccacaccctcacccgcacccgcatccgcaccaaataccgcacccacacccacagccgcactcgcagccgcacgggcaccggcttctccgcagcacctccaactctgcctgaaaggggcagctcccgggcaagacaaggttttgaggacttgaggaagtgggacgagcacatttctattgtcttcacttggatcaaaagcaaaacagtctctccgccccgcaccagatcaagtagtttggacatcaccctactgaaaacttgcgattcttcttagttttctgcatacttttcatcacgatgcaggaaacgatttcgagtcaagaagacttttatttatgaacctttgaaaggatcgtcttgtatggtgaattttctaggagcgatgatgtactgtaattttattttaatgtattttgatttatgattatttattagtttttttttaaatgcttgttctaagacatttctgaatgtagaccattttccaaaaaggaaactttattttcaaaaacctaatccgtagtaattcctaatcttggagaataaaaaagggcggtggaggggaaaacattaagaatttattcattatttctcgagtactttcagaaagtctgacactttcattgttgtgccagctggttgaaattaaaactctgatattactttttttgaggatttttatttttgtttttgcttaaacatatagtttgtctagaagtttaaaaagctaaaagttaaaaatggtgtaattatgaaaatctaacactcaagatagtttctaaaaggaaatcagtagttaaggatacctgatttcaaaatatttaaagcataacctaactgatggtaggatgattgtatcttgaatatgtggtagggccacatctattgtaggaaaaccttgcttttatcatctgtgtgtaaagggcttaataaggagaagaggccttttgactgatttgtgagtataaatgcatttgctgtttcatttcaaaaatgttgtggaggaaaagagtacatttaacttgtataagagaatatttgtactcctgtccaggctgcaggacctttcttcgagagctttgcacacttgacttgaaccacattttctgatccctttactttgttttagaagcacactgaaaaatctcgttgtttaaagtacaatttgtaaatatttcaaaggtctaggagtcataacttttgttttcatactgaaaatgatgttgatcagagaaaccaactgttttgcttttcattgctctgtgagaaatttgaggattctgttttgctgttaggtaagctaaactcagaaattgaaaaggaaaagactggataaacacaggattttcagtaagaaaacaaccccagtcttgtcttagaagccacttgttgaggagtctgttgggggaaaaaagaggatatgcttttaaaggtagaacaaaccttcttctgtgttaaatcaaaaggatgttcaaaatccaccaggacagatgctacttgggtttaaatggagccatagatgatacaaagtcctcttggggctgaaaatcacttcctatttgcatggctttactaactggtttctgttttccattatctttttcacagaaagtcttggtcagtatttttccagcatttaaattgaaacggtcagtattagaccactgctaggttatgtagtcaagaaataaaaatagaattacatgctacagatgtctttattctccttccatctagaaaggagttccaaggtcaaattactttttagtgcaatagttaaatgacattttgagatcataactcatatccaaaaagttgcagggaaaattaaaatagctttcccctattaagctaatggcaaacaaaacttaagtggacccccacttccagtggttgtttaggttgcagttgtgaaaatatgctgccaacatttaaaaacttgtttcatatgtatatatgtatacacatatatgaatatgtatgtatatatacatatatgagaacatgtgtgtacacatatatgaatatgtatatatgtgtatgtatgtatatatgtatatgaaatgagagccacatctaaagatttcttaaatcaagtttggttcagcttccttagaactgtggctgtactttttgaggagtacctcatagtactatatttttaatgcatgcaaatcataatagctccaaatgaaccacagttttttcccaatggaggatttttttttaattcttgtactaaaaaaaaaaaatccataccaaatatttttacaaattaagattgatgtaggttttaaaaaaggcatttgtatgttgttagcttacatatggggctaggtaatttcattgcttaaaaagatgcgcctaggctccctcttggtggctggatttctttttcttcgcccgtggtggccatggttcttaatagggccaccggaatcatggtttctttttttttttttttttttgagatggagtctcgccctgtgacccaggctggagtgcagtggcacgatctcggctcactgcaacctctgcctcctgggttcacgccattctcctgtctcagcctcctgagtagctgggactacaggtgaatgccaccacgcccggctgatttttgtatttttagtagagatggggtttcaccatagtggtcaggctgttctcgaactcctgacctcaggtgatccacctgccttggcctcccaaagtgctaggattacaggtgtgagccaccacacccggccccagaataatggtttcttgactttctgtagcccttgttccttagtctgctgtgatatttatgttgacctttatcattttctattctgaacccctcttagcatttaatgtgaaatctaagaaattagaagtagaatggcttttattgttttgacacctttgaaattattattaataatttttccagagcaaaaaagcaaacacgctcaataagactaaacaaaacaaaatataaatgtacatcatttaatgtcccagtggctctattctacctgtaagaaaatgatacaaaaccacctaagatattttgaagcctgacaaatcagcttcatggaaaaaggtaaaaaatgcatttttcaaccgaaagggcagatccaatagaagacccgctccttaaataaacataaaatgtaaaaagttggaaaattaagagtaatgttccatctggaaactgaacttttgtccttgaacttgtgttggcaccaagcctcatacacagtgagctcaataactgttgggacaaaggaaggaaggacaaaatgtgtaacttcccagcatctgggagatgctgtctcttgcctcactgagtgttccttttctttgctctcatgtcattccctgagaacaatgaattctgggacaggctaaacatcatgatgaagtttcttaaacagactttcttagtggaaatccatttagatctgggtgtgctctatggggagtgctgacgtcaaagagcaaatgtctataaggggcccttttaaaatgaacattttcctcattgagcaagctgggattctctaatgtagaaatcaagccatctttataatttcacttcagatgtttatgtttttgttttttttgtctccaatgatggtaaaaataaaaactacgcattacttaaaggagtttccctcacatgtaaacactgttaggaagtctggattaagttgaaagtcctgttttaactttttttctctcatataccaaacactctgtatttctcttaaagaagccctttaagagaaagccctaattttatatctgacagtaaagtttgctgcaagtgtatgagttcaaacacatcccttgttttctgtccctaggggaaaagtcatgtagttttagcttggctccagtgttaatattatattcagtagcagccttagaagagtggtctaagacttgaacctggagcaattttatagcacagaatcctacgaagataggactgtgaacatttgttttctttttcgtgtgtgtcaaactaactggtttttgctttaccaataaaatgtcctcggcagagtaaattttaaacgtgaaaattatagatcttgatattgaatccatcagtgattcaagagatacacctatttgcctaaaacaacctaagatgtattggttatggaatcatgtgttggataggttcttaagacctgtttcctcaaatcttgacacagttttcaagggtggcttattgacttgcacggttgggcagataatccagatttacctaagattgggtaaaaaagtcatctgtgactttgctggcagggcatttgctaagtggagtacaggatctaaaagggttttcttagaaagggcaatattgtccaatgaagtaagcagaaggactctgggttagaagcatctgcacaaaaactggtgagacctactctccactgctctgcagctggatggctgatggcaggctgagcagtggggaagcaggttttaacaacagggagtccttccaggtcactgtatattgagaagaaacataaaactattgtctgttacattccgaggtcagccttcttcttaacgttttataatatgcaaatgccagcttctggaaagcaagtatcatcatgtaccaaatgctttatacaccatcacattcatgaattttttagcatggtcagaacttgtgtaaatatgtctcttagatgattttggggagatgtgatttatttttcatattttcaaaatgcatttcatttcaaataaagttatctattgagacaaccga

SEQ ID NO: 166681 - DNA, 955 bp, Homo sapiens
  Payload ID: 12816
  Gene Symbol: PHLDA2
  Gene Name: pleckstrin homology-like domain, family A, member 2
  Uniprot ID: Q53GA4
  ENST ID: ENST00000314222
  CDS Start-End: 92-550
gcagctataaaggccgcgccggggccacgaggagcagagccggcgccgtcaccgcccgcattgccgctcccagtcccgcgctcggcacgacatgaaatcccccgacgaggtgctacgcgagggcgagttggagaagcgcagcgacagcctcttccagctatggaagaagaagcgcggggtgctcacctccgaccgcctgagcctgttccccgccagcccccgcgcgcgccccaaggagctgcgcttccactccatcctcaaggtggactgcgtggagcgcacgggcaagtacgtgtacttcaccatcgtcaccaccgaccacaaggagatcgacttccgctgcgcgggcgagagctgctggaacgcggccatcgcgctggcgctcatcgatttccagaaccgccgcgccctgcaggactttcgcagccgccaggaacgcaccgcacccgccgcacccgccgaggacgccgtggctgccgcggccgccgcaccctccgagccctcggagccctccaggccatccccgcagcccaaaccccgcacgccatgagcccgccgcgggccatacgctggacgagtcggaccgaggctaggacgtggccggcgctctccagccctgcagcagaagaacttcccgtgcgcgcggatcctcgctccgttgcacgggcgccttaagttattggactatctaatatctatgtatttatttcgctggttctttgtagtcacatattttatagtcttaatatcttgtttttgcatcactgtgcccattgcaaataaatcacttggccagtttgcttttctaccatccggctgtggctcagtgagactcctgctgggagggtggaggcccaggaatgggcgggcaggacaccctcatccagtcctgcggggctggtgtgaaaggcgctgggaaccggctttgaatgaataaatgaatcgtgtcatctgc

SEQ ID NO: 166682 - DNA, 955 bp, Homo sapiens; identical to SEQ ID NO: 166681
  Payload ID: 12816
  Gene Symbol: PHLDA2
  Gene Name: pleckstrin homology-like domain, family A, member 2
  Uniprot ID: Q53GA4
  ENST ID: ENST00000618418
  CDS Start-End: 92-550

SEQ ID NO: 166683 - DNA, 896 bp, Homo sapiens
  Payload ID: 12817
  Gene Symbol: PHLDA3
  Gene Name: pleckstrin homology-like domain, family A, member 3
  Uniprot ID: Q9Y5J5
  ENST ID: ENST00000367309
  CDS Start-End: 230-613
aggggagggccggccagggtaggaatgcgctgcgggcgggcggcgcaggaggcgagcggcggaacatccgggtgctgagggccgcggtgtgggtgcgcggagcagtcagggcgcaggtgggcagcgcgcacggcctgccagcccggggcgccagaatcctgcgctgcggggccgagaggggcgccgcgcccgccgcagcctggagctttccgcgaacctcggggcgcccatgacggcggcggcgacggctaccgtgctcaaggagggcgtgctggagaagcgcagcggcgggctgctgcagctgtggaagcggaagcgctgcgtcctcaccgaacgcgggctgcagctcttcgaggccaagggcacgggcggccggcccaaggagctcagcttcgcccgcatcaaggccgtggagtgcgtggagagcaccgggcgccacatctacttcacgctggtgaccgaagggggcggcgagatcgacttccgctgccccctggaagatcccggctggaacgcccagatcaccctaggcctggtcaagttcaagaaccagcaggccatccagacagtgcgggcccggcagagcctcgggaccgggaccctcgtgtcctaaaccaccgggcgcaccatctttccttcatgctacccaccacctcagtgctgaggtcaaggcagcttcgttgttccctctggcttgtgggggcacggctgtgctccatgtggcaaggtggaaggcatggacgtgtggaggaggcgctggagctgaaggaatggacgagccctgggaggagggcagaaggctacgcagggctgaggatgaagatgcagcccctggatggtcccagactctcaggacatgcccagctcaggggcttcgagccacaggcctggcctca

SEQ ID NO: 166684 - DNA, 2640 bp, Homo sapiens
  Payload ID: 12817
  Gene Symbol: PHLDA3
  Gene Name: pleckstrin homology-like domain, family A, member 3
  Uniprot ID: Q9Y5J5
  ENST ID: ENST00000367311
  CDS Start-End: 399-782
gagcggcggaacatgtaagggcacatcccgcgagctgccgcccagcgcgcagacagagcccaggggagcaagagaacgggcgggcggtggggctcacggcctagggaggcgcggaggcatctggcagaggcgggtcgggctgggccagctggggtagagcggaggagcgggtgccggctgaagcggggcggtgggcgcggagcgcgctgggggcaccgacaccacctcaccggcagccgggtgctgagggccgcggtgtgggtgcgcggagcagtcagggcgcaggtgggcagcgcgcacggcctgccagcccggggcgccagaatcctgcgctgcggggccgagaggggcgccgcgcccgccgcagcctggagctttccgcgaacctcggggcgcccatgacggcggcggcgacggctaccgtgctcaaggagggcgtgctggagaagcgcagcggcgggctgctgcagctgtggaagcggaagcgctgcgtcctcaccgaacgcgggctgcagctcttcgaggccaagggcacgggcggccggcccaaggagctcagcttcgcccgcatcaaggccgtggagtgcgtggagagcaccgggcgccacatctacttcacgctggtgaccgaagggggcggcgagatcgacttccgctgccccctggaagatcccggctggaacgcccagatcaccctaggcctggtcaagttcaagaaccagcaggccatccagacagtgcgggcccggcagagcctcgggaccgggaccctcgtgtcctaaaccaccgggcgcaccatctttccttcatgctacccaccacctcagtgctgaggtcaaggcagcttcgttgttccctctggcttgtgggggcacggctgtgctccatgtggcaaggtggaaggcatggacgtgtggaggaggcgctggagctgaaggaatggacgagccctgggaggagggcagaaggctacgcagggctgaggatgaagatgcagcccctggatggtcccagactctcaggacatgcccagctcaggggcttcgagccacaggcctggcctcatatggcatgagggggagctggcataggagccccctccctgctgtggtcctgccctctgtcctgcagactgctcttagccccctggctttgtgccaggcctggaggagggcagtcccccatggggtgccgagccaacgcctcaggaatcaggaggccagcctggtaccaaaaggagtacccagggcctggtacccaggcccactccagaatggcctctggactcaccttgagaagggggagctgctgggcctaaagcccactcctgggggtctcctgctgcttaggtccttttgggacccccacccatccaggccctttctttgcacacttcttcccccacctctacgcatcttccccccactgcggtgttcggcctgaaggtggtgggggtgagggggggtttggccattagcatttcatgtctttccccaaatgaagatgccctgcaaagggcagtaaccacacagtttgctgagtgaaattctttgcccacaaagacccagggcttggagcatctctctctttatccttaatctcccaatttgcaacccattctgaagtctccagcctggataggcagagacactaaaaccccagtagacagggccttggtggtcctaggaaggagggcccatagattctggaccgagggatgtcaagctggtcagttcagtccctatgaatgtctcttctacaggaggctaccctgcccctgctaccctgggagaagcctcagctttctgggcagagtttgtctccctgtcatttatactctcaggctttatacatttacacagtaagttctccctcctggagggttaaaaggaataatttcaacagggtgaaggcctggcacggtggctcacaactgtaatccaaggactttgggaggctgaggtgggtggatcacctgaggtcaggaatttgagaccagcctggccaacttggtgaaaccctgtctctactaaaaacaaaaattagccaggtgaggtggcacacacctatagccccagctactgggggaggctgaggcaggagaattgcttgaacctgggaggcagaggttacagtgagctgagatggcaccactgcactccagcctaggtgacaaagcagcaagacgcagtctcaaaacaacaacaacaaaaaaaacgggaaaacaggtacagacaatagctgcctggagttgtacagaaacttgattgggtaaccctggacctttccaggctgtggccagcagttgaccctgcctgcctttcctccattgttttcccatgtctgaccttccctgttgcaaagcagtggcctactacagggtctctctggagggagcaaggaggctcagtggccccattcagcaattcgaagtccctttaattgttttgtgcttccaacctgttttgttcccgttcagatttctctcgccttccaataaaaacttccctgtcctgtgccccagtccctcagagtccacaagaggttcaacttgctcatctgatgtgtgaattacatcacacagttgaatgagaatttgttaattacaacagaacttttataaatatgtcacttactgta

SEQ ID NO: 166685 - DNA, 5240 bp, Homo sapiens
  Payload ID: 12818
  Gene Symbol: PHLDB1
  Gene Name: pleckstrin homology-like domain, family B, member 1
  Uniprot ID: Q86UU1
  ENST ID: ENST00000356063
  CDS Start-End: 79-4038
gaccgagccgagccaggctaagggaccagtgtctccctgccccccccccacctctaggagctctggagccttaggaccatggacgctctcaataggaaccaaataggccctggatgccagacccagaccatggtgcagaaaggacccttggacctgatcgagacaggcaaagggctgaaagtgcaaacggacaaaccccacctggtgagcctgggcagtgggcgactcagcacagccatcaccctcctgccgctggaggaagggaggacggtgattggctctgcagccagagacatctcactacagggcccaggcctggctccagagcactgctacatcgagaacctgcggggcaccctcaccctctacccctgtggcaatgcctgcactattgatgggctccctgtccggcagcctacccggctcactcagggctgcatgttgtgcctgggtcagtccaccttccttcgctttaaccacccggctgaagccaagtggatgaaaagcatgattccagcagggggccgagcccctgggcccccctacagccctgttcctgcagaatcagaaagtctggtaaatgggaaccacaccccacagactgcaacacggggaccctctgcctgtgccagccacagttccctggtgagctctattgagaaggacctgcaagagatcatggactcactggtgctagaggagcctggagctgctggcaagaagcctgccgcaacctctccactgtcaccgatggctaatggtgggcgctacctgctgtctcccccaaccagccccggcgccatgtctgtgggctccagctatgagaacacctctccagccttctctccactctcttcaccagccagcagtggaagctgtgccagtcactcacccagtgggcaagagccaggaccttctgtgcccccgctggtacctgcccgttcctccagctaccatctggccctacagcccccacagtcccgcccaagtggtgctcgctccgagagtcctcggctgagcaggaaagggggccatgagaggcctcccagccctggcctccggggtctgctgacagacagccctgcagctactgtcttggcggaggcccggagagccactgagagcccccggctgggtgggcagctgcctgtggtggccatcagcctgagtgaatacccagcttctggtgctctcagtcaacccaccagcattcctggcagccccaagtttcagcctccagtccctgctccccgaaacaagattggcacactccaggaccgccctcccagccctttccgtgagcctccaggcagtgagcgggtgctaacaaccagcccctcacgccaactggtgggccgaacattttcagatgggttagccacccgtaccctgcagcctcctgagagtccccgcctgggccggcggggcctggacagtatgcgagaactaccccccttaagtccatctctgtcccggcgagctctctccccgctgcccacccggaccaccccagatcccaagctaaacagggaagtggcagagagtcctcggccccggcgctgggcagcccatggggcttcaccagaggacttctccctgacgctgggggcacggggccgtaggacacggagcccctcacccacactgggtgagtctctggcaccccacaagggcagcttcagtggcaggctgagcccagcctacagtctgggctctcttactggggcttcaccctgccagagtccctgtgtccagaggaagctctccagcggggacttgcgggtgcctgtcacaagggagcggaaaaatagcatcacagagatcagtgacaatgaggacgacctcctggagtaccaccggcgacagcgccaagagcggctccgggagcaggagatggagaggctggaacgccagcgcctggagaccatcctgaacctgtgtgccgaatacagccgggctgatgggggacctgaggctggggagcttcccagcattggggaggccaccgcagcattggcactggcaggccggaggccctcacgaggccttgcaggggcctctgggcggagcagcgaggagcctggcgttgccacccaacgcctatgggagagtatggagcgctcagatgaggaaaatctcaaggaggagtgcagcagcactgagagcacccagcaggagcacgaagatgcacctagcaccaagctccagggagaggtgctagccctggaagaagagcgggctcaggtgctggggcacgtggagcagctcaaggtccgtgtgaaggagctagagcagcagctgcaggagtcagcccgagaggccgaaatggagcgggcactgctgcagggagagagggaggcagagcgggcactgctgcagaaggagcagaaggcagtggatcagctgcaggagaagctggtggccttggagacaggcatccagaaggagagggacaaggaggcagaggccctggagactgagacaaagctctttgaggacttggagttccagcagttggagcgggagagccgcgtggaggaggagcgcgagctggccggccaggggctgctccggagcaaggctgagctgctccgcagcatcgccaagaggaaggagcgcctggccatcctggacagtcaggctgggcagatccgggctcaggccgtgcaggaatcagaacgcctggcccgggacaagaatgcctccttacagctgctgcaaaaggagaaggagaagctgactgtgctggaaaggagataccactcactcacagggggcaggcctttcccgaagaccacatcgaccctcaaagaggtttaccgctccaagatggatggcgaggccaccagcccccttccccggacccgcagcggccccctcccctcctcctctggctcttcctcctcctcctcccagctcagcgtggctaccctggggcgtagcccctccccaaagagcgctctactcacccagaatggcacgggcagccttcctcgcaacctggcagccacactgcaggacatcgagaccaagcgccaactagctctgcagcagaagggacaacaagtgattgaagagcagcggcggcgactggctgagctgaagcagaaagcggcagctgaggcacagtgccagtgggatgcccttcacggggcagcacccttcccagcgggcccctcgggcttcccccctctcatgcaccactctatcctacaccacctgcctgcggggcgggagcgtggggaggagggtgagcacgcctatgatacgctgagtctggagagctctgacagcatggagaccagcatctccaccgggggcaactcggcctgctcccctgacaacatgtccagcgcgagtggtctggacatggggaagatcgaggagatggagaagatgctgaaagaggctcatgcagagaagaaccggctcatggagtcgagggagcgggagatggagctgcggcggcaggccctggaggaggagcggcggaggcgtgagcaggtagaacggaggctgcagagtgagagtgcccggaggcagcagctggtcgagaaggaggtcaagatgcgggagaaacaattttcccaggcacgacccctgacccgctacctgccaatccggaaggaggactttgacctgaagacacatattgagtcatcgggccatggtgttgatacctgcctgcacgtggtgctcagcagcaaggtctgccgtggctacttggtcaagatgggcggcaagattaaatcatggaagaagcgctggtttgtcttcgaccggctcaagcgcaccctttcctattatgtggacaagcatgagacgaagctgaagggagtcatctatttccaggccattgaggaagtgtactacgaccacctgcgcagtgcagccaagagcccgaacccagccctcaccttctgcgtaaagacccatgaccggctgtactacatggtggccccatctgcagaggccatgcgtatctggatggatgtcattgtcacaggggctgagggctacactcagttcatgaactaactgccgtgggcctcctggcagagcacaactggggcttttgtataagaagactttaatattctgtaaggagcttggtcctgtgagtttctgggctctggcctcctgaagaaccagccagaagaagaaaagtagaggtggctttgctgcctcctgggagcccagaacttgcagtaaccctttagggtcctgccccaggcccagccagggctgaggagctgtcacagagagggcctcagctctgacctgacacctgctctccccagcctgttttctcttttctaaaagacaaattatggtaccataagctgccaaagatcccctcctgcctcagacccctttgccaggggctttgggggctgagcagagccacatccagagtggggtaatagctcaggcggcccgcttcccatttctcaaaccccgctctgccccattgttctcctttcccttatactttttattaccttgctcaagggccagagatctcaagtgtcaaccttgaggtcccagctccatcccctagttgcagactcatcaccatggttaccatagtgactgcttcattgccatggttacatactaattgctgcagctctgtggcccagcccactgcttcagctgtgggccatctgagggtacgtgccatcatctctccagcccaggcccctgggcatctcatgctggggggaagggactgaatacctttttccttccccctgcctgtgtcttcagccctgatgcacaggctgccagccccccagtccagccctctcccttccactggtgccttgcttagagccagaagggatgaagccgggggatctatggaacagaggaggagcgatgcagttgggagaggaagctagaagggttatggttggagttctgtacagtgttgagtttccgacagggaaagaggattcctccaatgctcctagagagaaagcctgagcaggagatgatgcagcagaggggaagggccctgtggtgccgccgcccttccttcagcctccgaagggtgatggaaatggagagtggaggaccaggcctccagctgtctggcctcgcccttcacgccttaacactaagcccacctcccctgctctccttcccagcattgagcccttggttgcctgggcccaggctgggggttttcagtatttgtaagcatttcagcagaacaataaagcctttggactacg

SEQ ID NO: 166686 - DNA, 5753 bp, Homo sapiens
  Payload ID: 12818
  Gene Symbol: PHLDB1
  Gene Name: pleckstrin homology-like domain, family B, member 1
  Uniprot ID: Q86UU1
  ENST ID: ENST00000361417
  CDS Start-End: 412-4545
actaaactcattgaattagaacagcacttgtccatctcaaagaggataaattattttttgctatccaccccagctggaatttagaccagacttacaggctttctgctccttccttcagtgaagaagagtctccagggtccctctagtgcaggtcaaagaagtccagtccagctgagttcagctccctagggcctccccagccagtctcctggaccaagagctggctttgcaagaaaacatcctactaaagccctgggaaaagagacaaatggtgaagaggagaatgaaaggttgcaggagggagctcctgttttagccctgccacctacctgggggccctctggctaccagtgtccttggaggggcttccttgctgcttctcccactaaggagctctggagccttaggaccatggacgctctcaataggaaccaaataggccctggatgccagacccagaccatggtgcagaaaggacccttggacctgatcgagacaggcaaagggctgaaagtgcaaacggacaaaccccacctggtgagcctgggcagtgggcgactcagcacagccatcaccctcctgccgctggaggaagggaggacggtgattggctctgcagccagagacatctcactacagggcccaggcctggctccagagcactgctacatcgagaacctgcggggcaccctcaccctctacccctgtggcaatgcctgcactattgatgggctccctgtccggcagcctacccggctcactcagggctgcatgttgtgcctgggtcagtccaccttccttcgctttaaccacccggctgaagccaagtggatgaaaagcatgattccagcagggggccgagcccctgggcccccctacagccctgttcctgcagaatcagaaagtctggtaaatgggaaccacaccccacagactgcaacacggggaccctctgcctgtgccagccacagttccctggtgagctctattgagaaggacctgcaagagatcatggactcactggtgctagaggagcctggagctgctggcaagaagcctgccgcaacctctccactgtcaccgatggctaatggtgggcgctacctgctgtctcccccaaccagccccggcgccatgtctgtgggctccagctatgagaacacctctccagccttctctccactctcttcaccagccagcagtggaagctgtgccagtcactcacccagtgggcaagagccaggaccttctgtgcccccgctggtacctgcccgttcctccagctaccatctggccctacagcccccacagtcccgcccaagtggtgctcgctccgagagtcctcggctgagcaggaaagggggccatgagaggcctcccagccctggcctccggggtctgctgacagacagccctgcagctactgtcttggcggaggcccggagagccactgagagcccccggctgggtgggcagctgcctgtggtggccatcagcctgagtgaatacccagcttctggtgctctcagtcaacccaccagcattcctggcagccccaagtttcagcctccagtccctgctccccgaaacaagattggcacactccaggaccgccctcccagccctttccgtgagcctccaggcagtgagcgggtgctaacaaccagcccctcacgccaactggtgggccgaacattttcagatgggttagccacccgtaccctgcagcctcctgagagtccccgcctgggccggcggggcctggacagtatgcgagaactaccccccttaagtccatctctgtcccggcgagctctctccccgctgcccacccggaccaccccagatcccaagctaaacagggaagtggcagagagtcctcggccccggcgctgggcagcccatggggcttcaccagaggacttctccctgacgctgggggcacggggccgtaggacacggagcccctcacccacactgggtgagtctctggcaccccacaagggcagcttcagtggcaggctgagcccagcctacagtctgggctctcttactggggcttcaccctgccagagtccctgtgtccagaggaagctctccagcggggacttgcgggtgcctgtcacaagggagcggaaaaatagcatcacagagatcagtgacaatgaggacgacctcctggagtaccaccggcgacagcgccaagagcggctccgggagcaggagatggagaggctggaacgccagcgcctggagaccatcctgaacctgtgtgccgaatacagccgggctgatgggggacctgaggctggggagcttcccagcattggggaggccaccgcagcattggcactggcaggccggaggccctcacgaggccttgcaggggcctctgggcggagcagcgaggagcctggcgttgccacccaacgcctatgggagagtatggagcgctcagatgaggaaaatctcaaggaggagtgcagcagcactgagagcacccagcaggagcacgaagatgcacctagcaccaagctccagggagaggtgctagccctggaagaagagcgggctcaggtgctggggcacgtggagcagctcaaggtccgtgtgaaggagctagagcagcagctgcaggagtcagcccgagaggccgaaatggagcgggcactgctgcagggagagagggaggcagagcgggcactgctgcagaaggagcagaaggcagtggatcagctgcaggagaagctggtggccttggagacaggcatccagaaggagagggacaaggaggcagaggccctggagactgagacaaagctctttgaggacttggagttccagcagttggagcgggagagccgcgtggaggaggagcgcgagctggccggccaggggctgctccggagcaaggctgagctgctccgcagcatcgccaagaggaaggagcgcctggccatcctggacagtcaggctgggcagatccgggctcaggccgtgcaggaatcagaacgcctggcccgggacaagaatgcctccttacagctgctgcaaaaggagaaggagaagctgactgtgctggaaaggagataccactcactcacagggggcaggcctttcccgaagaccacatcgaccctcaaagagatggagaagctgctgctccctgctgtagacttagagcagtggtaccaggagctgatggccgggctggggactggccccgctgcagcctcccctcactcttctcccccgcctctgcccgccaaagcttcccgtcagctgcaggtttaccgctccaagatggatggcgaggccaccagcccccttccccggacccgcagcggccccctcccctcctcctctggctcttcctcctcctcctcccagctcagcgtggctaccctggggcgtagcccctccccaaagagcgctctactcacccagaatggcacgggcagccttcctcgcaacctggcagccacactgcaggacatcgagaccaagcgccaactagctctgcagcagaagggacaacaagtgattgaagagcagcggcggcgactggctgagctgaagcagaaagcggcagctgaggcacagtgccagtgggatgcccttcacggggcagcacccttcccagcgggcccctcgggcttcccccctctcatgcaccactctatcctacaccacctgcctgcggggcgggagcgtggggaggagggtgagcacgcctatgatacgctgagtctggagagctctgacagcatggagaccagcatctccaccgggggcaactcggcctgctcccctgacaacatgtccagcgcgagtggtctggacatggggaagatcgaggagatggagaagatgctgaaagaggctcatgcagagaagaaccggctcatggagtcgagggagcgggagatggagctgcggcggcaggccctggaggaggagcggcggaggcgtgagcaggtagaacggaggctgcagagtgagagtgcccggaggcagcagctggtcgagaaggaggtcaagatgcgggagaaacaattttcccaggcacgacccctgacccgctacctgccaatccggaaggaggactttgacctgaagacacatattgagtcatcgggccatggtgttgatacctgcctgcacgtggtgctcagcagcaaggtctgccgtggctacttggtcaagatgggcggcaagattaaatcatggaagaagcgctggtttgtcttcgaccggctcaagcgcaccctttcctattatgtggacaagcatgagacgaagctgaagggagtcatctatttccaggccattgaggaagtgtactacgaccacctgcgcagtgcagccaagaagaggtttttccgcttcactatggtgactgagagcccgaacccagccctcaccttctgcgtaaagacccatgaccggctgtactacatggtggccccatctgcagaggccatgcgtatctggatggatgtcattgtcacaggggctgagggctacactcagttcatgaactaactgccgtgggcctcctggcagagcacaactggggcttttgtataagaagactttaatattctgtaaggagcttggtcctgtgagtttctgggctctggcctcctgaagaaccagccagaagaagaaaagtagaggtggctttgctgcctcctgggagcccagaacttgcagtaaccctttagggtcctgccccaggcccagccagggctgaggagctgtcacagagagggcctcagctctgacctgacacctgctctccccagcctgttttctcttttctaaaagacaaattatggtaccataagctgccaaagatcccctcctgcctcagacccctttgccaggggctttgggggctgagcagagccacatccagagtggggtaatagctcaggcggcccgcttcccatttctcaaaccccgctctgccccattgttctcctttcccttatactttttattaccttgctcaagggccagagatctcaagtgtcaaccttgaggtcccagctccatcccctagttgcagactcatcaccatggttaccatagtgactgcttcattgccatggttacatactaattgctgcagctctgtggcccagcccactgcttcagctgtgggccatctgagggtacgtgccatcatctctccagcccaggcccctgggcatctcatgctggggggaagggactgaatacctttttccttccccctgcctgtgtcttcagccctgatgcacaggctgccagccccccagtccagccctctcccttccactggtgccttgcttagagccagaagggatgaagccgggggatctatggaacagaggaggagcgatgcagttgggagaggaagctagaagggttatggttggagttctgtacagtgttgagtttccgacagggaaagaggattcctccaatgctcctagagagaaagcctgagcaggagatgatgcagcagaggggaagggccctgtggtgccgccgcccttccttcagcctccgaagggtgatggaaatggagagtggaggaccaggcctccagctgtctggcctcgcccttcacgccttaacactaagcccacctcccctgctctccttcccagcattgagcccttggttgcctgggcccaggctgggggttttcagtatttgtaagcatttcagcagaacaataaagcctttggactacggaagtg

SEQ ID NO: 166687 - DNA, 5945 bp, Homo sapiens
  Payload ID: 12818
  Gene Symbol: PHLDB1
  Gene Name: pleckstrin homology-like domain, family B, member 1
  Uniprot ID: Q86UU1
  ENST ID: ENST00000530994
  CDS Start-End: 264-3251
ggtgtcctcctaagcctgaggccaccgcgaccgagccgagccaggctaagggaccagtgtctccctgccccccccccacctctagaaaacatcctactaaagccctgggaaaagagacaaatggtgaagaggagaatgaaaggttgcaggagggagctcctgttttagccctgccacctacctgggggccctctggctaccagtgtccttggaggggcttccttgctgcttctcccactaaggagctctggagccttaggaccatggacgctctcaataggaaccaaataggccctggatgccagacccagaccatggtgcagaaaggacccttggacctgatcgagacaggcaaagggctgaaagtgcaaacggacaaaccccacctggtgagcctgggcagtgggcgactcagcacagccatcaccctcctgccgctggaggaagggaggacggtgattggctctgcagccagagacatctcactacagggcccaggcctggctccagagcactgctacatcgagaacctgcggggcaccctcaccctctacccctgtggcaatgcctgcactattgatgggctccctgtccggcagcctacccggctcactcagggctgcatgttgtgcctgggtcagtccaccttccttcgctttaaccacccggctgaagccaagtggatgaaaagcatgattccagcagggggccgagcccctgggcccccctacagccctgttcctgcagaatcagaaagtctggtaaatgggaaccacaccccacagactgcaacacggggaccctctgcctgtgccagccacagttccctggtgagctctattgagaaggacctgcaagagatcatggactcactggtgctagaggagcctggagctgctggcaagaagcctgccgcaacctctccactgtcaccgatggctaatggtgggcgctacctgctgtctcccccaaccagccccggcgccatgtctgtgggctccagctatgagaacacctctccagccttctctccactctcttcaccagccagcagtggaagctgtgccagtcactcacccagtgggcaagagccaggaccttctgtgcccccgctggtacctgcccgttcctccagctaccatctggccctacagcccccacagtcccgcccaagtggtgctcgctccgagagtcctcggctgagcaggaaagggggccatgagaggcctcccagccctggcctccggggtctgctgacagacagccctgcagctactgtcttggcggaggcccggagagccactgagagcccccggctgggtgggcagctgcctgtggtggccatcagcctgagtgaatacccagcttctggtgctctcagtcaacccaccagcattcctggcagccccaagtttcagcctccagtccctgctccccgaaacaagattggcacactccaggaccgccctcccagccctttccgtgagcctccaggcagtgagcgggtgctaacaaccagcccctcacgccaactggtgggccgaacattttcagatgggttagccacccgtaccctgcagcctcctgagagtccccgcctgggccggcggggcctggacagtatgcgagaactaccccccttaagtccatctctgtcccggcgagctctctccccgctgcccacccggaccaccccagatcccaagctaaacagggaagtggcagagagtcctcggccccggcgctgggcagcccatggggcttcaccagaggacttctccctgacgctgggggcacggggccgtaggacacggagcccctcacccacactgggtgagtctctggcaccccacaagggcagcttcagtggcaggctgagcccagcctacagtctgggctctcttactggggcttcaccctgccagagtccctgtgtccagaggaagctctccagcggggacttgcgggtgcctgtcacaagggagcggaaaaatagcatcacagagatcagtgacaatgaggacgacctcctggagtaccaccggcgacagcgccaagagcggctccgggagcaggagatggagaggctggaacgccagcgcctggagaccatcctgaacctgtgtgccgaatacagccgggctgatgggggacctgaggctggggagcttcccagcattggggaggccaccgcagcattggcactggcaggccggaggccctcacgaggccttgcaggggcctctgggcggagcagcgaggagcctggcgttgccacccaacgcctatgggagagtatggagcgctcagatgaggaaaatctcaaggaggagtgcagcagcactgagagcacccagcaggagcacgaagatgcacctagcaccaagctccagggagaggtgctagccctggaagaagagcgggctcaggtgctggggcacgtggagcagctcaaggtccgtgtgaaggagctagagcagcagctgcaggagtcagcccgagaggccgaaatggagcgggcactgctgcagggagagagggaggcagagcgggcactgctgcagaaggagcagaaggcagtggatcagctgcaggagaagctggtggccttggagacaggcatccagaaggagagggacaaggaggcagaggccctggagactgagacaaagctctttgaggacttggagttccagcagttggagcgggagagccgcgtggaggaggagcgcgagctggccggccaggggctgctccggagcaaggctgagctgctccgcagcatcgccaagaggaaggagcgcctggccatcctggacagtcaggctgggcagatccgggctcaggccgtgcaggaatcagaacgcctggcccgggacaagaatgcctccttacagctgctgcaaaaggagaaggagaagctgactgtgctggaaaggagataccactcactcacagggggcaggcctttcccgaagaccacatcgaccctcaaagaggtttaccgctccaagatggatggcgaggccaccagcccccttccccggacccgcagcggccccctcccctcctcctctggctcttcctcctcctcctcccagctcagcgtggctaccctggggcgtagcccctccccaaagagcgctctactcacccagaatggcacgggcagccttcctcgcaacctggcagccacactgcaggacatcgagaccaagcgccaactagctctgcagcagaagggtgagtgactgccccgccagcccacctgctctcctgaggggaccctgggtagttgccatgcctcctctatgctcacacctttcacaggatgtttttcctttaattgggatctaggcaagaccagaaaggatttagagtgggtacctaaagaagagcttcctggatatttatctaaagccttcagggcaggagactaagggcttagggggctgtgacatctttcctagagagcctagccaataagggaactgcttgttgacctgagtcgggttagacattgccctctctggagggaggggatggatttgatgacttctagaaatggttgcctgagatattggctctggggacccaggagtccttgttgcttgtgtgcaatttggttgttttgaaagcccatgtctgtgcctctctctcctcttaccccctctgtgtctctaccgtaccctctgcctggggtcccccacgccagtcgagtcgcttcccgccgagcccctcccaaccgacgacccagcaggacaacaagtgattgaagagcagcggcggcgactggctgagctgaagcagaaagcggcagctgaggcacagtgccagtgggatgcccttcacggggcagcacccttcccagcgggcccctcgggcttcccccctctcatgcaccactctatcctacaccacctgcctgcggggcgggagcgtggggaggagggtgagcacgcctatgatacgctgagtctggagagctctgacagcatggagaccagcatctccaccgggggcaactcggcctgctcccctgacaacatgtccagcgcgagtggtctggacatggggaagatcgaggagatggagaagatgctgaaagaggctcatgcagagaagaaccggctcatggagtcgagggagcgggagatggagctgcggcggcaggccctggaggaggagcggcggaggcgtgagcaggtagaacggaggctgcagagtgagagtgcccggaggcagcagctggtcgagaaggaggtcaagatgcgggagaaacaattttcccaggcacgacccctgacccgctacctgccaatccggaaggaggactttgacctgaagacacatattgagtcatcgggccatggtgttgatacctgcctgcacgtggtgctcagcagcaaggtctgccgtggctacttggtcaagatgggcggcaagattaaatcatggaagaagcgctggtttgtcttcgaccggctcaagcgcaccctttcctattatgtggacaagcatgagacgaagctgaagggagtcatctatttccaggccattgaggaagtgtactacgaccacctgcgcagtgcagccaagagcccgaacccagccctcaccttctgcgtaaagacccatgaccggctgtactacatggtggccccatctgcagaggccatgcgtatctggatggatgtcattgtcacaggggctgagggctacactcagttcatgaactaactgccgtgggcctcctggcagagcacaactggggcttttgtataagaagactttaatattctgtaaggagcttggtcctgtgagtttctgggctctggcctcctgaagaaccagccagaagaagaaaagtagaggtggctttgctgcctcctgggagcccagaacttgcagtaaccctttagggtcctgccccaggcccagccagggctgaggagctgtcacagagagggcctcagctctgacctgacacctgctctccccagcctgttttctcttttctaaaagacaaattatggtaccataagctgccaaagatcccctcctgcctcagacccctttgccaggggctttgggggctgagcagagccacatccagagtggggtaatagctcaggcggcccgcttcccatttctcaaaccccgctctgccccattgttctcctttcccttatactttttattaccttgctcaagggccagagatctcaagtgtcaaccttgaggtcccagctccatcccctagttgcagactcatcaccatggttaccatagtgactgcttcattgccatggttacatactaattgctgcagctctgtggcccagcccactgcttcagctgtgggccatctgagggtacgtgccatcatctctccagcccaggcccctgggcatctcatgctggggggaagggactgaatacctttttccttccccctgcctgtgtcttcagccctgatgcacaggctgccagccccccagtccagccctctcccttccactggtgccttgcttagagccagaagggatgaagccgggggatctatggaacagaggaggagcgatgcagttgggagaggaagctagaagggttatggttggagttctgtacagtgttgagtttccgacagggaaagaggattcctccaatgctcctagagagaaagcctgagcaggagatgatgcagcagaggggaagggccctgtggtgccgccgcccttccttcagcctccgaagggtgatggaaatggagagtggaggaccaggcctccagctgtctggcctcgcccttcacgccttaacactaagcccacctcccctgctctccttcccagcattgagcccttggttgcctgggcccaggctgggggttttcagtatttgtaagcatttcagcagaacaataaagcctttggactacggaa

SEQ ID NO: 166688 - DNA, 5787 bp, Homo sapiens
  Payload ID: 12818
  Gene Symbol: PHLDB1
  Gene Name: pleckstrin homology-like domain, family B, member 1
  Uniprot ID: Q86UU1
  ENST ID: ENST00000528594
  CDS Start-End: 106-3093
gtgtcctcctaagcctgaggccaccgcgaccgagccgagccaggctaagggaccagtgtctccctgccccccccccacctctaggagctctggagccttaggaccatggacgctctcaataggaaccaaataggccctggatgccagacccagaccatggtgcagaaaggacccttggacctgatcgagacaggcaaagggctgaaagtgcaaacggacaaaccccacctggtgagcctgggcagtgggcgactcagcacagccatcaccctcctgccgctggaggaagggaggacggtgattggctctgcagccagagacatctcactacagggcccaggcctggctccagagcactgctacatcgagaacctgcggggcaccctcaccctctacccctgtggcaatgcctgcactattgatgggctccctgtccggcagcctacccggctcactcagggctgcatgttgtgcctgggtcagtccaccttccttcgctttaaccacccggctgaagccaagtggatgaaaagcatgattccagcagggggccgagcccctgggcccccctacagccctgttcctgcagaatcagaaagtctggtaaatgggaaccacaccccacagactgcaacacggggaccctctgcctgtgccagccacagttccctggtgagctctattgagaaggacctgcaagagatcatggactcactggtgctagaggagcctggagctgctggcaagaagcctgccgcaacctctccactgtcaccgatggctaatggtgggcgctacctgctgtctcccccaaccagccccggcgccatgtctgtgggctccagctatgagaacacctctccagccttctctccactctcttcaccagccagcagtggaagctgtgccagtcactcacccagtgggcaagagccaggaccttctgtgcccccgctggtacctgcccgttcctccagctaccatctggccctacagcccccacagtcccgcccaagtggtgctcgctccgagagtcctcggctgagcaggaaagggggccatgagaggcctcccagccctggcctccggggtctgctgacagacagccctgcagctactgtcttggcggaggcccggagagccactgagagcccccggctgggtgggcagctgcctgtggtggccatcagcctgagtgaatacccagcttctggtgctctcagtcaacccaccagcattcctggcagccccaagtttcagcctccagtccctgctccccgaaacaagattggcacactccaggaccgccctcccagccctttccgtgagcctccaggcagtgagcgggtgctaacaaccagcccctcacgccaactggtgggccgaacattttcagatgggttagccacccgtaccctgcagcctcctgagagtccccgcctgggccggcggggcctggacagtatgcgagaactaccccccttaagtccatctctgtcccggcgagctctctccccgctgcccacccggaccaccccagatcccaagctaaacagggaagtggcagagagtcctcggccccggcgctgggcagcccatggggcttcaccagaggacttctccctgacgctgggggcacggggccgtaggacacggagcccctcacccacactgggtgagtctctggcaccccacaagggcagcttcagtggcaggctgagcccagcctacagtctgggctctcttactggggcttcaccctgccagagtccctgtgtccagaggaagctctccagcggggacttgcgggtgcctgtcacaagggagcggaaaaatagcatcacagagatcagtgacaatgaggacgacctcctggagtaccaccggcgacagcgccaagagcggctccgggagcaggagatggagaggctggaacgccagcgcctggagaccatcctgaacctgtgtgccgaatacagccgggctgatgggggacctgaggctggggagcttcccagcattggggaggccaccgcagcattggcactggcaggccggaggccctcacgaggccttgcaggggcctctgggcggagcagcgaggagcctggcgttgccacccaacgcctatgggagagtatggagcgctcagatgaggaaaatctcaaggaggagtgcagcagcactgagagcacccagcaggagcacgaagatgcacctagcaccaagctccagggagaggtgctagccctggaagaagagcgggctcaggtgctggggcacgtggagcagctcaaggtccgtgtgaaggagctagagcagcagctgcaggagtcagcccgagaggccgaaatggagcgggcactgctgcagggagagagggaggcagagcgggcactgctgcagaaggagcagaaggcagtggatcagctgcaggagaagctggtggccttggagacaggcatccagaaggagagggacaaggaggcagaggccctggagactgagacaaagctctttgaggacttggagttccagcagttggagcgggagagccgcgtggaggaggagcgcgagctggccggccaggggctgctccggagcaaggctgagctgctccgcagcatcgccaagaggaaggagcgcctggccatcctggacagtcaggctgggcagatccgggctcaggccgtgcaggaatcagaacgcctggcccgggacaagaatgcctccttacagctgctgcaaaaggagaaggagaagctgactgtgctggaaaggagataccactcactcacagggggcaggcctttcccgaagaccacatcgaccctcaaagaggtttaccgctccaagatggatggcgaggccaccagcccccttccccggacccgcagcggccccctcccctcctcctctggctcttcctcctcctcctcccagctcagcgtggctaccctggggcgtagcccctccccaaagagcgctctactcacccagaatggcacgggcagccttcctcgcaacctggcagccacactgcaggacatcgagaccaagcgccaactagctctgcagcagaagggtgagtgactgccccgccagcccacctgctctcctgaggggaccctgggtagttgccatgcctcctctatgctcacacctttcacaggatgtttttcctttaattgggatctaggcaagaccagaaaggatttagagtgggtacctaaagaagagcttcctggatatttatctaaagccttcagggcaggagactaagggcttagggggctgtgacatctttcctagagagcctagccaataagggaactgcttgttgacctgagtcgggttagacattgccctctctggagggaggggatggatttgatgacttctagaaatggttgcctgagatattggctctggggacccaggagtccttgttgcttgtgtgcaatttggttgttttgaaagcccatgtctgtgcctctctctcctcttaccccctctgtgtctctaccgtaccctctgcctggggtcccccacgccagtcgagtcgcttcccgccgagcccctcccaaccgacgacccagcaggacaacaagtgattgaagagcagcggcggcgactggctgagctgaagcagaaagcggcagctgaggcacagtgccagtgggatgcccttcacggggcagcacccttcccagcgggcccctcgggcttcccccctctcatgcaccactctatcctacaccacctgcctgcggggcgggagcgtggggaggagggtgagcacgcctatgatacgctgagtctggagagctctgacagcatggagaccagcatctccaccgggggcaactcggcctgctcccctgacaacatgtccagcgcgagtggtctggacatggggaagatcgaggagatggagaagatgctgaaagaggctcatgcagagaagaaccggctcatggagtcgagggagcgggagatggagctgcggcggcaggccctggaggaggagcggcggaggcgtgagcaggtagaacggaggctgcagagtgagagtgcccggaggcagcagctggtcgagaaggaggtcaagatgcgggagaaacaattttcccaggcacgacccctgacccgctacctgccaatccggaaggaggactttgacctgaagacacatattgagtcatcgggccatggtgttgatacctgcctgcacgtggtgctcagcagcaaggtctgccgtggctacttggtcaagatgggcggcaagattaaatcatggaagaagcgctggtttgtcttcgaccggctcaagcgcaccctttcctattatgtggacaagcatgagacgaagctgaagggagtcatctatttccaggccattgaggaagtgtactacgaccacctgcgcagtgcagccaagagcccgaacccagccctcaccttctgcgtaaagacccatgaccggctgtactacatggtggccccatctgcagaggccatgcgtatctggatggatgtcattgtcacaggggctgagggctacactcagttcatgaactaactgccgtgggcctcctggcagagcacaactggggcttttgtataagaagactttaatattctgtaaggagcttggtcctgtgagtttctgggctctggcctcctgaagaaccagccagaagaagaaaagtagaggtggctttgctgcctcctgggagcccagaacttgcagtaaccctttagggtcctgccccaggcccagccagggctgaggagctgtcacagagagggcctcagctctgacctgacacctgctctccccagcctgttttctcttttctaaaagacaaattatggtaccataagctgccaaagatcccctcctgcctcagacccctttgccaggggctttgggggctgagcagagccacatccagagtggggtaatagctcaggcggcccgcttcccatttctcaaaccccgctctgccccattgttctcctttcccttatactttttattaccttgctcaagggccagagatctcaagtgtcaaccttgaggtcccagctccatcccctagttgcagactcatcaccatggttaccatagtgactgcttcattgccatggttacatactaattgctgcagctctgtggcccagcccactgcttcagctgtgggccatctgagggtacgtgccatcatctctccagcccaggcccctgggcatctcatgctggggggaagggactgaatacctttttccttccccctgcctgtgtcttcagccctgatgcacaggctgccagccccccagtccagccctctcccttccactggtgccttgcttagagccagaagggatgaagccgggggatctatggaacagaggaggagcgatgcagttgggagaggaagctagaagggttatggttggagttctgtacagtgttgagtttccgacagggaaagaggattcctccaatgctcctagagagaaagcctgagcaggagatgatgcagcagaggggaagggccctgtggtgccgccgcccttccttcagcctccgaagggtgatggaaatggagagtggaggaccaggcctccagctgtctggcctcgcccttcacgccttaacactaagcccacctcccctgctctccttcccagcattgagcccttggttgcctgggcccaggctgggggttttcagtatttgtaagcatttcagcagaacaataaagcctttggactacggaa

SEQ ID NO: 166689 - DNA, 5479 bp, Homo sapiens
  Payload ID: 12818
  Gene Symbol: PHLDB1
  Gene Name: pleckstrin homology-like domain, family B, member 1
  Uniprot ID: Q86UU1
  ENST ID: ENST00000600882
  CDS Start-End: 131-4264
agcgagctcccggggaaaagcaacggtgtcctcctaagcctgaggccaccgcgaccgagccgagccaggctaagggaccagtgtctccctgccccccccccacctctaggagctctggagccttaggaccatggacgctctcaataggaaccaaataggccctggatgccagacccagaccatggtgcagaaaggacccttggacctgatcgagacaggcaaagggctgaaagtgcaaacggacaaaccccacctggtgagcctgggcagtgggcgactcagcacagccatcaccctcctgccgctggaggaagggaggacggtgattggctctgcagccagagacatctcactacagggcccaggcctggctccagagcactgctacatcgagaacctgcggggcaccctcaccctctacccctgtggcaatgcctgcactattgatgggctccctgtccggcagcctacccggctcactcagggctgcatgttgtgcctgggtcagtccaccttccttcgctttaaccacccggctgaagccaagtggatgaaaagcatgattccagcagggggccgagcccctgggcccccctacagccctgttcctgcagaatcagaaagtctggtaaatgggaaccacaccccacagactgcaacacggggaccctctgcctgtgccagccacagttccctggtgagctctattgagaaggacctgcaagagatcatggactcactggtgctagaggagcctggagctgctggcaagaagcctgccgcaacctctccactgtcaccgatggctaatggtgggcgctacctgctgtctcccccaaccagccccggcgccatgtctgtgggctccagctatgagaacacctctccagccttctctccactctcttcaccagccagcagtggaagctgtgccagtcactcacccagtgggcaagagccaggaccttctgtgcccccgctggtacctgcccgttcctccagctaccatctggccctacagcccccacagtcccgcccaagtggtgctcgctccgagagtcctcggctgagcaggaaagggggccatgagaggcctcccagccctggcctccggggtctgctgacagacagccctgcagctactgtcttggcggaggcccggagagccactgagagcccccggctgggtgggcagctgcctgtggtggccatcagcctgagtgaatacccagcttctggtgctctcagtcaacccaccagcattcctggcagccccaagtttcagcctccagtccctgctccccgaaacaagattggcacactccaggaccgccctcccagccctttccgtgagcctccaggcagtgagcgggtgctaacaaccagcccctcacgccaactggtgggccgaacattttcagatgggttagccacccgtaccctgcagcctcctgagagtccccgcctgggccggcggggcctggacagtatgcgagaactaccccccttaagtccatctctgtcccggcgagctctctccccgctgcccacccggaccaccccagatcccaagctaaacagggaagtggcagagagtcctcggccccggcgctgggcagcccatggggcttcaccagaggacttctccctgacgctgggggcacggggccgtaggacacggagcccctcacccacactgggtgagtctctggcaccccacaagggcagcttcagtggcaggctgagcccagcctacagtctgggctctcttactggggcttcaccctgccagagtccctgtgtccagaggaagctctccagcggggacttgcgggtgcctgtcacaagggagcggaaaaatagcatcacagagatcagtgacaatgaggacgacctcctggagtaccaccggcgacagcgccaagagcggctccgggagcaggagatggagaggctggaacgccagcgcctggagaccatcctgaacctgtgtgccgaatacagccgggctgatgggggacctgaggctggggagcttcccagcattggggaggccaccgcagcattggcactggcaggccggaggccctcacgaggccttgcaggggcctctgggcggagcagcgaggagcctggcgttgccacccaacgcctatgggagagtatggagcgctcagatgaggaaaatctcaaggaggagtgcagcagcactgagagcacccagcaggagcacgaagatgcacctagcaccaagctccagggagaggtgctagccctggaagaagagcgggctcaggtgctggggcacgtggagcagctcaaggtccgtgtgaaggagctagagcagcagctgcaggagtcagcccgagaggccgaaatggagcgggcactgctgcagggagagagggaggcagagcgggcactgctgcagaaggagcagaaggcagtggatcagctgcaggagaagctggtggccttggagacaggcatccagaaggagagggacaaggaggcagaggccctggagactgagacaaagctctttgaggacttggagttccagcagttggagcgggagagccgcgtggaggaggagcgcgagctggccggccaggggctgctccggagcaaggctgagctgctccgcagcatcgccaagaggaaggagcgcctggccatcctggacagtcaggctgggcagatccgggctcaggccgtgcaggaatcagaacgcctggcccgggacaagaatgcctccttacagctgctgcaaaaggagaaggagaagctgactgtgctggaaaggagataccactcactcacagggggcaggcctttcccgaagaccacatcgaccctcaaagagatggagaagctgctgctccctgctgtagacttagagcagtggtaccaggagctgatggccgggctggggactggccccgctgcagcctcccctcactcttctcccccgcctctgcccgccaaagcttcccgtcagctgcaggtttaccgctccaagatggatggcgaggccaccagcccccttccccggacccgcagcggccccctcccctcctcctctggctcttcctcctcctcctcccagctcagcgtggctaccctggggcgtagcccctccccaaagagcgctctactcacccagaatggcacgggcagccttcctcgcaacctggcagccacactgcaggacatcgagaccaagcgccaactagctctgcagcagaagggacaacaagtgattgaagagcagcggcggcgactggctgagctgaagcagaaagcggcagctgaggcacagtgccagtgggatgcccttcacggggcagcacccttcccagcgggcccctcgggcttcccccctctcatgcaccactctatcctacaccacctgcctgcggggcgggagcgtggggaggagggtgagcacgcctatgatacgctgagtctggagagctctgacagcatggagaccagcatctccaccgggggcaactcggcctgctcccctgacaacatgtccagcgcgagtggtctggacatggggaagatcgaggagatggagaagatgctgaaagaggctcatgcagagaagaaccggctcatggagtcgagggagcgggagatggagctgcggcggcaggccctggaggaggagcggcggaggcgtgagcaggtagaacggaggctgcagagtgagagtgcccggaggcagcagctggtcgagaaggaggtcaagatgcgggagaaacaattttcccaggcacgacccctgacccgctacctgccaatccggaaggaggactttgacctgaagacacatattgagtcatcgggccatggtgttgatacctgcctgcacgtggtgctcagcagcaaggtctgccgtggctacttggtcaagatgggcggcaagattaaatcatggaagaagcgctggtttgtcttcgaccggctcaagcgcaccctttcctattatgtggacaagcatgagacgaagctgaagggagtcatctatttccaggccattgaggaagtgtactacgaccacctgcgcagtgcagccaagaagaggtttttccgcttcactatggtgactgagagcccgaacccagccctcaccttctgcgtaaagacccatgaccggctgtactacatggtggccccatctgcagaggccatgcgtatctggatggatgtcattgtcacaggggctgagggctacactcagttcatgaactaactgccgtgggcctcctggcagagcacaactggggcttttgtataagaagactttaatattctgtaaggagcttggtcctgtgagtttctgggctctggcctcctgaagaaccagccagaagaagaaaagtagaggtggctttgctgcctcctgggagcccagaacttgcagtaaccctttagggtcctgccccaggcccagccagggctgaggagctgtcacagagagggcctcagctctgacctgacacctgctctccccagcctgttttctcttttctaaaagacaaattatggtaccataagctgccaaagatcccctcctgcctcagacccctttgccaggggctttgggggctgagcagagccacatccagagtggggtaatagctcaggcggcccgcttcccatttctcaaaccccgctctgccccattgttctcctttcccttatactttttattaccttgctcaagggccagagatctcaagtgtcaaccttgaggtcccagctccatcccctagttgcagactcatcaccatggttaccatagtgactgcttcattgccatggttacatactaattgctgcagctctgtggcccagcccactgcttcagctgtgggccatctgagggtacgtgccatcatctctccagcccaggcccctgggcatctcatgctggggggaagggactgaatacctttttccttccccctgcctgtgtcttcagccctgatgcacaggctgccagccccccagtccagccctctcccttccactggtgccttgcttagagccagaagggatgaagccgggggatctatggaacagaggaggagcgatgcagttgggagaggaagctagaagggttatggttggagttctgtacagtgttgagtttccgacagggaaagaggattcctccaatgctcctagagagaaagcctgagcaggagatgatgcagcagaggggaagggccctgtggtgccgccgcccttccttcagcctccgaagggtgatggaaatggagagtggaggaccaggcctccagctgtctggcctcgcccttcacgccttaacactaagcccacctcccctgctctccttcccagcattgagcccttggttgcctgggcccaggctgggggttttcagtatttgtaagcatttcagcagaacaataaagcctttggactacggaagtgagtggaa

SEQ ID NO: 166690 - DNA, 1940 bp, Homo sapiens
  Payload ID: 12818
  Gene Symbol: PHLDB1
  Gene Name: pleckstrin homology-like domain, family B, member 1
  ENST ID: ENST00000601898
  CDS Start-End: 432-737
ctgagagcacccagcaggagcacgaagatgcacctagcaccaagctccagggagaggtgctagccctggaagaagagcgggctcaggtgctggggcacgtggagcagctcaaggtccgtgtgaaggagctagagcagcagctgcaggagtcagcccgagaggccgaaatggagcgggcactgctgcagggagagagggaggcagagcgggcactgctgcagaaggagcagaaggcagtggatcagctggtcgagaaggaggtcaagatgcgggagaaacaattttcccaggcacgacccctgacccgctacctgccaatccggaaggaggactttgacctgaagacacatattgagtcatcgggccatggtgttgatacctgcctgcacgtggtgctcagcagcaaggtctgccgtggctacttggtcaagatgggcggcaagattaaatcatggaagaagcgctggtttgtcttcgaccggctcaagcgcaccctttcctattatgtggacaagcatgagacgaagctgaagggagtcatctatttccaggccattgaggaagtgtactacgaccacctgcgcagtgcagccaagagcccgaacccagccctcaccttctgcgtaaagacccatgaccggctgtactacatggtggccccatctgcagaggccatgcgtatctggatggatgtcattgtcacaggggctgagggctacactcagttcatgaactaactgccgtgggcctcctggcagagcacaactggggcttttgtataagaagactttaatattctgtaaggagcttggtcctgtgagtttctgggctctggcctcctgaagaaccagccagaagaagaaaagtagaggtggctttgctgcctcctgggagcccagaacttgcagtaaccctttagggtcctgccccaggcccagccagggctgaggagctgtcacagagagggcctcagctctgacctgacacctgctctccccagcctgttttctcttttctaaaagacaaattatggtaccataagctgccaaagatcccctcctgcctcagacccctttgccaggggctttgggggctgagcagagccacatccagagtggggtaatagctcaggcggcccgcttcccatttctcaaaccccgctctgccccattgttctcctttcccttatactttttattaccttgctcaagggccagagatctcaagtgtcaaccttgaggtcccagctccatcccctagttgcagactcatcaccatggttaccatagtgactgcttcattgccatggttacatactaattgctgcagctctgtggcccagcccactgcttcagctgtgggccatctgagggtacgtgccatcatctctccagcccaggcccctgggcatctcatgctggggggaagggactgaatacctttttccttccccctgcctgtgtcttcagccctgatgcacaggctgccagccccccagtccagccctctcccttccactggtgccttgcttagagccagaagggatgaagccgggggatctatggaacagaggaggagcgatgcagttgggagaggaagctagaagggttatggttggagttctgtacagtgttgagtttccgacagggaaagaggattcctccaatgctcctagagagaaagcctgagcaggagatgatgcagcagaggggaagggccctgtggtgccgccgcccttccttcagcctccgaagggtgatggaaatggagagtggaggaccaggcctccagctgtctggcctcgcccttcacgccttaacactaagcccacctcccctgctctccttcccagcattgagcccttggttgcctgggcccaggctgggggttttcagtatttgtaagcatttcagcagaacaataaagcctttggactacgg

SEQ ID NO: 166691 - DNA, 748 bp, Homo sapiens
  Payload ID: 12818
  Gene Symbol: PHLDB1
  Gene Name: pleckstrin homology-like domain, family B, member 1
  ENST ID: ENST00000532639
  CDS Start-End: 122-748
gaaggcggcggccgagaggaccccagctcggcctggcgggcctctggccacagccatgcaccgcttgggccgaggccgaggccgacccccagggacacaggagctctggagccttaggaccatggacgctctcaataggaaccaaataggccctggatgccagacccagaccatggtgcagaaaggacccttggacctgatcgagacaggcaaagggctgaaagtgcaaacggacaaaccccacctggtgagcctgggcagtgggcgactcagcacagccatcaccctcctgccgctggaggaagggaggacggtgattggctctgcagccagagacatctcactacagggcccaggcctggctccagagcactgctacatcgagaacctgcggggcaccctcaccctctacccctgtggcaatgcctgcactattgatgggctccctgtccggcagcctacccggctcactcaggtagagacgggacttcaccacattggccaggctggtctccaactcccgacctcaggctgcatgttgtgcctgggtcagtccaccttccttcgctttaaccacccggctgaagccaagtggatgaaaagcatgattccagcagggggccgagcccctgggcccccctacagccctgttcctgcagaatcagaaagtctggtaaatgggaaccacaccccacagactgcaacacggggaccctctgcctgtgccagccacagttccctggtgagc

SEQ ID NO: 166692 - DNA, 874 bp, Homo sapiens
  Payload ID: 12818
  Gene Symbol: PHLDB1
  Gene Name: pleckstrin homology-like domain, family B, member 1
  ENST ID: ENST00000530708
  CDS Start-End: 131-874
agcgagctcccggggaaaagcaacggtgtcctcctaagcctgaggccaccgcgaccgagccgagccaggctaagggaccagtgtctccctgccccccccccacctctaggagctctggagccttaggaccatggacgctctcaataggaaccaaataggccctggatgccagacccagaccatggtgcagaaaggacccttggacctgatcgagacaggcaaagggctgaaagtgcaaacggacaaaccccacctggtgagcctgggcagtgggcgactcagcacagccatcaccctcctgccgctggaggaagggaggacggtgattggctctgcagccagagacatctcactacagggcccaggcctggctccagagcactgctacatcgagaacctgcggggcaccctcaccctctacccctgtggcaatgcctgcactattgatgggctccctgtccggcagcctacccggctcactcagggctgcatgttgtgcctgggtcagtccaccttccttcgctttaaccacccggctgaagccaagtggatgaaaagcatgattccagcagggggccgagcccctgggcccccctacagccctgttcctgcagaatcagaaagtctggtaaatgggaaccacaccccacagactgcaacacggggaccctctgcctgtgccagccacagttccctggtgagctctattgagaaggacctgcaagagatcatggactcactggtgctagaggagcctggagctgctggcaagaagcctgccgcaacctctccactgtcaccgatggctaatggtgggcgctacctgctgtctcccccaaccagccccggccatgtctgtgggctccagctatga

SEQ ID NO: 166693 - DNA, 3128 bp, Homo sapiens
  Payload ID: 12818
  Gene Symbol: PHLDB1
  Gene Name: pleckstrin homology-like domain, family B, member 1
  ENST ID: ENST00000534140
  CDS Start-End: 1-1926
caggtgctggggcacgtggagcagctcaaggtccgtgtgaaggagctagagcagcagctgcaggagtcagcccgagaggccgaaatggagcgggcactgctgcagggagagagggaggcagagcgggcactgctgcagaaggagcagaaggcagtggatcagctgcaggagaagctggtggccttggagacaggcatccagaaggagagggacaaggagagggcggagctggccgcgggacggaggcacctggaggcccgccaggcgctctacgccgagctccagacgcagctcgataactgccccgagtcagtgcgggaacagttacaggagcagctgagaagggaggcagaggccctggagactgagacaaagctctttgaggacttggagttccagcagttggagcgggagagccgcgtggaggaggagcgcgagctggccggccaggggctgctccggagcaaggctgagctgctccgcagcatcgccaagaggaaggagcgcctggccatcctggacagtcaggctgggcagatccgggctcaggccgtgcaggaatcagaacgcctggcccgggacaagaatgcctccttacagctgctgcaaaaggagaaggagaagctgactgtgctggaaaggagataccactcactcacagggggcaggcctttcccgaagaccacatcgaccctcaaagaggtttaccgctccaagatggatggcgaggccaccagcccccttccccggacccgcagcggccccctcccctcctcctctggctcttcctcctcctcctcccagctcagcgtggctaccctggggcgtagcccctccccaaagagcgctctactcacccagaatggcacgggcagccttcctcgcaacctggcagccacactgcaggacatcgagaccaagcgccaactagctctgcagcagaagggacaacaagtgattgaagagcagcggcggcgactggctgagctgaagcagaaagcggcagctgaggcacagtgccagtgggatgcccttcacggggcagcacccttcccagcgggcccctcgggcttcccccctctcatgcaccactctatcctacaccacctgcctgcggggcgggagcgtggggaggagggtgagcacgcctatgatacgctgagtctggagagctctgacagcatggagaccagcatctccaccgggggcaactcggcctgctcccctgacaacatgtccagcgcgagtggtctggacatggggaagatcgaggagatggagaagatgctgaaagaggctcatgcagagaagaaccggctcatggagtcgagggagcgggagatggagctgcggcggcaggccctggaggaggagcggcggaggcgtgagcaggtagaacggaggctgcagagtgagagtgcccggaggcagcagctggtcgagaaggaggtcaagatgcgggagaaacaattttcccaggcacgacccctgacccgctacctgccaatccggaaggaggactttgacctgaagacacatattgagtcatcgggccatggtgttgatacctgcctgcacgtggtgctcagcagcaaggtctgccgtggctacttggtcaagatgggcggcaagattaaatcatggaagaagcgctggtttgtcttcgaccggctcaagcgcaccctttcctattatgtggacaagcatgagacgaagctgaagggagtcatctatttccaggccattgaggaagtgtactacgaccacctgcgcagtgcagccaagagcccgaacccagccctcaccttctgcgtaaagacccatgaccggctgtactacatggtggccccatctgcagaggccatgcgtatctggatggatgtcattgtcacaggggctgagggctacactcagttcatgaactaactgccgtgggcctcctggcagagcacaactggggcttttgtataagaagactttaatattctgtaaggagcttggtcctgtgagtttctgggctctggcctcctgaagaaccagccagaagaagaaaagtagaggtggctttgctgcctcctgggagcccagaacttgcagtaaccctttagggtcctgccccaggcccagccagggctgaggagctgtcacagagagggcctcagctctgacctgacacctgctctccccagcctgttttctcttttctaaaagacaaattatggtaccataagctgccaaagatcccctcctgcctcagacccctttgccaggggctttgggggctgagcagagccacatccagagtggggtaatagctcaggcggcccgcttcccatttctcaaaccccgctctgccccattgttctcctttcccttatactttttattaccttgctcaagggccagagatctcaagtgtcaaccttgaggtcccagctccatcccctagttgcagactcatcaccatggttaccatagtgactgcttcattgccatggttacatactaattgctgcagctctgtggcccagcccactgcttcagctgtgggccatctgagggtacgtgccatcatctctccagcccaggcccctgggcatctcatgctggggggaagggactgaatacctttttccttccccctgcctgtgtcttcagccctgatgcacaggctgccagccccccagtccagccctctcccttccactggtgccttgcttagagccagaagggatgaagccgggggatctatggaacagaggaggagcgatgcagttgggagaggaagctagaagggttatggttggagttctgtacagtgttgagtttccgacagggaaagaggattcctccaatgctcctagagagaaagcctgagcaggagatgatgcagcagaggggaagggccctgtggtgccgccgcccttccttcagcctccgaagggtgatggaaatggagagtggaggaccaggcctccagctgtctggcctcgcccttcacgccttaacactaagcccacctcccctgctctccttcccagcattgagcccttggttgcctgggcccaggctgggggttttcagtatttgtaagcatttcagcagaacaataaagcctttggactacg

SEQ ID NO: 166694 - DNA, 5673 bp, Homo sapiens
  Payload ID: 12819
  Gene Symbol: PHLDB2
  Gene Name: pleckstrin homology-like domain, family B, member 2
  Uniprot ID: Q86SQ0
  ENST ID: ENST00000393923
  CDS Start-End: 256-3969
tgaccacagtctgcagaggccagagagagcaggaaaggaaatggaaaggaacctcaccttcatgcttggggaaaaggagaaacctgtgttaatgtgtcttcccaacatcccactctcttcagcaatcgctggaacagccatgggccatccctgctgagtcaggaaagaagctgagggaagagtcgggattgaaaagcagcagacaaggctggcactgatcccagtttatcctttgagattcagcagaagatcctgatggaggaggaggataccaagagagaggtgcccaaggaagatggagttggtgatgtgcaacatttcgattccagcaagattatggaagagcatagctacatacaaaaggagctagatttacaaaatggtagcttagaggaagactctgtggtgcattctgttgagaacgattcccaaaacatgatggagagcctcagcccaaagaaatactcttccagtctgagatttaaagccaatggagactattctggctcctatttaaccctctcacaacctgtgcctgcaaagagaagcccttctcctttgggaaccagtgtcagaagcagcccctccttagccaaaatccagggaagcaagcagttctcttatgatggaactgacaaaaatattcctatgaaacctccaactcctttactcaacactacatcctccctcagtggatatccacttggaagagcagactttgatcattatactggccgggacagtgaaagggccttgaggctctcagagaagcctccctattccaaatatagctcaaggcataaatcgcatgacaatgtctactctcttggagggctggaaggtcggaaggcatctggctcgctcctggccatgtggaatggaagttccctgagtgatgctggcccgcctcctatcagcagatcgggagccgcaagcatgccttcaagcccaaagcaagccaggaaaatgagcattcaggacagcctggcgcttcaacccaagttaactagacacaaggagcttgcatctgaaaacatcaatttgagaactaggaagtactccagcagcagcctgagtcacatgggagcctacagccgatcacttcccaggttgtacagagccacagagaaccagctgacacctctcagcttgcctccaagaaactctctgggcaattccaaacgaacaaaacttggggaaaaggatctacctcatagcgtaatagacaatgacaattaccttaatttttcttctttgagctcaggggctttaccctataaaacctctgcttctgaaggcaatccttatgtaagttctaccctcagtgtccctgccagtccacgagtggctcggaagatgcttctggcctccacctcctcctgtgcctctgatgactttgatcaggcttcatatgtggggacaaacccgagtcattcacttcttgctggagagtcagacagagtttttgcgaccaggaggaacttctcttgtggatctgtggaatttgatgaggcagatttggaaagcctcagacaggcctcaggaaccccccagcctgcccttcgggaacggaaaagcagtattagctccatttcaggacgtgatgacctgatggattatcaccggcggcagagggaggaaagactcagggagcaggaaatggagcgattggagagacagcgtctggagaccatcctcagtctctgtgctgaatacacaaagcctgacagtcgcttatctactgggaccaccgtggaagatgtgcagaaaatcaacaaggagcttgagaagctgcagctctctgatgaggagtctgtgtttgaggaagccctcatgagccctgacacaagatacaggtgccaccggaaagactccctccctgatgcagacttggcaagctgtgggagtctcagtcagagcagtgccagcttctttacccccaggagcaccaggaatgatgaactactcagtgacctcacccggactcctccaccaccatcctccacctttccgaaagcttccagcgagtcctcttatctaagtatcctaccaaagaccccagagggtataagtgaagaacagagatctcaggagttggctgcaatggaagaaacccggatagtcattctgaacaacctcgaggaacttaagcaaaaaatcaaagacataaatgatcagatggatgagtctttcagagagttggatatggaatgtgctcttttggatggagaacagaaatctgaaacaactgaacttatgaaggagaaggagattttggatcatctaaaccggaaaatagctgaactggaaaagaacattgttggtgaaaagaccaaggatgctgacctgttggatgttgaaagcaaacactttgaagacctggagttccagcagcttgaacatgagagccgtctagatgaagaaaaggagaacttgactcaacagctcctgcgtgaagttgctgaatatcaacggaacatcgtttctagaaaggaaaaaatttctgcattgaaaaagcaagccaatcacattgttcagcaggctcagagagagcaagatcattttgtgaaagaaaagaataatttaataatgatgttgcaaagagaaaaggagaatctttgtaatttggaaaagaaatactccagcctctctggggggaaagggtttcccgttaaccccaatactttaaaagagggctatatcagtgtaaatgagattaatgagccgtgtggcaattccacgaatctatccccttccactcagtttcctgctgatgctgatgctgttgccactgagcctgccacagctgtgctggcgagccagccacagagtaaagagcactttagaagtctggaagaaaggaaaaaacagcataaagaaggcctctatctgagtgatactttgcctcgaaagaaaaccacatcttccatctccccacatttcagcagtgctactatggggagaagcatcaccccaaaggcccatctgcccctaggacagagtaacagctgtggaagtgtgctccctccctcactggcagccatggccaaagactcagaatctcggaggatgctcagaggttataatcaccaacagatgagtgaaggacacaggcagaaatctgaattttataaccgcacagcatctgaatcaaatgtctacttgaatagtttccattatccagatcacagctacaaggaccaggcctttgatactctgagcctcgatagctctgatagcatggagaccagcatctctgcttgctcaccagacaacatctctagtgccagcacttcaaatattgctagaatagaagaaatggagagacttttgaagcaggctcatgcagaaaagacgcggctgctcgaatccagggaacgggaaatggaagccaaaaaacgagccctggaagaagaaaaacgacgccgggaaatcctggaaaaacgattacaggaagaaactagccagaggcagaagttaatagaaaaggaagtaaaaataagggagagacaaagggcacaggctcgtcctttgacacgctacctgcctgtccggaaggaagactttgatttgcggagccatgtagagactgctggccacaatattgacacctgttaccatgtatcaatcacagagaagacctgccgaggattcctcatcaaaatgggtgggaaaattaaaacgtggaaaaaacgttggtttgtttttgatcggaacaagcgaacattctcttattatgcagacaagcatgaaactaaattgaaaggagtaatatactttcaagccattgaagaagtctattatgatcacctcaagaatgctaataagagtcctaatccgttactcacctttagcgtcaagactcatgacagaatctattatatggtagccccatcgccagaagccatgcggatctggatggatgttatagttacgggggcagaaggttacactcacttcttgttgtagtgaactgaggcaacagtccacttcagggcagacggcaataatctcttacaagaatgaagccatattcaaccccagatgagaaaacccaacagatccatcccttgagctgtaaacactcagaactcctttcatatcaagacaagttatttgtaaaaaataaagaaggggttttaatacaaaccttcataataaatagcaaaataattgaagcttccatgagaaagaaaacactattttgataaattggatcacttataggaacatttctaataaactgtttttaatcagttgtcggatttggtgaaataaactaaacaggttacagaatatctgtatgtacttggaaatacagaataactttatcacccaaatcactggcattgacattattggtaatcaactggctttttttaaaaaaggtagcattttgttgacagttattttgtaaacataagcaaataagggcttggagggaaatacattttaggaggagttttgccttaattttttaagtactgcaccaaaaccaaagagctgacctgacttctgtggaacagtagtaactgcaagtgatgaactgcatttcgtattgttctgtatatttcaaaatggtattttgatgccatcaaatgcccaggaaattgactttgcagtgtcaccactggtgtaagctactatatatgtatatatatatgtagtaaaccactttttgtaaaagaagaaagagcaaaaagctgtgtgttttagaaaaaaaagccaggttacgcaacaggcattctgtcatgttgaacaattttaaataaagagaatatctggtgttaggagcttgttttgctgaagatttctccattcctggtgctgagaataaaggcaaccagtagccaatgtcctttagattgtctgatttctttttgttgtggagcacacctgctaactgctccctcaacataactatgaaatcatagctctgttttcaccaaagaacagaccaattaacatacttatttgcagaagtggtgtagttctataaaacggcaaatgaagttcaacttaatattctctataatgtattattttattttattttttacaattagccttttttttagttaatttttgtcaaatgaaacgacttcaggcaagtctcttttataatggtttttcaagtgccatttattctagtttatcatgttttgcatgtttgaaagtatgaatgtgctctttcctaaaacatggcaaatgaatagatgtagagaataacaatattacttacaagatgaaatgattagattagaagtgtccctttattaaactttgtcagcctgactgggtacaattcttttgttaatttgcagtgtggtttgtatacacgtatacgtgttatcaataataagattttgcaactggatgacacaagattttacttgaacagtgaaggacaaaaatcatgattgtggaagatatttttaaaatctgattttgcagcgatcacttttaaaccctgtagtgatgtaagactaaaatataattgctaagattttgttggttaatgtaaagatatgacttttctgcactgtactctcttcataggattgtaaaggtgttctaatccaattgcatgatgtagtaagcctcttaaatatgtgtgttaaatatattgagtttggattaaaatgttgacatgatttcacatttgaaaataaa

SEQ ID NO: 166695 - DNA, 5543 bp, Homo sapiens
  Payload ID: 12819
  Gene Symbol: PHLDB2
  Gene Name: pleckstrin homology-like domain, family B, member 2
  Uniprot ID: Q86SQ0
  ENST ID: ENST00000393925
  CDS Start-End: 98-3859
gagacagggtgggcgggggcaaaggctaggcgctagggcggcggcgccagcgtagagcggcggtttggaggaaagatgagacgattccagcaagattatggaagagcatagctacatacaaaaggagctagatttacaaaatggtagcttagaggaagactctgtggtgcattctgttgagaacgattcccaaaacatgatggagagcctcagcccaaagaaatactcttccagtctgagatttaaagccaatggagactattctggctcctatttaaccctctcacaacctgtgcctgcaaagagaagcccttctcctttgggaaccagtgtcagaagcagcccctccttagccaaaatccagggaagcaagcagttctcttatgatggaactgacaaaaatattcctatgaaacctccaactcctttactcaacactacatcctccctcagtggatatccacttggaagagcagactttgatcattatactggccgggacagtgaaagggccttgaggctctcagagaagcctccctattccaaatatagctcaaggcataaatcgcatgacaatgtctactctcttggagggctggaaggtcggaaggcatctggctcgctcctggccatgtggaatggaagttccctgagtgatgctggcccgcctcctatcagcagatcgggagccgcaagcatgccttcaagcccaaagcaagccaggaaaatgagcattcaggacagcctggcgcttcaacccaagttaactagacacaaggagcttgcatctgaaaacatcaatttgagaactaggaagtactccagcagcagcctgagtcacatgggagcctacagccgatcacttcccaggttgtacagagccacagagaaccagctgacacctctcagcttgcctccaagaaactctctgggcaattccaaacgaacaaaacttggggaaaaggatctacctcatagcgtaatagacaatgacaattaccttaatttttcttctttgagctcaggggctttaccctataaaacctctgcttctgaaggcaatccttatgtaagttctaccctcagtgtccctgccagtccacgagtggctcggaagatgcttctggcctccacctcctcctgtgcctctgatgactttgatcaggcttcatatgtggggacaaacccgagtcattcacttcttgctggagagtcagacagagtttttgcgaccaggaggaacttctcttgtggatctgtggaatttgatgaggcagatttggaaagcctcagacaggcctcaggaaccccccagcctgcccttcgggaacggaaaagcagtattagctccatttcaggacgtgatgacctgatggattatcaccggcggcagagggaggaaagactcagggagcaggaaatggagcgattggagagacagcgtctggagaccatcctcagtctctgtgctgaatacacaaagcctgacagtcgcttatctactgggaccaccgtggaagatgtgcagaaaatcaacaaggagcttgagaagctgcagctctctgatgaggagtctgtgtttgaggaagccctcatgagccctgacacaagatacaggtgccaccggaaagactccctccctgatgcagacttggcaagctgtgggagtctcagtcagagcagtgccagcttctttacccccaggagcaccaggaatgatgaactactcagtgacctcacccggactcctccaccaccatcctccacctttccgaaagcttccagcgagtcctcttatctaagtatcctaccaaagaccccagagggtataagtgaagaacagagatctcaggagttggctgcaatggaagaaacccggatagtcattctgaacaacctcgaggaacttaagcaaaaaatcaaagacataaatgatcagatggatgagtctttcagagagttggatatggaatgtgctcttttggatggagaacagaaatctgaaacaactgaacttatgaaggagaaggagattttggatcatctaaaccggaaaatagctgaactggaaaagaacattgttggtgaaaagaccaaggagaaggtaaagcttgatgctgaaagggaaaaactagagaggcttcaggagctttactccgagcagaagacccagctggacaattgtcctgagtccatgagggaacagttacaacaacaactgaagagggatgctgacctgttggatgttgaaagcaaacactttgaagacctggagttccagcagcttgaacatgagagccgtctagatgaagaaaaggagaacttgactcaacagctcctgcgtgaagttgctgaatatcaacggaacatcgtttctagaaaggaaaaaatttctgcattgaaaaagcaagccaatcacattgttcagcaggctcagagagagcaagatcattttgtgaaagaaaagaataatttaataatgatgttgcaaagagaaaaggagaatctttgtaatttggaaaagaaatactccagcctctctggggggaaagggtttcccgttaaccccaatactttaaaagagggctatatcagtgtaaatgagattaatgagccgtgtggcaattccacgaatctatccccttccactcagtttcctgctgatgctgatgctgttgccactgagcctgccacagctgtgctggcgagccagccacagagtaaagagcactttagaagtctggaagaaaggaaaaaacagcataaagaaggcctctatctgagtgatactttgcctcgaaagaaaaccacatcttccatctccccacatttcagcagtgctactatggggagaagcatcaccccaaaggcccatctgcccctaggacagagtaacagctgtggaagtgtgctccctccctcactggcagccatggccaaagactcagaatctcggaggatgctcagaggttataatcaccaacagatgagtgaaggacacaggcagaaatctgaattttataaccgcacagcatctgaatcaaatgtctacttgaatagtttccattatccagatcacagctacaaggaccaggcctttgatactctgagcctcgatagctctgatagcatggagaccagcatctctgcttgctcaccagacaacatctctagtgccagcacttcaaatattgctagaatagaagaaatggagagacttttgaagcaggctcatgcagaaaagacgcggctgctcgaatccagggaacgggaaatggaagccaaaaaacgagccctggaagaagaaaaacgacgccgggaaatcctggaaaaacgattacaggaagaaactagccagaggcagaagttaatagaaaaggaagtaaaaataagggagagacaaagggcacaggctcgtcctttgacacgctacctgcctgtccggaaggaagactttgatttgcggagccatgtagagactgctggccacaatattgacacctgttaccatgtatcaatcacagagaagacctgccgaggattcctcatcaaaatgggtgggaaaattaaaacgtggaaaaaacgttggtttgtttttgatcggaacaagcgaacattctcttattatgcagacaagcatgaaactaaattgaaaggagtaatatactttcaagccattgaagaagtctattatgatcacctcaagaatgctaataagagtcctaatccgttactcacctttagcgtcaagactcatgacagaatctattatatggtagccccatcgccagaagccatgcggatctggatggatgttatagttacgggggcagaaggttacactcacttcttgttgtagtgaactgaggcaacagtccacttcagggcagacggcaataatctcttacaagaatgaagccatattcaaccccagatgagaaaacccaacagatccatcccttgagctgtaaacactcagaactcctttcatatcaagacaagttatttgtaaaaaataaagaaggggttttaatacaaaccttcataataaatagcaaaataattgaagcttccatgagaaagaaaacactattttgataaattggatcacttataggaacatttctaataaactgtttttaatcagttgtcggatttggtgaaataaactaaacaggttacagaatatctgtatgtacttggaaatacagaataactttatcacccaaatcactggcattgacattattggtaatcaactggctttttttaaaaaaggtagcattttgttgacagttattttgtaaacataagcaaataagggcttggagggaaatacattttaggaggagttttgccttaattttttaagtactgcaccaaaaccaaagagctgacctgacttctgtggaacagtagtaactgcaagtgatgaactgcatttcgtattgttctgtatatttcaaaatggtattttgatgccatcaaatgcccaggaaattgactttgcagtgtcaccactggtgtaagctactatatatgtatatatatatgtagtaaaccactttttgtaaaagaagaaagagcaaaaagctgtgtgttttagaaaaaaaagccaggttacgcaacaggcattctgtcatgttgaacaattttaaataaagagaatatctggtgttaggagcttgttttgctgaagatttctccattcctggtgctgagaataaaggcaaccagtagccaatgtcctttagattgtctgatttctttttgttgtggagcacacctgctaactgctccctcaacataactatgaaatcatagctctgttttcaccaaagaacagaccaattaacatacttatttgcagaagtggtgtagttctataaaacggcaaatgaagttcaacttaatattctctataatgtattattttattttattttttacaattagccttttttttagttaatttttgtcaaatgaaacgacttcaggcaagtctcttttataatggtttttcaagtgccatttattctagtttatcatgttttgcatgtttgaaagtatgaatgtgctctttcctaaaacatggcaaatgaatagatgtagagaataacaatattacttacaagatgaaatgattagattagaagtgtccctttattaaactttgtcagcctgactgggtacaattcttttgttaatttgcagtgtggtttgtatacacgtatacgtgttatcaataataagattttgcaactggatgacacaagattttacttgaacagtgaaggacaaaaatcatgattgtggaagatatttttaaaatctgattttgcagcgatcacttttaaaccctgtagtgatgtaagactaaaatataattgctaagattttgttggttaatgtaaagatatgacttttctgcactgtactctcttcataggattgtaaaggtgttctaatccaattgcatgatgtagtaagcctcttaaatatgtgtgttaaatatattgagtttggattaaaatgttgacatg

SEQ ID NO: 166696 - DNA, 5996 bp, Homo sapiens
  Payload ID: 12819
  Gene Symbol: PHLDB2
  Gene Name: pleckstrin homology-like domain, family B, member 2
  Uniprot ID: Q86SQ0
  ENST ID: ENST00000412622
  CDS Start-End: 412-4044
gtctggtgaggaaatcatcaccctaggacgtaaaccctcccgcccttctttcagctcttaaaaaaagcctgccacgaaagtccctactgcgttgctgcgaacgtagctttgagaagctggcgcccagtgatggggcaaacagccatgcccttccagcagccgtgaaagccccaacagcaaactgcctgggagcggggcaggtcaccaacttcgttgctcgaactccctgggtgcccgccgcggtggttacaaagggggtcaagagtgccggacccagccgcgcggagcccaccattgcggcccgagggggacccgacgggggcccgacggtgtggcgtggcgcaaggagcgcgcctgccttctctcgccgccgggaacgggctgcaccaatggccagattccagcaagattatggaagagcatagctacatacaaaaggagctagatttacaaaatggtagcttagaggaagactctgtggtgcattctgttgagaacgattcccaaaacatgatggagagcctcagcccaaagaaatactcttccagtctgagatttaaagccaatggagactattctggctcctatttaaccctctcacaacctgtgcctgcaaagagaagcccttctcctttgggaaccagtgtcagaagcagcccctccttagccaaaatccagggaagcaagcagttctcttatgatggaactgacaaaaatattcctatgaaacctccaactcctttactcaacactacatcctccctcagtggatatccacttggaagagcagactttgatcattatactggccgggacagtgaaagggccttgaggctctcagagaagcctccctattccaaatatagctcaaggcataaatcgcatgacaatgtctactctcttggagggctggaaggtcggaaggcatctggctcgctcctggccatgtggaatggaagttccctgagtgatgctggcccgcctcctatcagcagatcgggagccgcaagcatgccttcaagcccaaagcaagccaggaaaatgagcattcaggacagcctggcgcttcaacccaagttaactagacacaaggagcttgcatctgaaaacatcaatttgagaactaggaagtactccagcagcagcctgagtcacatgggagcctacagccgatcacttcccaggttgtacagagccacagagaaccagctgacacctctcagcttgcctccaagaaactctctgggcaattccaaacgaacaaaacttggggaaaaggatctacctcatagcgtaatagacaatgacaattaccttaatttttcttctttgagctcaggggctttaccctataaaacctctgcttctgaaggcaatccttatgtaagttctaccctcagtgtccctgccagtccacgagtggctcggaagatgcttctggcctccacctcctcctgtgcctctgatgactttgatcaggcttcatatgtggggacaaacccgagtcattcacttcttgctggagagtcagacagagtttttgcgaccaggaggaacttctcttgtggatctgtggaatttgatgaggcagatttggaaagcctcagacaggcctcaggaaccccccagcctgcccttcgggaacggaaaagcagtattagctccatttcaggacgtgatgacctgatggattatcaccggcggcagagggaggaaagactcagggagcaggaaatggagcgattggagagacagcgtctggagaccatcctcagtctctgtgctgaatacacaaagcctgacagtcgcttatctactgggaccaccgtggaagatgtgcagaaaatcaacaaggagcttgagaagctgcagctctctgatgaggagtctgtgtttgaggaagccctcatgagccctgacacaagatacaggtgccaccggaaagactccctccctgatgcagacttggcaagctgtgggagtctcagtcagagcagtgccagcttctttacccccaggagcaccaggaatgatgaactactcagtgacctcacccggactcctccaccaccatcctccacctttccgaaagcttccagcgagtcctcttatctaagtatcctaccaaagaccccagagggtataagtgaagaacagagatctcaggagttggctgcaatggaagaaacccggatagtcattctgaacaacctcgaggaacttaagcaaaaaatcaaagacataaatgatcagatggatgagtctttcagagagttggatatggaatgtgctcttttggatggagaacagaaatctgaaacaactgaacttatgaaggagaaggagattttggatcatctaaaccggaaaatagctgaactggaaaagaacattgttggtgaaaagaccaaggatgctgacctgttggatgttgaaagcaaacactttgaagacctggagttccagcagcttgaacatgagagccgtctagatgaagaaaaggagaacttgactcaacagctcctgcgtgaagttgctgaatatcaacggaacatcgtttctagaaaggaaaaaatttctgcattgaaaaagcaagccaatcacattgttcagcaggctcagagagagcaagatcattttgtgaaagaaaagaataatttaataatgatgttgcaaagagaaaaggagaatctttgtaatttggaaaagaaatactccagcctctctggggggaaagggtttcccgttaaccccaatactttaaaagagggctatatcagtgtaaatgagattaatgagccgtgtggcaattccacgaatctatccccttccactcagtttcctgctgatgctgatgctgttgccactgagcctgccacagctgtgctggcgagccagccacagagtaaagagcactttagaagtctggaagaaaggaaaaaacagcataaagaaggcctctatctgagtgatactttgcctcgaaagaaaaccacatcttccatctccccacatttcagcagtgctactatggggagaagcatcaccccaaaggcccatctgcccctaggacagagtaacagctgtggaagtgtgctccctccctcactggcagccatggccaaagactcagaatctcggaggatgctcagaggttataatcaccaacagatgagtgaaggacacaggcagaaatctgaattttataaccgcacagcatctgaatcaaatgtctacttgaatagtttccattatccagatcacagctacaaggaccaggcctttgatactctgagcctcgatagctctgatagcatggagaccagcatctctgcttgctcaccagacaacatctctagtgccagcacttcaaatattgctagaatagaagaaatggagagacttttgaagcaggctcatgcagaaaagacgcggctgctcgaatccagggaacgggaaatggaagccaaaaaacgagccctggaagaagaaaaacgacgccgggaaatcctggaaaaacgattacaggaagaaactagccagaggcagaagttaatagaaaaggaagtaaaaataagggagagacaaagggcacaggctcgtcctttgacacgctacctgcctgtccggaaggaagactttgatttgcggagccatgtagagactgctggccacaatattgacacctgttaccatgtatcaatcacagagaagacctgccgaggattcctcatcaaaatgggtgggaaaattaaaacgtggaaaaaacgttggtttgtttttgatcggaacaagcgaacattctcttattatgcagacaagcatgaaactaaattgaaaggagtaatatactttcaagccattgaagaagtctattatgatcacctcaagaatgctaataagagtcctaatccgttactcacctttagcgtcaagactcatgacagaatctattatatggtagccccatcgccagaagccatgcggatctggatggatgttatagttacgggggcagaaggttacactcacttcttgttgtagtgaactgaggcaacagtccacttcagggcagacggcaataatctcttacaagaatgaagccatattcaaccccagatgagaaaacccaacagatccatcccttgagctgtaaacactcagaactcctttcatatcaagacaagttatttgtaaaaaataaagaaggggttttaatacaaaccttcataataaatagcaaaataattgaagcttccatgagaaagaaaacactattttgataaattggatcacttataggaacatttctaataaactgtttttaatcagttgtcggatttggtgaaataaactaaacaggttacagaatatctgtatgtacttggaaatacagaataactttatcacccaaatcactggcattgacattattggtaatcaactggctttttttaaaaaaggtagcattttgttgacagttattttgtaaacataagcaaataagggcttggagggaaatacattttaggaggagttttgccttaattttttaagtactgcaccaaaaccaaagagctgacctgacttctgtggaacagtagtaactgcaagtgatgaactgcatttcgtattgttctgtatatttcaaaatggtattttgatgccatcaaatgcccaggaaattgactttgcagtgtcaccactggtgtaagctactatatatgtatatatatatgtagtaaaccactttttgtaaaagaagaaagagcaaaaagctgtgtgttttagaaaaaaaagccaggttacgcaacaggcattctgtcatgttgaacaattttaaataaagagaatatctggtgttaggagcttgttttgctgaagatttctccattcctggtgctgagaataaaggcaaccagtagccaatgtcctttagattgtctgatttctttttgttgtggagcacacctgctaactgctccctcaacataactatgaaatcatagctctgttttcaccaaagaacagaccaattaacatacttatttgcagaagtggtgtagttctataaaacggcaaatgaagttcaacttaatattctctataatgtattattttattttattttttacaattagccttttttttagttaatttttgtcaaatgaaacgacttcaggcaagtctcttttataatggtttttcaagtgccatttattctagtttatcatgttttgcatgtttgaaagtatgaatgtgctctttcctaaaacatggcaaatgaatagatgtagagaataacaatattacttacaagatgaaatgattagattagaagtgtccctttattaaactttgtcagcctgactgggtacaattcttttgttaatttgcagtgtggtttgtatacacgtatacgtgttatcaataataagattttgcaactggatgacacaagattttacttgaacagtgaaggacaaaaatcatgattgtggaagatatttttaaaatctgattttgcagcgatcacttttaaaccctgtagtgatgtaagactaaaatataattgctaagattttgttggttaatgtaaagatatgacttttctgcactgtactctcttcataggattgtaaaggtgttctaatccaattgcatgatgtagtaagcctcttaaatatgtgtgttaaatatattgagtttggattaaaatgttgacatgatttcacatttgaaaataaactcatctcttattttgaagttacctatctgtagtatgatggaggatgaattaatcgcaaatgacagttgtagaaactatgtaaagtttgttgtgtgctaacattatgatttgtagtgtataaactgaagtattccaatagaagtatctctggttacatcctattgcttacaaaatgaaatgaaccctgaaaaactctgacatcatattgttgtctgtttacacagatacatttattgctggggattgc

SEQ ID NO: 166697 - DNA, 6127 bp, Homo sapiens
  Payload ID: 12819
  Gene Symbol: PHLDB2
  Gene Name: pleckstrin homology-like domain, family B, member 2
  Uniprot ID: Q86SQ0
  ENST ID: ENST00000431670
  CDS Start-End: 412-4173
gtctggtgaggaaatcatcaccctaggacgtaaaccctcccgcccttctttcagctcttaaaaaaagcctgccacgaaagtccctactgcgttgctgcgaacgtagctttgagaagctggcgcccagtgatggggcaaacagccatgcccttccagcagccgtgaaagccccaacagcaaactgcctgggagcggggcaggtcaccaacttcgttgctcgaactccctgggtgcccgccgcggtggttacaaagggggtcaagagtgccggacccagccgcgcggagcccaccattgcggcccgagggggacccgacgggggcccgacggtgtggcgtggcgcaaggagcgcgcctgccttctctcgccgccgggaacgggctgcaccaatggccagattccagcaagattatggaagagcatagctacatacaaaaggagctagatttacaaaatggtagcttagaggaagactctgtggtgcattctgttgagaacgattcccaaaacatgatggagagcctcagcccaaagaaatactcttccagtctgagatttaaagccaatggagactattctggctcctatttaaccctctcacaacctgtgcctgcaaagagaagcccttctcctttgggaaccagtgtcagaagcagcccctccttagccaaaatccagggaagcaagcagttctcttatgatggaactgacaaaaatattcctatgaaacctccaactcctttactcaacactacatcctccctcagtggatatccacttggaagagcagactttgatcattatactggccgggacagtgaaagggccttgaggctctcagagaagcctccctattccaaatatagctcaaggcataaatcgcatgacaatgtctactctcttggagggctggaaggtcggaaggcatctggctcgctcctggccatgtggaatggaagttccctgagtgatgctggcccgcctcctatcagcagatcgggagccgcaagcatgccttcaagcccaaagcaagccaggaaaatgagcattcaggacagcctggcgcttcaacccaagttaactagacacaaggagcttgcatctgaaaacatcaatttgagaactaggaagtactccagcagcagcctgagtcacatgggagcctacagccgatcacttcccaggttgtacagagccacagagaaccagctgacacctctcagcttgcctccaagaaactctctgggcaattccaaacgaacaaaacttggggaaaaggatctacctcatagcgtaatagacaatgacaattaccttaatttttcttctttgagctcaggggctttaccctataaaacctctgcttctgaaggcaatccttatgtaagttctaccctcagtgtccctgccagtccacgagtggctcggaagatgcttctggcctccacctcctcctgtgcctctgatgactttgatcaggcttcatatgtggggacaaacccgagtcattcacttcttgctggagagtcagacagagtttttgcgaccaggaggaacttctcttgtggatctgtggaatttgatgaggcagatttggaaagcctcagacaggcctcaggaaccccccagcctgcccttcgggaacggaaaagcagtattagctccatttcaggacgtgatgacctgatggattatcaccggcggcagagggaggaaagactcagggagcaggaaatggagcgattggagagacagcgtctggagaccatcctcagtctctgtgctgaatacacaaagcctgacagtcgcttatctactgggaccaccgtggaagatgtgcagaaaatcaacaaggagcttgagaagctgcagctctctgatgaggagtctgtgtttgaggaagccctcatgagccctgacacaagatacaggtgccaccggaaagactccctccctgatgcagacttggcaagctgtgggagtctcagtcagagcagtgccagcttctttacccccaggagcaccaggaatgatgaactactcagtgacctcacccggactcctccaccaccatcctccacctttccgaaagcttccagcgagtcctcttatctaagtatcctaccaaagaccccagagggtataagtgaagaacagagatctcaggagttggctgcaatggaagaaacccggatagtcattctgaacaacctcgaggaacttaagcaaaaaatcaaagacataaatgatcagatggatgagtctttcagagagttggatatggaatgtgctcttttggatggagaacagaaatctgaaacaactgaacttatgaaggagaaggagattttggatcatctaaaccggaaaatagctgaactggaaaagaacattgttggtgaaaagaccaaggagaaggtaaagcttgatgctgaaagggaaaaactagagaggcttcaggagctttactccgagcagaagacccagctggacaattgtcctgagtccatgagggaacagttacaacaacaactgaagagggatgctgacctgttggatgttgaaagcaaacactttgaagacctggagttccagcagcttgaacatgagagccgtctagatgaagaaaaggagaacttgactcaacagctcctgcgtgaagttgctgaatatcaacggaacatcgtttctagaaaggaaaaaatttctgcattgaaaaagcaagccaatcacattgttcagcaggctcagagagagcaagatcattttgtgaaagaaaagaataatttaataatgatgttgcaaagagaaaaggagaatctttgtaatttggaaaagaaatactccagcctctctggggggaaagggtttcccgttaaccccaatactttaaaagagggctatatcagtgtaaatgagattaatgagccgtgtggcaattccacgaatctatccccttccactcagtttcctgctgatgctgatgctgttgccactgagcctgccacagctgtgctggcgagccagccacagagtaaagagcactttagaagtctggaagaaaggaaaaaacagcataaagaaggcctctatctgagtgatactttgcctcgaaagaaaaccacatcttccatctccccacatttcagcagtgctactatggggagaagcatcaccccaaaggcccatctgcccctaggacagagtaacagctgtggaagtgtgctccctccctcactggcagccatggccaaagactcagaatctcggaggatgctcagaggttataatcaccaacagatgagtgaaggacacaggcagaaatctgaattttataaccgcacagcatctgaatcaaatgtctacttgaatagtttccattatccagatcacagctacaaggaccaggcctttgatactctgagcctcgatagctctgatagcatggagaccagcatctctgcttgctcaccagacaacatctctagtgccagcacttcaaatattgctagaatagaagaaatggagagacttttgaagcaggctcatgcagaaaagacgcggctgctcgaatccagggaacgggaaatggaagccaaaaaacgagccctggaagaagaaaaacgacgccgggaaatcctggaaaaacgattacaggaagaaactagccagaggcagaagttaatagaaaaggaagtaaaaataagggagagacaaagggcacaggctcgtcctttgacacgctacctgcctgtccggaaggaagactttgatttgcggagccatgtagagactgctggccacaatattgacacctgttaccatgtatcaatcacagagaagacctgccgaggattcctcatcaaaatgggtgggaaaattaaaacgtggaaaaaacgttggtttgtttttgatcggaacaagcgaacattctcttattatgcagacaagcatgaaactaaattgaaaggagtaatatactttcaagccattgaagaagtctattatgatcacctcaagaatgctaataagagtcctaatccgttactcacctttagcgtcaagactcatgacagaatctattatatggtagccccatcgccagaagccatgcggatctggatggatgttatagttacgggggcagaaggttacactcacttcttgttgtagtgaactgaggcaacagtccacttcagggcagacggcaataatctcttacaagaatgaagccatattcaaccccagatgagaaaacccaacagatccatcccttgagctgtaaacactcagaactcctttcatatcaagacaagttatttgtaaaaaataaagaaggggttttaatacaaaccttcataataaatagcaaaataattgaagcttccatgagaaagaaaacactattttgataaattggatcacttataggaacatttctaataaactgtttttaatcagttgtcggatttggtgaaataaactaaacaggttacagaatatctgtatgtacttggaaatacagaataactttatcacccaaatcactggcattgacattattggtaatcaactggctttttttaaaaaaggtagcattttgttgacagttattttgtaaacataagcaaataagggcttggagggaaatacattttaggaggagttttgccttaattttttaagtactgcaccaaaaccaaagagctgacctgacttctgtggaacagtagtaactgcaagtgatgaactgcatttcgtattgttctgtatatttcaaaatggtattttgatgccatcaaatgcccaggaaattgactttgcagtgtcaccactggtgtaagctactatatatgtatatatatatgtagtaaaccactttttgtaaaagaagaaagagcaaaaagctgtgtgttttagaaaaaaaagccaggttacgcaacaggcattctgtcatgttgaacaattttaaataaagagaatatctggtgttaggagcttgttttgctgaagatttctccattcctggtgctgagaataaaggcaaccagtagccaatgtcctttagattgtctgatttctttttgttgtggagcacacctgctaactgctccctcaacataactatgaaatcatagctctgttttcaccaaagaacagaccaattaacatacttatttgcagaagtggtgtagttctataaaacggcaaatgaagttcaacttaatattctctataatgtattattttattttattttttacaattagccttttttttagttaatttttgtcaaatgaaacgacttcaggcaagtctcttttataatggtttttcaagtgccatttattctagtttatcatgttttgcatgtttgaaagtatgaatgtgctctttcctaaaacatggcaaatgaatagatgtagagaataacaatattacttacaagatgaaatgattagattagaagtgtccctttattaaactttgtcagcctgactgggtacaattcttttgttaatttgcagtgtggtttgtatacacgtatacgtgttatcaataataagattttgcaactggatgacacaagattttacttgaacagtgaaggacaaaaatcatgattgtggaagatatttttaaaatctgattttgcagcgatcacttttaaaccctgtagtgatgtaagactaaaatataattgctaagattttgttggttaatgtaaagatatgacttttctgcactgtactctcttcataggattgtaaaggtgttctaatccaattgcatgatgtagtaagcctcttaaatatgtgtgttaaatatattgagtttggattaaaatgttgacatgatttcacatttgaaaataaactcatctcttattttgaagttacctatctgtagtatgatggaggatgaattaatcgcaaatgacagttgtagaaactatgtaaagtttgttgtgtgctaacattatgatttgtagtgtataaactgaagtattccaatagaagtatctctggttacatcctattgcttacaaaatgaaatgaaccctgaaaaactctgacatcatattgttgtctgtttacacagatacatttattgctggggattgcaa

SEQ ID NO: 166698 - DNA, 1861 bp, Homo sapiens
  Payload ID: 12819
  Gene Symbol: PHLDB2
  Gene Name: pleckstrin homology-like domain, family B, member 2
  ENST ID: ENST00000478922
  CDS Start-End: 144-1703
ctgactgctcaccgcgagtcaggaggggccggcgggctcacggagggagacagggtgggcgggggcaaaggctaggcgctagggcggcggcgccagcgtagagcggcggtttggaggaaagatgagacgattccagcaagattatggaagagcatagctacatacaaaaggagctagatttacaaaatggtagcttagaggaagactctgtggtgcattctgttgagaacgattcccaaaacatgatggagagcctcagcccaaagaaatactcttccagtctgagatttaaagccaatggagactattctggctcctatttaaccctctcacaacctgtgcctgcaaagagaagcccttctcctttgggaaccagtgtcagaagcagcccctccttagccaaaatccagggaagcaagcagttctcttatgatggaactgacaaaaatattcctatgaaacctccaactcctttactcaacactacatcctccctcagtggatatccacttggaagagcagactttgatcattatactggccgggacagtgaaagggccttgaggctctcagagaagcctccctattccaaatatagctcaaggcataaatcgcatgacaatgtctactctcttggagggctggaaggtcggaaggcatctggctcgctcctggccatgtggaatggaagttccctgagtgatgctggcccgcctcctatcagcagatcgggagccgcaagcatgccttcaagcccaaagcaagccaggaaaatgagcattcaggacagcctggcgcttcaacccaagttaactagacacaaggagcttgcatctgaaaacatcaatttgagaactaggaagtactccagcagcagcctgagtcacatgggagcctacagccgatcacttcccaggttgtacagagccacagagaaccagctgacacctctcagcttgcctccaagaaactctctgggcaattccaaacgaacaaaacttggggaaaaggatctacctcatagcgtaatagacaatgacaattaccttaatttttcttctttgagctcaggggctttaccctataaaacctctgcttctgaaggcaatccttatgtaagttctaccctcagtgtccctgccagtccacgagtggctcggaagatgcttctggcctccacctcctcctgtgcctctgatgactttgatcaggcttcatatgtggggacaaacccgagtcattcacttcttgctggagagtcagacagagtttttgcgaccaggaggaacttctcttgtggatctgtggaatttgatgaggcagatttggaaagcctcagacaggcctcaggaaccccccagcctgcccttcgggaacggaaaagcagtattagctccatttcaggacgtgatgacctgatggattatcaccggcggcagagggaggaaagactcagggagcaggaaatggagcgattggtaatcttcatctcaacagtgattgacctcactgtttcattaaccagcatctacagggcagccttggagatggactccaggatatgtgggaatataggatattcatgttcactagccacagctgctatctttctcttctctcctgctatccttcttcttcccatatcactattaataggcttgtttggctatcttgaaggcctccaggaattaatgttaatttagttgctctgcggacttctcacaagtataaattctttaaaaacataacagaggagttgggaattttatgaaatttctgagtcttacaaacttctctttaagactatgaggaaatgctgacttgtattatttatatcattaaatttgcttgtgtatggtta

SEQ ID NO: 166699 - DNA, 5813 bp, Homo sapiens
  Payload ID: 12819
  Gene Symbol: PHLDB2
  Gene Name: pleckstrin homology-like domain, family B, member 2
  ENST ID: ENST00000477695
  CDS Start-End: 134-1879
accgcgagtcaggaggggccggcgggctcacggagggagacagggtgggcgggggcaaaggctaggcgctagggcggcggcgccagcgtagagcggcggtttggaggaaagatgagacgattccagcaagattatggaagagcatagctacatacaaaaggagctagatttacaaaatggtagcttagaggaagactctgtggtgcattctgttgagaacgattcccaaaacatgatggagagcctcagcccaaagaaatactcttccagtctgagatttaaagccaatggagactattctggctcctatttaaccctctcacaacctgtgcctgcaaagagaagcccttctcctttgggaaccagtgtcagaagcagcccctccttagccaaaatccagggaagcaagcagttctcttatgatggaactgacaaaaatattcctatgaaacctccaactcctttactcaacactacatcctccctcagtggatatccacttggaagagcagactttgatcattatactggccgggacagtgaaagggccttgaggctctcagagaagcctccctattccaaatatagctcaaggcataaatcgcatgacaatgtctactctcttggagggctggaaggtcggaaggcatctggctcgctcctggccatgtggaatggaagttccctgagtgatgctggcccgcctcctatcagcagatcgggagccgcaagcatgccttcaagcccaaagcaagccaggaaaatgagcattcaggacagcctggcgcttcaacccaagttaactagacacaaggagcttgcatctgaaaacatcaatttgagaactaggaagtactccagcagcagcctgagtcacatgggagcctacagccgatcacttcccaggttgtacagagccacagagaaccagctgacacctctcagcttgcctccaagaaactctctgggcaattccaaacgaacaaaacttggggaaaaggatctacctcatagcgtaatagacaatgacaattaccttaatttttcttctttgagctcaggggctttaccctataaaacctctgcttctgaaggcaatccttatgtaagttctaccctcagtgtccctgccagtccacgagtggctcggaagatgcttctggcctccacctcctcctgtgcctctgatgactttgatcaggcttcatatgtggggacaaacccgagtcattcacttcttgctggagagtcagacagagtttttgcgaccaggaggaacttctcttgtggatctgtggaatttgatgaggcagatttggaaagcctcagacaggcctcaggaaccccccagcctgcccttcgggaacggaaaagcagtattagctccatttcaggacgtgatgacctgatggattatcaccggcggcagagggaggaaagactcagggagcaggaaatggagcgattggagagacagcgtctggagaccatcctcagtctctgtgctgaatacacaaagcctgacagtcgcttatctactgggaccaccgtggaagatgtgcagaaaatcaacaaggagcttgagaagctgcagctctctgatgaggagtctgtgtttgaggaagccctcatgagccctgacacaagatacaggtgccaccggaaagactccctccctgatgcagacttggcaagctgtgggagtctcagtcagagcagtgccagcttctttacccccaggagcaccaggaatgatgaactactcagtgacctcacccggactcctccaccaccatcctccacctttccgaaagcttccagcgagtcctcttatctaagtatcctaccaaaggtaatgttggcccagcaaagatactaggatttaaggtctagggctgtgcatatgctttggcatgaaaactgatgattttatcatgctaattatccaggatgttttcagtgaaatttcaatttaagaggtcattagctgagcgaggtgcagcaaattagggtgtttactgtaaagtaacaaatttgcactgtaaaaattgtagcagcacagaagagtagaaagaaagcacatttctcttctccctgcaccctttcaggttgtacacctgagtgataagcaggtgtaaaactggtgctaaaattgtcttacctgccttcctaatattttctgtgtatatatggctatctgttataggcatagacagacagacacacacatagtgttctgtactttttttccctcactaaatgccttgggtatctttgcatattagtatacatagctctacctcattctttttaatgaccaattgctcttcttttgtttgcaactaccgtttattttcagggtttttttttttttgctaataaaatccatatgcgcaaatattgtagcatatatatatttgcacaattctgcaaatgtgtctgtgggatcacttactaaaagtggaattgctgggtcaaagagtttgtgtatttttcactttactcaatatttccaaatcgtacttctaaaagaccatattaaaaaaagagtctatatatccaggtgacactttgactaagtttatatgtgcatataaacacaagtgttctccatacacttgccaaggttgcatattgtcaaaatttttcaattagccaaattgatagaagtttaatttgcttttctttaattatacatcaagttggggatctttccatatttttagttattatttgtattttttgacccacttattcatgttcttcacccatttttttaattgttttatttttcttgtgttttactgagtagtaagagctgtttgtggtaagcagatgagccttttatcataactagtctttattttgactttatttgtattttttcggcatataggagtttaagatttattggtactcataagtactatttagtcttctggttgtatgttggtttaaaattgtcatccttttgaggatttgttaaatggagtttaaggaaaaatcttttaaatttttttttctttttctttttgtacaggacttagaaccccaaaatcttttgttattacgtttttttcacacaggttaagaatttttttctacaacaatttaggttttaaatttctccaaaaatgatttgaaggagcttacaatgaaagatataaattttattggactaaaattagaataacaaaaatagtaaataggaggaaaaagcagatatgatattcacaaggtagatttacttatttaggaataagtaggattaatgtattgatttgcttaattgatgcttactattaagttcaactgtgagattctttagttaatcttttgttataagagaaggacacattgactctttaagaggaagatattgtcatggtactaaattctggcagtaatttatcacatgggcattattcaggggagtttgcgtgtttgtttagctacagcaagacttttacactgaatgttcctagtcagaaatcattatctacctagtgagtttttccatgatacacatcaggacttcggactgttgaatacatgttggacatcaatcccttcttttttctttctttctttttttttgagacagagtcttgctctgtcacccaggctggagtgcagtggtgcaatctaggctcactgcaacctctgccttccgggttcaagcgaatctcctgcctcagcctcccgagtagcggtgactacaggcacacgccaccatgcctggctaatttttgtatttttagtagagacaaggtttcaccctgttggctaggccagtctcgaactcctgacctcaagtgatctgcctgcctcggcctcccaaagtgctgggatgacaagggtgcgccactgagccctacccatcccttctttttgctatagtgaccatgtttaccttactaattctcaatggagactaattctgaacaggacatctgtttctgtgggcagagagttgcaatgattagaaaccaggatagggaagaaagtaggggcagggggaatcaaaagttgttgttcaggcacagtaaatgacccatcacttgaaaagttgagctgttgtcatcagccattgggcttccttagaaaccctttgcttccttttgatcttaaatcttttcacatatcttcctttatggagatctgccagttttttgttaaaaacattaagctgtgtgctgtctctaaagactatcttttgggagacaggtttcctcctggagagggctatgacaagaatgctgttggtgcgtacacgagcagatcttggcagatgtttttaattgctcaagcgtgtaattgtggaataggaggcctctgaagcttagtgcagcatctgttgttgcaagagaggtaagactctgcatcctttagaggcaggaaacatcaaggacacccaggttaccagacagcagtgtagaaagagtacaagtgagcagagctgatggattccaagaaacacatttttttacttattactttctgaaggtggacatatattaccttgagacagcagacagaaaattctttttaaaacaaccttcctatttgttttgcatgctctttctcttcaattaatttccacactggattatttgcctaacaaagtacaatgttaataatcgatttagggataaatggagaagagaggaatgtgaaaaacactgtaagttgacttaactatacagaacaatcttaatgatatttagaaaacctgagagttaccagtcaagaacttgctttatgtaacacttacagatgcagatgactttggaaatatgctaattttagttggcctttgtgaaccaccccctgaggtaaaagttgtctggaaagtggctcatcttcctccttttgagtcccttgcacccctctctcctttggctgcaaaaagggttttaagaagaaatctgtgaaaaaggggcaagcagaaagtgtcttttcccctatcatctctcccctttcctgtgtggatcaagtttccccaaagataacatattagaggatgcatatacacacgtaatgtgcttattaaaacatgtcactgttagtagattcctgtccattactggaaaaaaaaattcccagagaaattaaaatgaagggcatatgtttaaaattacaatgttctctgtcactgtaaaacttaaagctactcagtggctaccacaccttggctttctattggttttctttatttggttaataaatgagattacattgtcctcaccccattctatcataaagcgtttggttttagaatgcttcctggagattttgcttcttataaataacttagaaaaaaactacaaacatttcctagatggcatttattgctataaacagactcttaagttgtctattattaaatatatctactgtgataaactttctaaaaactttgaattatgcagatgattcccactattaaccatctttactccctacttgcttataaagtttagagttttgcagattgttctgttattttgtatttttcttaatgccttgcttccacctgtgaaagagatatttttaagccattttggaagtagaaacctaatatgtaatcttgacccaacaggataccgcccttggtgaggctttcctgctaggattactcacagtgattctggaatgccatttcactgttacaggcattcctcatggcttaaaacaggcaccttagtattaggacaatgagctttattgtctgtgataaaaaggtcaacagttgttttattagttgataagatatttcatgtaagatgacaattaaaaagctaaatgtcaaa

SEQ ID NO: 166700 - DNA, 3646 bp, Homo sapiens
  Payload ID: 12819
  Gene Symbol: PHLDB2
  Gene Name: pleckstrin homology-like domain, family B, member 2
  ENST ID: ENST00000498699
  CDS Start-End: 301-3646
agaagctggcgcccagtgatggggcaaacagccatgcccttccagcagccgtgaaagccccaacagcaaactgcctgggagcggggcaggtcaccaacttcgttgctcgaactccctgggtgcccgccgcggtggttacaaagggggtcaagagtgccggacccagccgcgcggagcccaccattgcggcccgagggggacccgacgggggcccgacggtgtggcgtggcgcaaggagcgcgcctgccttctctcgccgccgggaacgggctgcaccaatggccagattccagcaagattatggaagagcatagctacatacaaaaggagctagatttacaaaatggtagcttagaggaagactctgtggtgcattctgttgagaacgattcccaaaacatgatggagagcctcagcccaaagaaatactcttccagtctgagatttaaagccaatggagactattctggctcctatttaaccctctcacaacctgtgcctgcaaagagaagcccttctcctttgggaaccagtgtcagaagcagcccctccttagccaaaatccagggaagcaagcagttctcttatgatggaactgacaaaaatattcctatgaaacctccaactcctttactcaacactacatcctccctcagtggatatccacttggaagagcagactttgatcattatactggccgggacagtgaaagggccttgaggctctcagagaagcctccctattccaaatatagctcaaggcataaatcgcatgacaatgtctactctcttggagggctggaaggtcggaaggcatctggctcgctcctggccatgtggaatggaagttccctgagtgatgctggcccgcctcctatcagcagatcgggagccgcaagcatgccttcaagcccaaagcaagccaggaaaatgagcattcaggacagcctggcgcttcaacccaagttaactagacacaaggagcttgcatctgaaaacatcaatttgagaactaggaagtactccagcagcagcctgagtcacatgggagcctacagccgatcacttcccaggttgtacagagccacagagaaccagctgacacctctcagcttgcctccaagaaactctctgggcaattccaaacgaacaaaacttggggaaaaggatctacctcatagcgtaatagacaatgacaattaccttaatttttcttctttgagctcaggggctttaccctataaaacctctgcttctgaaggcaatccttatgtaagttctaccctcagtgtccctgccagtccacgagtggctcggaagatgcttctggcctccacctcctcctgtgcctctgatgactttgatcaggcttcatatgtggggacaaacccgagtcattcacttcttgctggagagtcagacagagtttttgcgaccaggaggaacttctcttgtggatctgtggaatttgatgaggcagatttggaaagcctcagacaggcctcaggaaccccccagcctgcccttcgggaacggaaaagcagtattagctccatttcaggacgtgatgacctgatggattatcaccggcggcagagggaggaaagactcagggagcaggaaatggagcgattggagagacagcgtctggagaccatcctcagtctctgtgctgaatacacaaagcctgacagtcgcttatctactgggaccaccgtggaagatgtgcagaaaatcaacaaggagcttgagaagctgcagctctctgatgaggagtctgtgtttgaggaagccctcatgagccctgacacaagatacaggtgccaccggaaagactccctccctgatgcagacttggcaagctgtgggagtctcagtcagagcagtgccagcttctttacccccaggagcaccaggaatgatgaactactcagtgacctcacccggactcctccaccaccatcctccacctttccgaaagcttccagcgagtcctcttatctaagtatcctaccaaagaccccagagggtataagtgaagaacagagatctcaggagttggctgcaatggaagaaacccggatagtcattctgaacaacctcgaggaacttaagcaaaaaatcaaagacataaatgatcagatggatgagtctttcagagagttggatatggaatgtgctcttttggatggagaacagaaatctgaaacaactgaacttatgaaggagaaggagattttggatcatctaaaccggaaaatagctgaactggaaaagaacattgttggtgaaaagaccaaggatgctgacctgttggatgttgaaagcaaacactttgaagacctggagttccagcagcttgaacatgagagccgtctagatgaagaaaaggagaacttgactcaacagctcctgcgtgaagttgctgaatatcaacggaacatcgtttctagaaaggaaaaaatttctgcattgaaaaagcaagccaatcacattgttcagcaggctcagagagagcaagatcattttgtgaaagaaaagaataatttaataatgatgttgcaaagagaaaaggagaatctttgtaatttggaaaagaaatactccagcctctctggggggaaagggtttcccgttaaccccaatactttaaaagagggctatatcagtgtaaatgagattaatgagccgtgtggcaattccacgaatctatccccttccactcagtttcctgctgatgctgatgctgttgccactgagcctgccacagctgtgctggcgagccagccacagagtaaagagcactttagaagtctggaagaaaggaaaaaacagcataaagaaggcctctatctgagtgatactttgcctcgaaagaaaaccacatcttccatctccccacatttcagcagtgctactatggggagaagcatcaccccaaaggcccatctgcccctaggacagagtaacagctgtggaagtgtgctccctccctcactggcagccatggccaaagactcagaatctcggaggatgctcagaggttataatcaccaacagatgagtgaaggacacaggcagaaatctgaattttataaccgcacagcatctgaatcaaatgtctacttgaatagtttccattatccagatcacagctacaaggaccaggcctttgatactctgagcctcgatagctctgatagcatggagaccagcatctctgcttgctcaccagacaacatctctagtgccagcacttcaaatattgctagaatagaagaaatggagagacttttgaagcaggctcatgcagaaaagacgcggctgctcgaatccagggaacgggaaatggaagccaaaaaacgagccctggaagaagaaaaacgacgccgggaaatcctggaaaaacgattacaggaagaaactagccagaggcagaagttaatagaaaaggaagtaaaaataagggagagacaaagggcacaggctcgtcctttgacacgctacctgcctgtccggaaggaagactttgatttgcggagccatgtagagactgctggccacaatattgacacctgttaccatgtatcaatcacagagaagacctgccgaggattcctcatcaaaatgggtgggaaaattaaaa

SEQ ID NO: 166701 - DNA, 5474 bp, Homo sapiens
  Payload ID: 12819
  Gene Symbol: PHLDB2
  Gene Name: pleckstrin homology-like domain, family B, member 2
  Uniprot ID: Q86SQ0
  ENST ID: ENST00000481953
  CDS Start-End: 116-3748
aggtcagactgcaagattgtttgttcagatgtaggcctaacaagggattgttcttttaaaatcttctttaaggcaaaattttctgttttatttctttacagattccagcaagattatggaagagcatagctacatacaaaaggagctagatttacaaaatggtagcttagaggaagactctgtggtgcattctgttgagaacgattcccaaaacatgatggagagcctcagcccaaagaaatactcttccagtctgagatttaaagccaatggagactattctggctcctatttaaccctctcacaacctgtgcctgcaaagagaagcccttctcctttgggaaccagtgtcagaagcagcccctccttagccaaaatccagggaagcaagcagttctcttatgatggaactgacaaaaatattcctatgaaacctccaactcctttactcaacactacatcctccctcagtggatatccacttggaagagcagactttgatcattatactggccgggacagtgaaagggccttgaggctctcagagaagcctccctattccaaatatagctcaaggcataaatcgcatgacaatgtctactctcttggagggctggaaggtcggaaggcatctggctcgctcctggccatgtggaatggaagttccctgagtgatgctggcccgcctcctatcagcagatcgggagccgcaagcatgccttcaagcccaaagcaagccaggaaaatgagcattcaggacagcctggcgcttcaacccaagttaactagacacaaggagcttgcatctgaaaacatcaatttgagaactaggaagtactccagcagcagcctgagtcacatgggagcctacagccgatcacttcccaggttgtacagagccacagagaaccagctgacacctctcagcttgcctccaagaaactctctgggcaattccaaacgaacaaaacttggggaaaaggatctacctcatagcgtaatagacaatgacaattaccttaatttttcttctttgagctcaggggctttaccctataaaacctctgcttctgaaggcaatccttatgtaagttctaccctcagtgtccctgccagtccacgagtggctcggaagatgcttctggcctccacctcctcctgtgcctctgatgactttgatcaggcttcatatgtggggacaaacccgagtcattcacttcttgctggagagtcagacagagtttttgcgaccaggaggaacttctcttgtggatctgtggaatttgatgaggcagatttggaaagcctcagacaggcctcaggaaccccccagcctgcccttcgggaacggaaaagcagtattagctccatttcaggacgtgatgacctgatggattatcaccggcggcagagggaggaaagactcagggagcaggaaatggagcgattggagagacagcgtctggagaccatcctcagtctctgtgctgaatacacaaagcctgacagtcgcttatctactgggaccaccgtggaagatgtgcagaaaatcaacaaggagcttgagaagctgcagctctctgatgaggagtctgtgtttgaggaagccctcatgagccctgacacaagatacaggtgccaccggaaagactccctccctgatgcagacttggcaagctgtgggagtctcagtcagagcagtgccagcttctttacccccaggagcaccaggaatgatgaactactcagtgacctcacccggactcctccaccaccatcctccacctttccgaaagcttccagcgagtcctcttatctaagtatcctaccaaagaccccagagggtataagtgaagaacagagatctcaggagttggctgcaatggaagaaacccggatagtcattctgaacaacctcgaggaacttaagcaaaaaatcaaagacataaatgatcagatggatgagtctttcagagagttggatatggaatgtgctcttttggatggagaacagaaatctgaaacaactgaacttatgaaggagaaggagattttggatcatctaaaccggaaaatagctgaactggaaaagaacattgttggtgaaaagaccaaggatgctgacctgttggatgttgaaagcaaacactttgaagacctggagttccagcagcttgaacatgagagccgtctagatgaagaaaaggagaacttgactcaacagctcctgcgtgaagttgctgaatatcaacggaacatcgtttctagaaaggaaaaaatttctgcattgaaaaagcaagccaatcacattgttcagcaggctcagagagagcaagatcattttgtgaaagaaaagaataatttaataatgatgttgcaaagagaaaaggagaatctttgtaatttggaaaagaaatactccagcctctctggggggaaagggtttcccgttaaccccaatactttaaaagagggctatatcagtgtaaatgagattaatgagccgtgtggcaattccacgaatctatccccttccactcagtttcctgctgatgctgatgctgttgccactgagcctgccacagctgtgctggcgagccagccacagagtaaagagcactttagaagtctggaagaaaggaaaaaacagcataaagaaggcctctatctgagtgatactttgcctcgaaagaaaaccacatcttccatctccccacatttcagcagtgctactatggggagaagcatcaccccaaaggcccatctgcccctaggacagagtaacagctgtggaagtgtgctccctccctcactggcagccatggccaaagactcagaatctcggaggatgctcagaggttataatcaccaacagatgagtgaaggacacaggcagaaatctgaattttataaccgcacagcatctgaatcaaatgtctacttgaatagtttccattatccagatcacagctacaaggaccaggcctttgatactctgagcctcgatagctctgatagcatggagaccagcatctctgcttgctcaccagacaacatctctagtgccagcacttcaaatattgctagaatagaagaaatggagagacttttgaagcaggctcatgcagaaaagacgcggctgctcgaatccagggaacgggaaatggaagccaaaaaacgagccctggaagaagaaaaacgacgccgggaaatcctggaaaaacgattacaggaagaaactagccagaggcagaagttaatagaaaaggaagtaaaaataagggagagacaaagggcacaggctcgtcctttgacacgctacctgcctgtccggaaggaagactttgatttgcggagccatgtagagactgctggccacaatattgacacctgttaccatgtatcaatcacagagaagacctgccgaggattcctcatcaaaatgggtgggaaaattaaaacgtggaaaaaacgttggtttgtttttgatcggaacaagcgaacattctcttattatgcagacaagcatgaaactaaattgaaaggagtaatatactttcaagccattgaagaagtctattatgatcacctcaagaatgctaataagagtcctaatccgttactcacctttagcgtcaagactcatgacagaatctattatatggtagccccatcgccagaagccatgcggatctggatggatgttatagttacgggggcagaaggttacactcacttcttgttgtagtgaactgaggcaacagtccacttcagggcagacggcaataatctcttacaagaatgaagccatattcaaccccagatgagaaaacccaacagatccatcccttgagctgtaaacactcagaactcctttcatatcaagacaagttatttgtaaaaaataaagaaggggttttaatacaaaccttcataataaatagcaaaataattgaagcttccatgagaaagaaaacactattttgataaattggatcacttataggaacatttctaataaactgtttttaatcagttgtcggatttggtgaaataaactaaacaggttacagaatatctgtatgtacttggaaatacagaataactttatcacccaaatcactggcattgacattattggtaatcaactggctttttttaaaaaaggtagcattttgttgacagttattttgtaaacataagcaaataagggcttggagggaaatacattttaggaggagttttgccttaattttttaagtactgcaccaaaaccaaagagctgacctgacttctgtggaacagtagtaactgcaagtgatgaactgcatttcgtattgttctgtatatttcaaaatggtattttgatgccatcaaatgcccaggaaattgactttgcagtgtcaccactggtgtaagctactatatatgtatatatatatgtagtaaaccactttttgtaaaagaagaaagagcaaaaagctgtgtgttttagaaaaaaaagccaggttacgcaacaggcattctgtcatgttgaacaattttaaataaagagaatatctggtgttaggagcttgttttgctgaagatttctccattcctggtgctgagaataaaggcaaccagtagccaatgtcctttagattgtctgatttctttttgttgtggagcacacctgctaactgctccctcaacataactatgaaatcatagctctgttttcaccaaagaacagaccaattaacatacttatttgcagaagtggtgtagttctataaaacggcaaatgaagttcaacttaatattctctataatgtattattttattttattttttacaattagccttttttttagttaatttttgtcaaatgaaacgacttcaggcaagtctcttttataatggtttttcaagtgccatttattctagtttatcatgttttgcatgtttgaaagtatgaatgtgctctttcctaaaacatggcaaatgaatagatgtagagaataacaatattacttacaagatgaaatgattagattagaagtgtccctttattaaactttgtcagcctgactgggtacaattcttttgttaatttgcagtgtggtttgtatacacgtatacgtgttatcaataataagattttgcaactggatgacacaagattttacttgaacagtgaaggacaaaaatcatgattgtggaagatatttttaaaatctgattttgcagcgatcacttttaaaccctgtagtgatgtaagactaaaatataattgctaagattttgttggttaatgtaaagatatgacttttctgcactgtactctcttcataggattgtaaaggtgttctaatccaattgcatgatgtagtaagcctcttaaatatgtgtgttaaatatattgagtttggattaaaatgttgacatgatttcacatttgaaaataaactcatctcttattttgaagtta

SEQ ID NO: 166702 - DNA, 4159 bp, Homo sapiens
  Payload ID: 12819
  Gene Symbol: PHLDB2
  Gene Name: pleckstrin homology-like domain, family B, member 2
  ENST ID: ENST00000495180
  CDS Start-End: 23-2257
atagggtgcagaagagcccaagatgagagtgtgtagctatgagtgcctgccgtgggaagaggccatgaggacggagctgcagctggagtccagaagttcaggcagtgaaagggaggagagacagcgtctggagaccatcctcagtctctgtgctgaatacacaaagcctgacagtcgcttatctactgggaccaccgtggaagatgtgcagaaaatcaacaaggagcttgagaagctgcagctctctgatgaggagtctgtgtttgaggaagccctcatgagccctgacacaagatacaggtgccaccggaaagactccctccctgatgcagacttggcaagctgtgggagtctcagtcagagcagtgccagcttctttacccccaggagcaccaggaatgatgaactactcagtgacctcacccggactcctccaccaccatcctccacctttccgaaagcttccagcgagtcctcttatctaagtatcctaccaaagaccccagagggtataagtgaagaacagagatctcaggagttggctgcaatggaagaaacccggatagtcattctgaacaacctcgaggaacttaagcaaaaaatcaaagacataaatgatcagatggatgagtctttcagagagttggatatggaatgtgctcttttggatggagaacagaaatctgaaacaactgaacttatgaaggagaaggagattttggatcatctaaaccggaaaatagctgaactggaaaagaacattgttggtgaaaagaccaaggagaaggtaaagcttgatgctgaaagggaaaaactagagaggcttcaggagctttactccgagcagaagacccagctggacaattgtcctgagtccatgagggaacagttacaacaacaactgaagagggatgctgacctgttggatgttgaaagcaaacactttgaagacctggagttccagcagcttgaacatgagagccgtctagatgaagaaaaggagaacttgactcaacagctcctgcgtgaagttgctgaatatcaacggaacatcgtttctagaaaggaaaaaatttctgcattgaaaaagcaagccaatcacattgttcagcaggctcagagagagcaagatcattttgtgaaagaaaagaataatttaataatgatgttgcaaagagaaaaggagaatctttgtaatttggaaaagaaatactccagcctctctggggggaaagggtttcccgttaaccccaatactttaaaagaggcccatctgcccctaggacagagtaacagctgtggaagtgtgctccctccctcactggcagccatggccaaagactcagaatctcggaggatgctcagaggttataatcaccaacagatgagtgaaggacacaggcagaaatctgaattttataaccgcacagcatctgaatcaaatgtctacttgaatagtttccattatccagatcacagctacaaggaccaggcctttgatactctgagcctcgatagctctgatagcatggagaccagcatctctgcttgctcaccagacaacatctctagtgccagcacttcaaatattgctagaatagaagaaatggagagacttttgaagcaggctcatgcagaaaagacgcggctgctcgaatccagggaacgggaaatggaagccaaaaaacgagccctggaagaagaaaaacgacgccgggaaatcctggaaaaacgattacaggaagaaactagccagaggcagaagttaatagaaaaggaagtaaaaataagggagagacaaagggcacaggctcgtcctttgacacgctacctgcctgtccggaaggaagactttgatttgcggagccatgtagagactgctggccacaatattgacacctgttaccatgtatcaatcacagagaagacctgccgaggattcctcatcaaaatgggtgggaaaattaaaacgtggaaaaaacgttggtttgtttttgatcggaacaagcgaacattctcttattatgcagacaagcatgaaactaaattgaaaggagtaatatactttcaagccattgaagaagtctattatgatcacctcaagaatgctaataagagtcctaatccgttactcacctttagcgtcaagactcatgacagaatctattatatggtagccccatcgccagaagccatgcggatctggatggatgttatagttacgggggcagaaggttacactcacttcttgttgtagtgaactgaggcaacagtccacttcagggcagacggcaataatctcttacaagaatgaagccatattcaaccccagatgagaaaacccaacagatccatcccttgagctgtaaacactcagaactcctttcatatcaagacaagttatttgtaaaaaataaagaaggggttttaatacaaaccttcataataaatagcaaaataattgaagcttccatgagaaagaaaacactattttgataaattggatcacttataggaacatttctaataaactgtttttaatcagttgtcggatttggtgaaataaactaaacaggttacagaatatctgtatgtacttggaaatacagaataactttatcacccaaatcactggcattgacattattggtaatcaactggctttttttaaaaaaggtagcattttgttgacagttattttgtaaacataagcaaataagggcttggagggaaatacattttaggaggagttttgccttaattttttaagtactgcaccaaaaccaaagagctgacctgacttctgtggaacagtagtaactgcaagtgatgaactgcatttcgtattgttctgtatatttcaaaatggtattttgatgccatcaaatgcccaggaaattgactttgcagtgtcaccactggtgtaagctactatatatgtatatatatatgtagtaaaccactttttgtaaaagaagaaagagcaaaaagctgtgtgttttagaaaaaaaagccaggttacgcaacaggcattctgtcatgttgaacaattttaaataaagagaatatctggtgttaggagcttgttttgctgaagatttctccattcctggtgctgagaataaaggcaaccagtagccaatgtcctttagattgtctgatttctttttgttgtggagcacacctgctaactgctccctcaacataactatgaaatcatagctctgttttcaccaaagaacagaccaattaacatacttatttgcagaagtggtgtagttctataaaacggcaaatgaagttcaacttaatattctctataatgtattattttattttattttttacaattagccttttttttagttaatttttgtcaaatgaaacgacttcaggcaagtctcttttataatggtttttcaagtgccatttattctagtttatcatgttttgcatgtttgaaagtatgaatgtgctctttcctaaaacatggcaaatgaatagatgtagagaataacaatattacttacaagatgaaatgattagattagaagtgtccctttattaaactttgtcagcctgactgggtacaattcttttgttaatttgcagtgtggtttgtatacacgtatacgtgttatcaataataagattttgcaactggatgacacaagattttacttgaacagtgaaggacaaaaatcatgattgtggaagatatttttaaaatctgattttgcagcgatcacttttaaaccctgtagtgatgtaagactaaaatataattgctaagattttgttggttaatgtaaagatatgacttttctgcactgtactctcttcataggattgtaaaggtgttctaatccaattgcatgatgtagtaagcctcttaaatatgtgtgttaaatatattgagtttggattaaaatgttgacatgatttcacatttgaaaataaactcatctcttattttgaagttacctatctgtagtatgatggaggatgaattaatcgcaaatgacagttgtagaaactatgtaaagtttgttgtgtgctaacattatgatttgtagtgtataaactgaagtattccaatagaagtatctctggttacatcctattgcttacaaaatgaaatgaaccctgaaaaactctg

SEQ ID NO: 166703 - DNA, 2591 bp, Homo sapiens
  Payload ID: 12820
  Gene Symbol: PHLDB3
  Gene Name: pleckstrin homology-like domain, family B, member 3
  Uniprot ID: Q6NSJ2
  ENST ID: ENST00000292140
  CDS Start-End: 362-2284
ggtggggccgggccggggccggtggggccgggatggccggatgccgaggccacgggtggggcaagcccgtggctccctcctccctcgggagctgttggacctgttgtcccccctccacttccgggctgctggggagggggaccgggcggcctctctcctccctcttcccctgccacctgtctcataggcagaagcggccgtgcccagcgcgcagagcggagcgcgccgaagcctgagctcgtgagggggccgaggctgtggggaggtggcagttggacttcggaatctcaaggactccgactcctggcttgttcagagaaggagagccccgactcctggatccctgggagtcccagcggccatggggacgcgaagcagccccgaggaggggaccccgccgccgctggtcccggaatgcgacgtggaggtccagccccagggccatcccgaggagtcccgggaacaggaggcatccgaagtcctggcggaaccttcgagccgcgggggagctgagcagcaggcagaggaagaagaagtgggagaaggcagcagcactgagagcagccgcgacgcgcccgaggctacgcctccgatagctatggcggccacacctcccgcatccacctcttcgcgggaaggggtgcgaggggcggcgcggcgcctgcaaggacagcagctggaggcattgactcgtgtggccctgatggagcagcgagtgaaggagctacagcgccagaggaaggagctgaggatcgagatggaggtggaggtggccttgctgcggggtgagctggctggggagcgagtggccgctcgccgggaggaggagcagctgcgggagctgctggagcagcaggcggcctcggagcagcgcggccgccagcagcgggaacaggaacagaggcggctgagccaggaacgggatcgcctagagggtcttcgccagagactccgcaaggcccagggacagctcgactcacagccagaggaccaacgcgagcggcttctgcagggtgtgcaggagatgagggaacaactggatgtggcccaacgtgcctatgaggacctggagttccagcaactggagcgggagagccggcaggaggaggaggatcgggacagccctgggccccaggtgccagaccccaaggtccaggaactccaggccagcatggcgcagcacagaaggggtgctctgcagcaccggatccgggtcctggaagagcagctcaagtcactgggggagcagatggcagccgagagccgggggttgagccggaagaaggaggaggcccttcaggccctgtcacaggaacggagccggctgctcgagctcaattgccttcagggaacacctggcggggacttctctgagcccaacccggccctcactaagctgctgttcacccagaagacagaccgccagctgctggtgctccaggatgccgtggcccactccgctgccacccctacttcttcctgcctcttttctgtccacagctccctgcagggctccattggcctccagaggactgggagcctgccccggaaaaggggggagagggggagccagagaggatccccccgacctctgtccttccattgtactgaatccctggaggcctcagctctcccgccagcagtgggggactccggcagataccccctctaccagctgctgaactgtggccgtgggaatagctgtggggccatccatccagacattgcccacatggagcggctcctgcagcaggccatggcggagagggagcggctgctcaaggcccgggaaggaacaagaaggggcacggaaggttcctcaggccctgctgttcctgccatcacggccccacccaccccaccccaccctccaggcccgcgaatcttggatctccggcagcatctggagggatggggccacaacccggaaaactgcccacatgtgcaggtgtctgggtgctgctgccgtggacccctggtgaagatgggcggccgcatcaagacctggaggaagcgatggttctgctttgaccgccaagcccgccgcttggcctactatgcggacaaggaagagaccaagctcaaaggtgtcatctacttccaggccattgaggaagtctattatgaccacttacgctgtgccttcaagagccccaacccccgcctgaccttctgcgtcaaaacctacgaacgccttttctacatggtggctccgagccccgaagccatgcgcatttggatggacgtcatcgtgaccgccgctgacgaaaaccacgccccctgagtggccccgccctcttggggggaagtcccttcgaggctccgccggcgcggggcgcgggggcgttcctaggccccgcccactgccggaaaacttggacgcaccgctttggaactctcccgggaattccgcaggcgcggcagttcagctggcctgagctgctgcgttctgggttgcaggtgccttgcccccgacgggatcgccggcccctaaggccctgcccggggcaggaggaagattgcaggggcgggaagaaactatttattggtgctcctgtgataccgaattaaatacggaggaaaaacaggaa

SEQ ID NO: 166704 - DNA, 366 bp, Homo sapiens
  Payload ID: 12820
  Gene Symbol: PHLDB3
  Gene Name: pleckstrin homology-like domain, family B, member 3
  ENST ID: ENST00000596141
  CDS Start-End: 1-366
tgccacccctacttcttcctgcctcttttctgtccacagctccctgcagaatccctggaggcctcagctctcccgccagcagtgggggactccggcagataccccctctaccagctgctgaactgtggccgtgggaatagctgtggggccatccatccagacattgcccacatggagcggctcctgcagcaggccatggcggagagggagcggctgctcaaggcccgggaaggaacaagaaggggcacggaaggttcctcaggccctgctgttcctgccatcacggccccacccaccccaccccaccctccaggcccgcgaatcttggatctccggcagcatctggagggatggggccacaacccg

SEQ ID NO: 166705 - DNA, 546 bp, Homo sapiens
  Payload ID: 12820
  Gene Symbol: PHLDB3
  Gene Name: pleckstrin homology-like domain, family B, member 3
  ENST ID: ENST00000601646
  CDS Start-End: 244-546
gccgaagcctgagctcgtgagggggccgaggctgtggggaggtggcagttggacttcggaatctcaaggactccgactcctggcttgttcagagaaggagagccccgactcctggatccctgggccccgcctccttgggggggggtctccgcgccccggagcagacgcgagcggcgctcagccgtcctaggccccgcccccggagcttctggtcccgcccaccccgcaggagtcccagcggccatggggacgcgaagcagccccgaggaggggaccccgccgccgctggtcccggaatgcgacgtggaggtccagccccagggccatcccgaggagtcccgggaacaggaggcatccgaagtcctggcggaaccttcgagccgcgggggagctgagcagcaggcagaggaagaagaagtgggagaaggcagcagcactgagagcagccgcgacgcgcccgaggctacgcctccgatagctatggcggccacacctcccgcatccacctcttcgcgggaaggggtgcgaggggcggcgcggcgcctg

SEQ ID NO: 166706 - DNA, 2286 bp, Homo sapiens
  Payload ID: 12820
  Gene Symbol: PHLDB3
  Gene Name: pleckstrin homology-like domain, family B, member 3
  Uniprot ID: Q6NSJ2
  ENST ID: ENST00000599242
  CDS Start-End: 362-1201
ggtggggccgggccggggccggtggggccgggatggccggatgccgaggccacgggtggggcaagcccgtggctccctcctccctcgggagctgttggacctgttgtcccccctccacttccgggctgctggggagggggaccgggcggcctctctcctccctcttcccctgccacctgtctcataggcagaagcggccgtgcccagcgcgcagagcggagcgcgccgaagcctgagctcgtgagggggccgaggctgtggggaggtggcagttggacttcggaatctcaaggactccgactcctggcttgttcagagaaggagagccccgactcctggatccctgggagtcccagcggccatggggacgcgaagcagccccgaggaggggaccccgccgccgctggtcccggaatgcgacgtggaggtccagccccagggccatcccgaggagtcccgggaacaggaggcatccgaagtcctggcggaaccttcgagccgcgggggagctgagcagcaggcagaggaagaagaagtgggagaaggcagcagcactgagagcagccgcgacgcgcccgaggctacgcctccgatagctatggcggccacacctcccgcatccacctcttcgcgggaaggggtgcgaggggcggcgcggcgcctgcaaggacagcagctggaggcattgactcgtgtggccctgatggagcagcgagtgaaggagctacagcgccagaggaaggagctgaggatcgagatggaggtggaggtggccttgctgcggggtgagctggctggggagcgagtggccgctcgccgggaggaggagcagctgcgggagctgctggagcagcaggcggcctcggagcagcgcggccgccagcagcgggaacaggaacagaggcggctgagccaggaacgggatcgcctagagggtcttcgccagagactccgcaaggcccagggacagctcgactcacagccagaggaccaacgcgagcggcttctgcagggtgtgcaggagatgagggaacaactggatgtggcccaacgtgcctatgaggacctggagttccagcaactggagcgggagagccggcaggaggaggaggatcgggacagccctgggccccaggtgccagaccccaaggtccaggaactccaggccagcatggcgcagcacagagtgagtcatgcctgaccagcgctgccccccttgctgctcctctctgtctcccctgctctgtgcctgcctttttctctgtccttgtttcctgcctgtcatgttcttctgaatagtaacaacaagagctgatactaatgaaacatttactatgtgccagatatggtcctgaatatttcatgagcatttcctcactgaatccttacaacaaacttatgaggcaagttctattacgttttttttttttcacgttataaataaagaagctgaaggtcaaggtgcttaagtaatcttttccaagtttccttagtaagggacagagccaggatttttttatttttattttttgagatagcgtctcactctgtcacccaggctggagtgcagtgacacgttcacagctcactgcagcctccacgtcctgtgcttaagcgatcctcccacctcagcctctcgagtagctgggaccacaggtgcgagcccctacacctggataatttttgtatttttagtagagacagggtttcacctggtcttaaactcttggattcaagcgatcctcccaccttggcctttcaagatgctgggattacagacatgagccaccgtgcctcgccacagccaggatttgaacaaacttggtattcaccaccacattctttgcctctattccaaaaagatgcttcatcagatccttcctgggagcctcacattcaagggtctgacttgtgagacccttgggaaaaaatgggcatgtttgaccatatttaacacagagtttcccaaagttttggattagaaagctcggccgggctcggtggctcactcctgtaatcccagcactttgggaggccgaggcaggcagatgacctgagtttgggagtttgagaccagcctgaccaacatggagaaagcccatctctactaaaaatacaaaattagctgagggtggtgacgcatgcctgtaatcccagctactcgggaggctgaggcagagaattgcttgaatccgggaggcggaggtggcggtgagccgagattgagccattgcactccagcctgggcaacaacagcaaaactccatctcaaaaaaaaaaaaaaaa

SEQ ID NO: 166707 - DNA, 696 bp, Homo sapiens
  Payload ID: 12820
  Gene Symbol: PHLDB3
  Gene Name: pleckstrin homology-like domain, family B, member 3
  ENST ID: ENST00000600660
  CDS Start-End: 1-696
cagagactccgcaaggcccagggacagctcgactcacagccagaggaccaacgcgagcggcttctgcagggtgtgcaggagatgagggaacaactggatgtggcccaacgtgcctatgaggacctggagttccagcaactggagcgggagagccggcaggaggaggaggatcgggacagccctgggccccaggtgccagaccccaaggtccaggaactccaggccagcatggcgcagcacagacaccggatccgggtcctggaagagcagctcaagtcactgggggagcagatggcagccgagagccgggggttgagccggaagaaggaggaggcccttcaggccctgtcacaggaacggagccggctgctcgagctcaattgccttcagggaacacctggcggggacttctctgagcccaacccggccctcactaagctgctgttcacccagaagacagaccgccagctgctggtgctccaggatgccgtggcccactccgctgccacccctacttcttcctgcctcttttctgtccacagctccctgcaggccccacccaccccaccccaccctccaggcccgcgaatcttggatctccggcagcatctggagggatggggccacaacccggaaaactgcccacatgtgcaggtgtctgggtgctgctgccgtggacccctggtgaagatgggc

SEQ ID NO: 166708 - DNA, 627 bp, Homo sapiens
  Payload ID: 12820
  Gene Symbol: PHLDB3
  Gene Name: pleckstrin homology-like domain, family B, member 3
  ENST ID: ENST00000594808
  CDS Start-End: 297-627
ctagagatgagggaggggaggcggggtcgaagaggtcagtagggggcgtgctacgacccggactcaaattccggtcccgtctccggtggcgtgtcgccttggagccatcaagccccgcctctggaaacttcaggacacgcctccgtaacgctcagttccatcctttgaactcttaggccccgcctccttgggggggggtctccgcgccccggagcagacgcgagcggcgctcagccgtcctaggccccgcccccggagcttctggtcccgcccaccccgcaggagtcccagcggccatggggacgcgaagcagccccgaggaggggaccccgccgccgctggtcccggaatgcgacgtggaggtccagccccagggccatcccgaggagtcccgggaacaggaggcatccgaagtcctggcggaaccttcgagccgcgggggagctgagcagcaggcagaggaagaagaagtgggagaaggcagcagcactgagagcagccgcgacgcgcccgaggctacgcctccgatagctatggcggccacacctcccgcatccacctcttcgcgggaaggggtgcgaggggcggcgcggcgcctgcaaggacagcagctggaggcattgactc

SEQ ID NO: 166709 - DNA, 15249 bp, Homo sapiens
  Payload ID: 12821
  Gene Symbol: PLEC
  Gene Name: plectin
  Uniprot ID: Q15149
  ENST ID: ENST00000322810
  CDS Start-End: 171-14225
gagcccgcgccctcacgctcagcaccccagcctgcctgcccgcccgcctgccctgccgctgcccgctgtcacaccctgtagcgcgggagcttctcgcagcgccccgggccttctcgtggtaccctgcctgctgcctttgcccccgcactgactgcccggctccagcagccatggtggccggcatgctcatgccacgggaccagctgcgggccatctatgaggtgctcttccgcgagggcgtgatggtggccaagaaggaccggcggccccgcagcttgcacccccatgtgcccggcgtcaccaacctgcaggtcatgcgtgccatggcgtccctgcgggcacggggcctggtccgcgagacctttgcctggtgccacttttactggtacctcaccaatgaaggcatcgcccacctccgccagtacctgcacctgccgccagagatcgtgcccgcctctctgcagcgcgtgcgccgccccgtcgccatggtgatgcccgcacgccgcaccccccacgtgcaggctgtgcagggtcccctgggctccccacccaagcgggggccgctgccgacggaggagcagcgggtctaccgtcggaaggagcttgaggaggtgtcacctgagacccctgtggtgcctgctaccacccagcggaccctggccaggccaggcccggagcctgccccagccacagatgagcgggatcgtgtgcagaagaaaaccttcaccaagtgggtcaacaagcacctcatcaaggcccagaggcacatcagtgacctgtatgaagacctccgcgatggccacaacctcatctccctgctggaggtcctctcgggggacagcctgccccgggagaaggggaggatgcgtttccacaagctgcagaatgtccagattgccctggactacctccggcaccgccaggtgaagctggtgaacatcaggaatgatgacatcgctgacggcaaccccaagctgacccttggcctcatctggacaatcattctgcacttccagatctcagatatccaggtgagtgggcagtcggaggacatgacggccaaggagaagctgctgctgtggtcgcagcgaatggtggaggggtaccagggcctgcgatgcgacaacttcacctccagctggagagacggccgcctcttcaatgccatcatccaccggcacaagcccctgctcatcgacatgaacaaggtgtaccggcagaccaacctggagaacctggaccaggccttctctgtggcggagcgggacctgggagtgacgcggctcctggaccctgaggacgtggatgtccctcagcccgacgagaagtccatcatcacctacgtctcgtcgctgtatgacgccatgccccgcgtgccggacgtgcaggatggggtgagggccaacgagctgcagctgcgctggcaggagtaccgggagctggtgctgctgctgcttcagtggatgcgacaccacacggccgcctttgaggaacgcaggttcccctccagcttcgaggagattgagatcctgtggtctcagttcctgaagtttaaggagatggagctaccagccaaggaggccgacaagaacaggtccaagggcatctaccaatccctggagggagcggtgcaagcaggccagctcaaggtgccccctggctaccacccgctggatgtggagaaggagtggggcaagctgcacgtggccatcctggagcgggagaagcagctccgcagcgagtttgagaggctggagtgtcttcagcgcatcgtgaccaagctgcagatggaggcggggctgtgtgaggagcagctgaaccaggccgacgccctgctgcagtcggatgtccggctgctggctgcaggcaaagtgccacagcgggcgggggaggtggaacgggacttggacaaggcggatagcatgatccggctgctcttcaacgacgtgcagaccctcaaggatggacggcacccgcagggcgagcagatgtaccgcagggtgtaccgtctgcacgagcgcctggtagccatccgcaccgagtacaacctacggctgaaggcaggcgtggcggcccctgcaacccaggtggcccaggtgactctgcagagtgtgcagaggcgccccgagctggaggactccactctgcgctacctgcaggacctgctggcctgggtggaggagaaccagcaccgtgtggatggcgctgagtggggtgtggacctgcccagcgtggaggcgcagctgggcagccaccgaggcctgcaccagtccatcgaagaattccgggccaagatcgagcgggcacggagtgacgagggccagctctcccccgccacccggggtgcctaccgtgactgcctgggtcggctggacctgcagtacgccaagctgctgaactcctccaaggcccgcctcaggtccctggagagcttgcacagctttgtggcagccgccactaaggagctaatgtggctgaatgagaaggaggaggaggaggtgggcttcgactggagcgaccgcaacaccaacatgaccgccaagaaggagagctactcggcgctgatgcgggagctggagctgaaggagaagaagatcaaggagctccaaaatgctggggaccggctgctgcgggaggaccacccggcccggcccacggtggagtccttccaggcggccctgcagacgcagtggagctggatgctacagctgtgctgctgtatcgaggcacacctgaaggagaacgctgcctactttcagttcttctcagatgtgcgggaggccgaggggcagttgcagaagctgcaggaggcactgcgtaggaaatacagttgtgatcgctccgccaccgtcacccggctggaggacctgctgcaggatgcccaggacgagaaggaacagctgaacgagtacaagggccacctctcaggcctggccaagcgggccaaggccgtcgtgcagctgaagccccgccacccagcccaccccatgcggggccgcctgcccctgctggccgtgtgcgactataagcaggtggaggtgactgtgcacaagggtgacgagtgccagctggtgggccctgcacagccgtcccactggaaggtgctcagcagctccggcagcgaggccgccgtgccctccgtgtgcttcctggtgcccccgcccaaccaggaggcccaggaggccgtcaccaggctggaggcccagcaccaggccctggtcacgctgtggcaccagttgcacgtggacatgaagagccttctggcctggcagagccttcgccgcgacgtgcagctcatccgctcctggtccctggccacgttccgcaccctgaagccagaggagcagcgccaagccctgcacagcctggagctgcactaccaggccttcctgcgggacagccaggacgcgggcggcttcggacccgaggaccggctgatggctgagcgcgagtacggctcctgcagccaccactaccagcagctgctgcagagcctggaacagggtgcacaggaagagtctcgctgccagcgctgcatctccgagctcaaagacatccggctgcagctggaggcctgtgagacgcgcaccgtgcaccgcctgcggctgccgctggacaaagagccggcacgggagtgtgcccagcgcatcgccgagcagcagaaggcacaggcagaggtggaggggctgggcaagggggtcgcccggctctctgccgaggccgagaaggtcttggccctaccagagccatcgcctgcggcccccacgctgcgctcggagctggagctgacgctgggcaagctggagcaggtccgcagcctgtctgccatctacctggagaagctcaagaccatcagcctggtgatccgcggcacgcagggggccgaggaggtgctcagggcccacgaggagcagctcaaggaggcccaggccgtgccggccaccctcccggagctcgaggccaccaaggcctctctgaagaagctgcgggcccaggccgaggcacagcagcccacgttcgacgccctgcgggatgagctgcggggggcacaggaggtgggggagcgactgcagcagcggcacggggagcgggacgtggaggtggagcgctggcgggagcgggtcgcccagttgcttgagcgctggcaggctgtgctggcccagaccgacgtgcggcagcgcgagctcgagcaactgggccgccagctgcgttactaccgcgagagtgcagaccccttgggcgcctggctgcaggacgccaggcggcggcaggagcagatccaggccatgccgctggccgacagccaggctgtgcgggagcagctgcggcaggagcaggccctgctggaggagatcgagcgccacggcgagaaggtcgaggagtgccagaggtttgcgaaacagtacatcaacgccatcaaggactatgaactccagctggtgacgtacaaggcgcagcttgagccggtggcctccccggccaagaagcccaaggtccagtcgggatcagagagtgtcatccaggagtacgtggacctgcgtacgcactacagcgagctgaccacactgacgagccagtacatcaagttcatcagcgagactctgcggcgcatggaggaggaggagaggctggctgagcagcagcgggcagaggagcgcgagcggctggccgaggtggaggccgcgctggagaagcagcggcagctggccgaggcgcacgcccaggcaaaggcacaggcggagcgggaggcgaaggagctgcagcagcgcatgcaggaggaggtggtgcggcgggaggaggcggcggtggacgcgcagcagcagaagcgcagcattcaggaggagctgcagcagctgcggcagagctcggaggcggagatccaggccaaggcccggcaggcagaggcggctgagcgcagccggctgcgcatcgaggaggagatccgcgtggtgcgcctgcagttggaggccaccgagcgccagcgtggcggggctgagggggagctgcaggcactgcgtgcacgggcggaggaggctgaggcacaaaagcgacaggcgcaggaggaggccgagcgcttgcggaggcaggtgcaggacgagagccagcgtaagcggcaggcggaggtggagctggcctcgcgcgtgaaggccgaggccgaggcggcgcgcgagaagcagcgggccctgcaggccctggaggagctgcggctgcaggcggaggaggcggagcggcgcctgcggcaggccgaggtggagcgagcgcggcaggtacaggtggccctggagacggcgcagcgcagtgcagaggcggagctgcagagcaaacgcgcctccttcgccgagaagacggcacagctggagcgctccctgcaggaggaacacgtggctgtggcacagctgcgggaggaggctgagcggcgggcacagcagcaggccgaggccgagcgggcgcgcgaggaggcagagcgggagctggagcgctggcagctcaaggccaacgaggcgctacggctgcggctgcaggcggaggaggtggcgcagcagaagagcctggcgcaggccgaggctgagaagcagaaggaggaggcggagcgcgaggcgcggcggcgcggcaaggcggaggagcaggccgtccggcagcgggagctggctgaacaagagctggagaagcagcggcagctggcggaaggcaccgcgcagcagcgcctggccgcggagcaggagttgatccggctgcgggccgagacggagcagggggagcagcagcggcagctgctggaggaggagctggcccggctgcagcgtgaggcggctgcagccacgcagaaacggcaggagctggaagccgagctggccaaggtgcgggccgagatggaggtgctgctggccagcaaggcgagggctgaggaggagtcgcgctccaccagcgagaagtccaagcagaggctggaggccgaggccggccggttccgcgagctggccgaggaggccgcccgcctgcgtgccctggcggaagaggccaagcggcagcggcagctggccgaggaagacgcggcgcggcagcgggccgaggcggagcgggtgcttgcggagaagctggccgccatcggcgaggccacgcggctcaagacggaggcggagatcgcgctcaaggagaaggaggcggagaacgagcgcctgcggcggctggcggaggacgaggccttccagcggcggcggctggaggagcaggccgcgcaacacaaggctgacatcgaggagcgcctggcccagctgcgcaaggcatcggacagcgagctggagcggcagaaggggctggtggaggacacgctgaggcagcggcggcaggtggaggaggagatcctggcgctgaaggcgagcttcgagaaggcggccgctggcaaggcggagctggagctggagctgggacgcatccgcagcaacgcggaggacacgctgcgcagcaaggagcaggccgagctggaggctgcgaggcagcggcagctggcggcggaggaggagcggcggcgccgtgaggctgaggagcgcgtgcagaagagcctggcggccgaggaggaggccgcacggcagcggaaggcggcgctggaggaagtcgagcggctgaaagccaaggtggaggaggcgcggcgcctgcgggagcgagcggagcaggagtcggcgcggcagctgcagctggcccaggaggccgcccagaagcggctgcaggcggaagagaaggcacacgccttcgcggtgcagcagaaggagcaggagctacagcagacgctgcagcaggagcagagcgtgctggaccagctgcgcggcgaggcggaggcggcccggcgggcggctgaggaggcggaggaggcccgggtgcaggcggagcgtgaggcggcgcagtcccggcggcaggtggaagaggccgagcggctgaagcagtcggcagaggagcaggcacaggcccgggctcaggcacaggcggctgcagagaagctgcgcaaggaggccgagcaagaggcggcgcggcgggcacaggcggagcaggcggccctgcggcagaagcaggcagctgacgcggagatggagaagcataagaaattcgccgagcagacgctgcggcagaaggcgcaggtggagcaggagctgacaacactgcggctgcagctggaggagaccgaccaccagaagaacctgctggacgaggagctgcagcggctgaaggcggaggccacggaggccgcacgccagcgcagccaggtggaggaggagctcttctcggtgcgcgtgcagatggaggagctgagcaagctcaaggcacgcatcgaggctgagaaccgcgcactcatcttgcgtgacaaggacaatacgcagcgcttcctgcaggaggaggctgagaagatgaagcaggtggcggaggaggccgcgcggctgagtgtggcggcccaagaggctgcgcgactgcggcagctggcagaggaggacctggcacagcagcgggccttggcagagaagatgctcaaggagaagatgcaggcggtgcaggaggccacgcgactcaaggctgaggcggaactgctgcagcagcagaaggagcttgcgcaggagcaggcgcggcggctgcaggaggacaaggagcagatggcgcagcagctggcggaggagacgcagggcttccagcggacgctggaggccgagcggcagcggcagctggagatgagcgctgaggctgagcgcctcaagctgcgtgtggccgagatgagccgagcccaggcccgcgctgaggaggacgcccagcgcttccggaagcaggcggaggagatcggtgagaagctgcaccgcacggagctcgccacccaggagaaggtgaccctggtgcagacactggagatccagcgacagcagagtgaccatgatgccgagcgcctgcgggaggccatcgctgagctggagcgtgagaaggagaagctccaacaggaggccaaactgctgcagctcaagtctgaggagatgcagacggtgcagcaggagcagctgctgcaggagacgcaggccctgcagcaaagcttcctctctgaaaaggacagcctgctacagcgggagcgcttcatcgagcaggagaaggccaagctggagcagctcttccaggacgaggtggccaaggcacagcagctgcgtgaggagcagcagcggcagcagcagcagatggagcaggaacggcagcggctggtggccagcatggaggaggcgcggcggcggcagcatgaggccgaggagggcgtgcggcgcaagcaggaggagctgcagcagctggagcagcagcggcggcagcaggaggagctgctggctgaggagaaccagaggctgcgtgagcagctgcagctcctggaggagcagcaccgggccgcgctggcgcactcagaggaggtcactgcctcgcaggtggctgccacaaagaccctgcccaatggccgggatgcacttgatggccccgcggcagaggcagagccggagcacagcttcgatggcctgcggcggaaggtgtcagctcagaggctgcaggaggccggcatcctgagtgcggaggagctgcagcggttggcgcagggccacaccacggtggacgagctcgcacggcgggaagacgtgcgccactacctgcagggccgcagcagtatcgcagggctgttgctgaaggccaccaatgagaagctgagtgtttacgccgccctgcagaggcagctgctgagtcccggcacggccctcatcctgctggaggcgcaggcggcctcaggcttcctgctggaccctgtgcggaaccggcggctgaccgtcaacgaggctgtgaaggagggtgtggtgggccccgagctgcaccacaagctgctgtcggccgagcgcgccgtcactggctacaaggacccctacactggccagcagatctctctcttccaagccatgcagaagggcctcatcgtccgggagcacggcatccgcctgctggaggcccagatcgccacgggcggcgttatcgaccccgtgcacagccaccgcgtgcccgtggacgtggcctaccggcgcggctacttcgacgaggagatgaaccgcgtcctggcggaccccagcgacgacaccaagggcttctttgaccccaacacgcacgagaacctcacgtacctgcagctactggagcgctgcgtggaggaccccgagacgggcctgtgccttctgccactcacggataaggctgccaagggcggggagctggtctacactgactccgaggcccgggacgtctttgagaaggccaccgtgtctgcgccgttcggcaagttccagggcaagacggtgaccatttgggagatcatcaactcggaatacttcacggcagagcagcggcgggacctgctgcggcagttccgcacgggccggatcacagtggagaagatcatcaagatcatcatcacggtggtggaggagcaggagcagaagggccggctttgctttgagggcctgcgcagcctggtgccagccgccgagctgctggagagcagggtcatcgaccgcgagctctaccagcagctgcagcgaggtgagcgctctgtgcgagacgtagccgaggtggacactgtgcggcgggctctccggggtgccaacgtcatcgcgggtgtatggctggaggaggcggggcagaagctgagtatctacaatgccctgaagaaagacctgctgccatccgacatggccgtggccctgttggaagcccaggccggcaccgggcacatcatcgaccccgccaccagcgcccggctgaccgtggacgaggcagtgcgtgctggcctggtgggccccgagtttcatgagaagctgctatcagccgagaaggctgtgacagggtacagggacccctacacagggcagagcgtctccctgttccaggccctgaagaagggcctcattccccgggagcagggcctgcgcctgttggacgcccagctgtccacgggcggcatcgtggaccccagcaagagccaccgcgtgcccctggatgtcgcctgcgcccgaggctgcctggatgaggagaccagcagggccctgtcggcaccaagggccgacgccaaggcctacagtgaccccagcacaggggagccggccacctacggcgagctccagcagcggtgccggcccgaccagctgaccgggctgagcctgctgccgctctcagaaaaggctgctcgggcccggcaggaggagctctactcagagctgcaggcccgtgagacctttgaaaagaccccggttgaggtccccgtgggtggcttcaagggcaggacggtgacggtgtgggagctcatcagctctgagtacttcactgcggagcagcggcaggagctgttgcgtcagttccgcacgggcaaggtcaccgtggagaaggtcatcaagattctcattaccatcgtggaggaggtggagaccctgcggcaggagaggctgtccttcagcggcctccgtgcccctgtgccagccagcgagctcctggcttccggggtcctcagcagagcccagtttgagcagctcaaggacggcaagacgacggtcaaggacctttcggagctgggctccgtgcggacgctgctgcagggcagtggctgcctcgccggcatctacctggaggacaccaaggagaaggtgtccatctacgaggccatgcgccggggcctgctgagagccacaacggctgcgctcctgctggaggcgcaggcggccactggcttcctggtggaccccgtgcggaaccagcgcctgtatgtccacgaggccgtgaaggcgggcgtggtgggccccgagcttcacgagcagctgctgtctgccgagaaggccgtcaccggctacagagacccctactcgggcagcaccatctccctcttccaggccatgcagaagggcctggttctccggcagcacggcatccgcctgctggaggcccagatcgccacgggcggcatcatcgaccccgtgcacagccaccgcgtgcctgtggacgtggcctaccagcgcggctacttcagtgaggagatgaaccgcgtcctggcggaccccagcgacgacaccaagggcttctttgaccccaacacgcatgagaacctcacgtacaggcagctgctggagcggtgcgtggaggaccccgagacgggcttgcgccttctgccactgaaaggggcggagaaggctgaggtggtggagaccacgcaggtgtacactgaggaggagacaagaagggcatttgaagagacacagatcgacattcccggcggcggcagccacggcggctccaccatgtccctgtgggaggtgatgcagtcggacctgatccccgaggagcagcgggcccagctgatggctgacttccaggccggccgggtgaccaaggaacgcatgatcatcatcatcatcgagatcattgagaagacagagatcatccgccagcagggtctggcctcctacgactacgtgcgccgccgcctcacggctgaggacctgttcgaggctcggatcatctctctcgagacctacaacctgctccgggagggcaccaggagcctccgtgaggctctcgaggcggagtccgcctggtgctacctctatggcacgggctccgtggctggtgtctacctgcccggttccaggcagacactgagcatctaccaggctctcaagaaagggctgctgagtgccgaggtggcccgcctgctgctggaggcacaggcagccacaggcttcctgctggacccggtgaagggggagcggctgactgtggatgaggctgtgcggaagggcctcgtggggcccgagctgcacgaccgcctgctctcggctgagcgggcggtcaccggctaccgtgacccctacaccgagcagaccatctcgctcttccaggccatgaagaaggagctgatccctactgaggaggccctgcggctgctggatgcccagctggccaccggcggcatcgtggacccccgcctgggcttccaccttcccctggaggtggcttaccagcgtggctacctcaacaaggacacgcacgaccagctgtcagagcccagcgaggtgcgcagctacgtggacccgtccaccgacgagcgcctcagctacacgcagctgctcaggcggtgccgtcgtgacgacggcaccggccagctgctcctgccactgtcggacgcccgcaagctgaccttccgtggcctgcggaagcagatcaccatggaggagctggtgcgctcgcaggtcatggacgaggccacggcgctgcagctgcgggagggcctgacctccatcgaggaggtcaccaagaacttgcagaagttcctggaaggcaccagctgcatcgctggtgtcttcgtggacgccaccaaggaacggctctcggtgtaccaggccatgaagaagggcatcatccgccccggcacagcctttgagctcctggaggcgcaggcggccaccggttacgtcatcgaccccatcaagggactgaagctgacggtggaggaggctgtgcgtatgggcattgtgggccccgagttcaaggacaagctgctgtcggccgagcgcgccgtcactgggtacaaggacccctactctgggaagctcatctccctcttccaggccatgaagaagggcctgatcctgaaggaccatggcatccgcctgctggaggcccagatcgccacgggcggcatcatcgaccctgaggagagccaccggctgcccgtggaggtggcctacaagcgcggcctcttcgatgaggagatgaacgagatcctgaccgacccctcggacgacaccaagggcttctttgaccctaacacggaggagaacctcacctacctgcagctgatggagcgttgtatcactgacccccagacgggcctgtgtctcttgccgctgaaggagaagaagcgggagcggaagacgtcctccaagtcctccgtgcgcaagcgccgagtggtcatcgtggaccccgagacgggcaaggagatgtcagtgtacgaggcctaccgcaagggcctgattgaccaccagacgtacctggagctgtccgagcaggagtgcgagtgggaggagatcaccatctcctcctcggacggcgtggtcaagtccatgatcatcgaccgccgctccgggcgccagtacgacatcgatgatgccatcgccaagaacctcatcgaccgctcggcactggaccagtaccgcgccggcacgctctccatcaccgagttcgccgacatgctctcgggcaacgccggtggtttccgctcccgttcctcctcggtgggatcctcctcctcctaccccatcagccccgccgtctccaggacccagctggcctcctggtcagaccccactgaggagacgggccccgtggctggcatcctggacacggagacgctggagaaggtgtccatcaccgaggccatgcaccggaacctggtggataacatcacggggcagcggctgctggaggcgcaggcctgcaccgggggcatcatcgaccccagcaccggtgagcgcttccctgtcaccgacgccgtcaacaagggcctggtggacaagatcatggtggaccgcatcaacctggcccagaaggccttctgcggcttcgaggacccacgcaccaagaccaagatgtcggccgcccaggccctgaagaagggctggctctactacgaggccggccagcgcttcctggaggtgcagtacctgaccggcggcttgatcgagcccgacacgccgggccgcgtgcccctggacgaggccctgcagcgcggcacggtggacgcccgcaccgcacagaagctgcgtgacgtgggcgcctactccaagtacctcacctgccctaagaccaagctcaagatctcctataaggacgcgctggaccgcagcatggtggaggagggcacggggctgcggctgctggaggctgccgcgcagtccaccaagggctactacagcccctacagcgtcagcggctccggctctaccgctggctcccgcaccggctcgcgcaccggctcccgggccggctcccgccgcggcagctttgacgccaccggctccggcttctccatgaccttctcttcatcctcctactcctcctcgggctacggccgccgctacgcctcggggtcctcggcctccctggggggccctgagtctgccgtggcctgaggctgcctgcgcccaccccgctctgcatgcggcccagcccggctcccaccgaggcgcgggggccgttttcaacgcttaaaggtgtcttcctcccaagtggtgcctaaagtttaaccaaaaagaccagactaatatattaatatatatctgctgtccagacagcctgtatcttgggggacagggctggcccagccctgctggccgcctcaccccctcgggtctcctcactcccttctacctgccactcacacagccaggtgccttggagggtcccaagctgggccccagcccaccctcctgtcttcccagggtagcccgcctgccagtcctagctgcacagggcagctgggcccaaccctgtctgtagagggccctggtgtttctagcactggcctgcacggtgggccttgctggggacggggggccccagtcagcctctctcccagtctacccagagaagccccttccccatgggaagacgaggccctcgggcccagcccccacagtgctgtctgatctgtgctttccagctcaccccccacactcactcctgagacccctggcctccggcgtcagcctccagcctctgttcccctagtaagtgccttccatgtcggcctctaaccccaggccccgaggacccagacccagtggggaggcggacgttccagccggcatggctgggaactgcagacctgtcctcctggtgggtccaggggcccctccagcttgtggagccccacactggggtgccgcctgcccgtctctctcccatggagccccagccccctttgggcccagggacaccagccaggctctgtgctgaccctcctgttgcacccagccctggtctcagcagcgaccacccctgcctccaccctctgagctttgcatgttccactaaccccgggcgggtggcaggtggaggtgtcaggctgctggcgcctctgcaagggcagaacactaacctgaccgtgggcggggccttgcggtatccgcccccaataaaagcaattccaacctt

SEQ ID NO: 166710 - DNA, 14803 bp, Homo sapiens
  Payload ID: 12821
  Gene Symbol: PLEC
  Gene Name: plectin
  Uniprot ID: Q15149
  ENST ID: ENST00000345136
  CDS Start-End: 130-13773
tgagctgagcctgtgccgagtgagcgtctcgtggggccgccagccttcagctgcctgtgtgccacacggggctgcccagagcaccgtgcctgaggccgagggtccgggcgacgaaggtgtgggggcagcatgtctcagcaccagctccgcgtgccgcagcccgagggcctgggccgaaagagaaccagctcggaggacaacctgtacctggctgtgctcagggcctctgagggcaagaaagatgagcgggatcgtgtgcagaagaaaaccttcaccaagtgggtcaacaagcacctcatcaaggcccagaggcacatcagtgacctgtatgaagacctccgcgatggccacaacctcatctccctgctggaggtcctctcgggggacagcctgccccgggagaaggggaggatgcgtttccacaagctgcagaatgtccagattgccctggactacctccggcaccgccaggtgaagctggtgaacatcaggaatgatgacatcgctgacggcaaccccaagctgacccttggcctcatctggacaatcattctgcacttccagatctcagatatccaggtgagtgggcagtcggaggacatgacggccaaggagaagctgctgctgtggtcgcagcgaatggtggaggggtaccagggcctgcgatgcgacaacttcacctccagctggagagacggccgcctcttcaatgccatcatccaccggcacaagcccctgctcatcgacatgaacaaggtgtaccggcagaccaacctggagaacctggaccaggccttctctgtggcggagcgggacctgggagtgacgcggctcctggaccctgaggacgtggatgtccctcagcccgacgagaagtccatcatcacctacgtctcgtcgctgtatgacgccatgccccgcgtgccggacgtgcaggatggggtgagggccaacgagctgcagctgcgctggcaggagtaccgggagctggtgctgctgctgcttcagtggatgcgacaccacacggccgcctttgaggaacgcaggttcccctccagcttcgaggagattgagatcctgtggtctcagttcctgaagtttaaggagatggagctaccagccaaggaggccgacaagaacaggtccaagggcatctaccaatccctggagggagcggtgcaagcaggccagctcaaggtgccccctggctaccacccgctggatgtggagaaggagtggggcaagctgcacgtggccatcctggagcgggagaagcagctccgcagcgagtttgagaggctggagtgtcttcagcgcatcgtgaccaagctgcagatggaggcggggctgtgtgaggagcagctgaaccaggccgacgccctgctgcagtcggatgtccggctgctggctgcaggcaaagtgccacagcgggcgggggaggtggaacgggacttggacaaggcggatagcatgatccggctgctcttcaacgacgtgcagaccctcaaggatggacggcacccgcagggcgagcagatgtaccgcagggtgtaccgtctgcacgagcgcctggtagccatccgcaccgagtacaacctacggctgaaggcaggcgtggcggcccctgcaacccaggtggcccaggtgactctgcagagtgtgcagaggcgccccgagctggaggactccactctgcgctacctgcaggacctgctggcctgggtggaggagaaccagcaccgtgtggatggcgctgagtggggtgtggacctgcccagcgtggaggcgcagctgggcagccaccgaggcctgcaccagtccatcgaagaattccgggccaagatcgagcgggcacggagtgacgagggccagctctcccccgccacccggggtgcctaccgtgactgcctgggtcggctggacctgcagtacgccaagctgctgaactcctccaaggcccgcctcaggtccctggagagcttgcacagctttgtggcagccgccactaaggagctaatgtggctgaatgagaaggaggaggaggaggtgggcttcgactggagcgaccgcaacaccaacatgaccgccaagaaggagagctactcggcgctgatgcgggagctggagctgaaggagaagaagatcaaggagctccaaaatgctggggaccggctgctgcgggaggaccacccggcccggcccacggtggagtccttccaggcggccctgcagacgcagtggagctggatgctacagctgtgctgctgtatcgaggcacacctgaaggagaacgctgcctactttcagttcttctcagatgtgcgggaggccgaggggcagttgcagaagctgcaggaggcactgcgtaggaaatacagttgtgatcgctccgccaccgtcacccggctggaggacctgctgcaggatgcccaggacgagaaggaacagctgaacgagtacaagggccacctctcaggcctggccaagcgggccaaggccgtcgtgcagctgaagccccgccacccagcccaccccatgcggggccgcctgcccctgctggccgtgtgcgactataagcaggtggaggtgactgtgcacaagggtgacgagtgccagctggtgggccctgcacagccgtcccactggaaggtgctcagcagctccggcagcgaggccgccgtgccctccgtgtgcttcctggtgcccccgcccaaccaggaggcccaggaggccgtcaccaggctggaggcccagcaccaggccctggtcacgctgtggcaccagttgcacgtggacatgaagagccttctggcctggcagagccttcgccgcgacgtgcagctcatccgctcctggtccctggccacgttccgcaccctgaagccagaggagcagcgccaagccctgcacagcctggagctgcactaccaggccttcctgcgggacagccaggacgcgggcggcttcggacccgaggaccggctgatggctgagcgcgagtacggctcctgcagccaccactaccagcagctgctgcagagcctggaacagggtgcacaggaagagtctcgctgccagcgctgcatctccgagctcaaagacatccggctgcagctggaggcctgtgagacgcgcaccgtgcaccgcctgcggctgccgctggacaaagagccggcacgggagtgtgcccagcgcatcgccgagcagcagaaggcacaggcagaggtggaggggctgggcaagggggtcgcccggctctctgccgaggccgagaaggtcttggccctaccagagccatcgcctgcggcccccacgctgcgctcggagctggagctgacgctgggcaagctggagcaggtccgcagcctgtctgccatctacctggagaagctcaagaccatcagcctggtgatccgcggcacgcagggggccgaggaggtgctcagggcccacgaggagcagctcaaggaggcccaggccgtgccggccaccctcccggagctcgaggccaccaaggcctctctgaagaagctgcgggcccaggccgaggcacagcagcccacgttcgacgccctgcgggatgagctgcggggggcacaggaggtgggggagcgactgcagcagcggcacggggagcgggacgtggaggtggagcgctggcgggagcgggtcgcccagttgcttgagcgctggcaggctgtgctggcccagaccgacgtgcggcagcgcgagctcgagcaactgggccgccagctgcgttactaccgcgagagtgcagaccccttgggcgcctggctgcaggacgccaggcggcggcaggagcagatccaggccatgccgctggccgacagccaggctgtgcgggagcagctgcggcaggagcaggccctgctggaggagatcgagcgccacggcgagaaggtcgaggagtgccagaggtttgcgaaacagtacatcaacgccatcaaggactatgaactccagctggtgacgtacaaggcgcagcttgagccggtggcctccccggccaagaagcccaaggtccagtcgggatcagagagtgtcatccaggagtacgtggacctgcgtacgcactacagcgagctgaccacactgacgagccagtacatcaagttcatcagcgagactctgcggcgcatggaggaggaggagaggctggctgagcagcagcgggcagaggagcgcgagcggctggccgaggtggaggccgcgctggagaagcagcggcagctggccgaggcgcacgcccaggcaaaggcacaggcggagcgggaggcgaaggagctgcagcagcgcatgcaggaggaggtggtgcggcgggaggaggcggcggtggacgcgcagcagcagaagcgcagcattcaggaggagctgcagcagctgcggcagagctcggaggcggagatccaggccaaggcccggcaggcagaggcggctgagcgcagccggctgcgcatcgaggaggagatccgcgtggtgcgcctgcagttggaggccaccgagcgccagcgtggcggggctgagggggagctgcaggcactgcgtgcacgggcggaggaggctgaggcacaaaagcgacaggcgcaggaggaggccgagcgcttgcggaggcaggtgcaggacgagagccagcgtaagcggcaggcggaggtggagctggcctcgcgcgtgaaggccgaggccgaggcggcgcgcgagaagcagcgggccctgcaggccctggaggagctgcggctgcaggcggaggaggcggagcggcgcctgcggcaggccgaggtggagcgagcgcggcaggtacaggtggccctggagacggcgcagcgcagtgcagaggcggagctgcagagcaaacgcgcctccttcgccgagaagacggcacagctggagcgctccctgcaggaggaacacgtggctgtggcacagctgcgggaggaggctgagcggcgggcacagcagcaggccgaggccgagcgggcgcgcgaggaggcagagcgggagctggagcgctggcagctcaaggccaacgaggcgctacggctgcggctgcaggcggaggaggtggcgcagcagaagagcctggcgcaggccgaggctgagaagcagaaggaggaggcggagcgcgaggcgcggcggcgcggcaaggcggaggagcaggccgtccggcagcgggagctggctgaacaagagctggagaagcagcggcagctggcggaaggcaccgcgcagcagcgcctggccgcggagcaggagttgatccggctgcgggccgagacggagcagggggagcagcagcggcagctgctggaggaggagctggcccggctgcagcgtgaggcggctgcagccacgcagaaacggcaggagctggaagccgagctggccaaggtgcgggccgagatggaggtgctgctggccagcaaggcgagggctgaggaggagtcgcgctccaccagcgagaagtccaagcagaggctggaggccgaggccggccggttccgcgagctggccgaggaggccgcccgcctgcgtgccctggcggaagaggccaagcggcagcggcagctggccgaggaagacgcggcgcggcagcgggccgaggcggagcgggtgcttgcggagaagctggccgccatcggcgaggccacgcggctcaagacggaggcggagatcgcgctcaaggagaaggaggcggagaacgagcgcctgcggcggctggcggaggacgaggccttccagcggcggcggctggaggagcaggccgcgcaacacaaggctgacatcgaggagcgcctggcccagctgcgcaaggcatcggacagcgagctggagcggcagaaggggctggtggaggacacgctgaggcagcggcggcaggtggaggaggagatcctggcgctgaaggcgagcttcgagaaggcggccgctggcaaggcggagctggagctggagctgggacgcatccgcagcaacgcggaggacacgctgcgcagcaaggagcaggccgagctggaggctgcgaggcagcggcagctggcggcggaggaggagcggcggcgccgtgaggctgaggagcgcgtgcagaagagcctggcggccgaggaggaggccgcacggcagcggaaggcggcgctggaggaagtcgagcggctgaaagccaaggtggaggaggcgcggcgcctgcgggagcgagcggagcaggagtcggcgcggcagctgcagctggcccaggaggccgcccagaagcggctgcaggcggaagagaaggcacacgccttcgcggtgcagcagaaggagcaggagctacagcagacgctgcagcaggagcagagcgtgctggaccagctgcgcggcgaggcggaggcggcccggcgggcggctgaggaggcggaggaggcccgggtgcaggcggagcgtgaggcggcgcagtcccggcggcaggtggaagaggccgagcggctgaagcagtcggcagaggagcaggcacaggcccgggctcaggcacaggcggctgcagagaagctgcgcaaggaggccgagcaagaggcggcgcggcgggcacaggcggagcaggcggccctgcggcagaagcaggcagctgacgcggagatggagaagcataagaaattcgccgagcagacgctgcggcagaaggcgcaggtggagcaggagctgacaacactgcggctgcagctggaggagaccgaccaccagaagaacctgctggacgaggagctgcagcggctgaaggcggaggccacggaggccgcacgccagcgcagccaggtggaggaggagctcttctcggtgcgcgtgcagatggaggagctgagcaagctcaaggcacgcatcgaggctgagaaccgcgcactcatcttgcgtgacaaggacaatacgcagcgcttcctgcaggaggaggctgagaagatgaagcaggtggcggaggaggccgcgcggctgagtgtggcggcccaagaggctgcgcgactgcggcagctggcagaggaggacctggcacagcagcgggccttggcagagaagatgctcaaggagaagatgcaggcggtgcaggaggccacgcgactcaaggctgaggcggaactgctgcagcagcagaaggagcttgcgcaggagcaggcgcggcggctgcaggaggacaaggagcagatggcgcagcagctggcggaggagacgcagggcttccagcggacgctggaggccgagcggcagcggcagctggagatgagcgctgaggctgagcgcctcaagctgcgtgtggccgagatgagccgagcccaggcccgcgctgaggaggacgcccagcgcttccggaagcaggcggaggagatcggtgagaagctgcaccgcacggagctcgccacccaggagaaggtgaccctggtgcagacactggagatccagcgacagcagagtgaccatgatgccgagcgcctgcgggaggccatcgctgagctggagcgtgagaaggagaagctccaacaggaggccaaactgctgcagctcaagtctgaggagatgcagacggtgcagcaggagcagctgctgcaggagacgcaggccctgcagcaaagcttcctctctgaaaaggacagcctgctacagcgggagcgcttcatcgagcaggagaaggccaagctggagcagctcttccaggacgaggtggccaaggcacagcagctgcgtgaggagcagcagcggcagcagcagcagatggagcaggaacggcagcggctggtggccagcatggaggaggcgcggcggcggcagcatgaggccgaggagggcgtgcggcgcaagcaggaggagctgcagcagctggagcagcagcggcggcagcaggaggagctgctggctgaggagaaccagaggctgcgtgagcagctgcagctcctggaggagcagcaccgggccgcgctggcgcactcagaggaggtcactgcctcgcaggtggctgccacaaagaccctgcccaatggccgggatgcacttgatggccccgcggcagaggcagagccggagcacagcttcgatggcctgcggcggaaggtgtcagctcagaggctgcaggaggccggcatcctgagtgcggaggagctgcagcggttggcgcagggccacaccacggtggacgagctcgcacggcgggaagacgtgcgccactacctgcagggccgcagcagtatcgcagggctgttgctgaaggccaccaatgagaagctgagtgtttacgccgccctgcagaggcagctgctgagtcccggcacggccctcatcctgctggaggcgcaggcggcctcaggcttcctgctggaccctgtgcggaaccggcggctgaccgtcaacgaggctgtgaaggagggtgtggtgggccccgagctgcaccacaagctgctgtcggccgagcgcgccgtcactggctacaaggacccctacactggccagcagatctctctcttccaagccatgcagaagggcctcatcgtccgggagcacggcatccgcctgctggaggcccagatcgccacgggcggcgttatcgaccccgtgcacagccaccgcgtgcccgtggacgtggcctaccggcgcggctacttcgacgaggagatgaaccgcgtcctggcggaccccagcgacgacaccaagggcttctttgaccccaacacgcacgagaacctcacgtacctgcagctactggagcgctgcgtggaggaccccgagacgggcctgtgccttctgccactcacggataaggctgccaagggcggggagctggtctacactgactccgaggcccgggacgtctttgagaaggccaccgtgtctgcgccgttcggcaagttccagggcaagacggtgaccatttgggagatcatcaactcggaatacttcacggcagagcagcggcgggacctgctgcggcagttccgcacgggccggatcacagtggagaagatcatcaagatcatcatcacggtggtggaggagcaggagcagaagggccggctttgctttgagggcctgcgcagcctggtgccagccgccgagctgctggagagcagggtcatcgaccgcgagctctaccagcagctgcagcgaggtgagcgctctgtgcgagacgtagccgaggtggacactgtgcggcgggctctccggggtgccaacgtcatcgcgggtgtatggctggaggaggcggggcagaagctgagtatctacaatgccctgaagaaagacctgctgccatccgacatggccgtggccctgttggaagcccaggccggcaccgggcacatcatcgaccccgccaccagcgcccggctgaccgtggacgaggcagtgcgtgctggcctggtgggccccgagtttcatgagaagctgctatcagccgagaaggctgtgacagggtacagggacccctacacagggcagagcgtctccctgttccaggccctgaagaagggcctcattccccgggagcagggcctgcgcctgttggacgcccagctgtccacgggcggcatcgtggaccccagcaagagccaccgcgtgcccctggatgtcgcctgcgcccgaggctgcctggatgaggagaccagcagggccctgtcggcaccaagggccgacgccaaggcctacagtgaccccagcacaggggagccggccacctacggcgagctccagcagcggtgccggcccgaccagctgaccgggctgagcctgctgccgctctcagaaaaggctgctcgggcccggcaggaggagctctactcagagctgcaggcccgtgagacctttgaaaagaccccggttgaggtccccgtgggtggcttcaagggcaggacggtgacggtgtgggagctcatcagctctgagtacttcactgcggagcagcggcaggagctgttgcgtcagttccgcacgggcaaggtcaccgtggagaaggtcatcaagattctcattaccatcgtggaggaggtggagaccctgcggcaggagaggctgtccttcagcggcctccgtgcccctgtgccagccagcgagctcctggcttccggggtcctcagcagagcccagtttgagcagctcaaggacggcaagacgacggtcaaggacctttcggagctgggctccgtgcggacgctgctgcagggcagtggctgcctcgccggcatctacctggaggacaccaaggagaaggtgtccatctacgaggccatgcgccggggcctgctgagagccacaacggctgcgctcctgctggaggcgcaggcggccactggcttcctggtggaccccgtgcggaaccagcgcctgtatgtccacgaggccgtgaaggcgggcgtggtgggccccgagcttcacgagcagctgctgtctgccgagaaggccgtcaccggctacagagacccctactcgggcagcaccatctccctcttccaggccatgcagaagggcctggttctccggcagcacggcatccgcctgctggaggcccagatcgccacgggcggcatcatcgaccccgtgcacagccaccgcgtgcctgtggacgtggcctaccagcgcggctacttcagtgaggagatgaaccgcgtcctggcggaccccagcgacgacaccaagggcttctttgaccccaacacgcatgagaacctcacgtacaggcagctgctggagcggtgcgtggaggaccccgagacgggcttgcgccttctgccactgaaaggggcggagaaggctgaggtggtggagaccacgcaggtgtacactgaggaggagacaagaagggcatttgaagagacacagatcgacattcccggcggcggcagccacggcggctccaccatgtccctgtgggaggtgatgcagtcggacctgatccccgaggagcagcgggcccagctgatggctgacttccaggccggccgggtgaccaaggaacgcatgatcatcatcatcatcgagatcattgagaagacagagatcatccgccagcagggtctggcctcctacgactacgtgcgccgccgcctcacggctgaggacctgttcgaggctcggatcatctctctcgagacctacaacctgctccgggagggcaccaggagcctccgtgaggctctcgaggcggagtccgcctggtgctacctctatggcacgggctccgtggctggtgtctacctgcccggttccaggcagacactgagcatctaccaggctctcaagaaagggctgctgagtgccgaggtggcccgcctgctgctggaggcacaggcagccacaggcttcctgctggacccggtgaagggggagcggctgactgtggatgaggctgtgcggaagggcctcgtggggcccgagctgcacgaccgcctgctctcggctgagcgggcggtcaccggctaccgtgacccctacaccgagcagaccatctcgctcttccaggccatgaagaaggagctgatccctactgaggaggccctgcggctgctggatgcccagctggccaccggcggcatcgtggacccccgcctgggcttccaccttcccctggaggtggcttaccagcgtggctacctcaacaaggacacgcacgaccagctgtcagagcccagcgaggtgcgcagctacgtggacccgtccaccgacgagcgcctcagctacacgcagctgctcaggcggtgccgtcgtgacgacggcaccggccagctgctcctgccactgtcggacgcccgcaagctgaccttccgtggcctgcggaagcagatcaccatggaggagctggtgcgctcgcaggtcatggacgaggccacggcgctgcagctgcgggagggcctgacctccatcgaggaggtcaccaagaacttgcagaagttcctggaaggcaccagctgcatcgctggtgtcttcgtggacgccaccaaggaacggctctcggtgtaccaggccatgaagaagggcatcatccgccccggcacagcctttgagctcctggaggcgcaggcggccaccggttacgtcatcgaccccatcaagggactgaagctgacggtggaggaggctgtgcgtatgggcattgtgggccccgagttcaaggacaagctgctgtcggccgagcgcgccgtcactgggtacaaggacccctactctgggaagctcatctccctcttccaggccatgaagaagggcctgatcctgaaggaccatggcatccgcctgctggaggcccagatcgccacgggcggcatcatcgaccctgaggagagccaccggctgcccgtggaggtggcctacaagcgcggcctcttcgatgaggagatgaacgagatcctgaccgacccctcggacgacaccaagggcttctttgaccctaacacggaggagaacctcacctacctgcagctgatggagcgttgtatcactgacccccagacgggcctgtgtctcttgccgctgaaggagaagaagcgggagcggaagacgtcctccaagtcctccgtgcgcaagcgccgagtggtcatcgtggaccccgagacgggcaaggagatgtcagtgtacgaggcctaccgcaagggcctgattgaccaccagacgtacctggagctgtccgagcaggagtgcgagtgggaggagatcaccatctcctcctcggacggcgtggtcaagtccatgatcatcgaccgccgctccgggcgccagtacgacatcgatgatgccatcgccaagaacctcatcgaccgctcggcactggaccagtaccgcgccggcacgctctccatcaccgagttcgccgacatgctctcgggcaacgccggtggtttccgctcccgttcctcctcggtgggatcctcctcctcctaccccatcagccccgccgtctccaggacccagctggcctcctggtcagaccccactgaggagacgggccccgtggctggcatcctggacacggagacgctggagaaggtgtccatcaccgaggccatgcaccggaacctggtggataacatcacggggcagcggctgctggaggcgcaggcctgcaccgggggcatcatcgaccccagcaccggtgagcgcttccctgtcaccgacgccgtcaacaagggcctggtggacaagatcatggtggaccgcatcaacctggcccagaaggccttctgcggcttcgaggacccacgcaccaagaccaagatgtcggccgcccaggccctgaagaagggctggctctactacgaggccggccagcgcttcctggaggtgcagtacctgaccggcggcttgatcgagcccgacacgccgggccgcgtgcccctggacgaggccctgcagcgcggcacggtggacgcccgcaccgcacagaagctgcgtgacgtgggcgcctactccaagtacctcacctgccctaagaccaagctcaagatctcctataaggacgcgctggaccgcagcatggtggaggagggcacggggctgcggctgctggaggctgccgcgcagtccaccaagggctactacagcccctacagcgtcagcggctccggctctaccgctggctcccgcaccggctcgcgcaccggctcccgggccggctcccgccgcggcagctttgacgccaccggctccggcttctccatgaccttctcttcatcctcctactcctcctcgggctacggccgccgctacgcctcggggtcctcggcctccctggggggccctgagtctgccgtggcctgaggctgcctgcgcccaccccgctctgcatgcggcccagcccggctcccaccgaggcgcgggggccgttttcaacgcttaaaggtgtcttcctcccaagtggtgcctaaagtttaaccaaaaagaccagactaatatattaatatatatctgctgtccagacagcctgtatcttgggggacagggctggcccagccctgctggccgcctcaccccctcgggtctcctcactcccttctacctgccactcacacagccaggtgccttggagggtcccaagctgggccccagcccaccctcctgtcttcccagggtagcccgcctgccagtcctagctgcacagggcagctgggcccaaccctgtctgtagagggccctggtgtttctagcactggcctgcacggtgggccttgctggggacggggggccccagtcagcctctctcccagtctacccagagaagccccttccccatgggaagacgaggccctcgggcccagcccccacagtgctgtctgatctgtgctttccagctcaccccccacactcactcctgagacccctggcctccggcgtcagcctccagcctctgttcccctagtaagtgccttccatgtcggcctctaaccccaggccccgaggacccagacccagtggggaggcggacgttccagccggcatggctgggaactgcagacctgtcctcctggtgggtccaggggcccctccagcttgtggagccccacactggggtgccgcctgcccgtctctctcccatggagccccagccccctttgggcccagggacaccagccaggctctgtgctgaccctcctgttgcacccagccctggtctcagcagcgaccacccctgcctccaccctctgagctttgcatgttccactaaccccgggcgggtggcaggtggaggtgtcaggctgctggcgcctctgcaagggcagaacactaacctgaccgtgggcggggccttgcggtatccgcccccaataaaagcaattccaaccttcccgtg

SEQ ID NO: 166711 - DNA, 14736 bp, Homo sapiens
  Payload ID: 12821
  Gene Symbol: PLEC
  Gene Name: plectin
  Uniprot ID: Q15149
  ENST ID: ENST00000354589
  CDS Start-End: 69-13712
gctgtctagcctggagcagccggttcccagcgcaggaagggcagccctggcggctccgcgtggcggctatggagccctcgggcagcctgtttccctccctggtggttgtgggtcacgttgtcaccctggccgctgtgtggcactggcgcaggggacgtcggtgggcgcaggacgagcaagatgagcgggatcgtgtgcagaagaaaaccttcaccaagtgggtcaacaagcacctcatcaaggcccagaggcacatcagtgacctgtatgaagacctccgcgatggccacaacctcatctccctgctggaggtcctctcgggggacagcctgccccgggagaaggggaggatgcgtttccacaagctgcagaatgtccagattgccctggactacctccggcaccgccaggtgaagctggtgaacatcaggaatgatgacatcgctgacggcaaccccaagctgacccttggcctcatctggacaatcattctgcacttccagatctcagatatccaggtgagtgggcagtcggaggacatgacggccaaggagaagctgctgctgtggtcgcagcgaatggtggaggggtaccagggcctgcgatgcgacaacttcacctccagctggagagacggccgcctcttcaatgccatcatccaccggcacaagcccctgctcatcgacatgaacaaggtgtaccggcagaccaacctggagaacctggaccaggccttctctgtggcggagcgggacctgggagtgacgcggctcctggaccctgaggacgtggatgtccctcagcccgacgagaagtccatcatcacctacgtctcgtcgctgtatgacgccatgccccgcgtgccggacgtgcaggatggggtgagggccaacgagctgcagctgcgctggcaggagtaccgggagctggtgctgctgctgcttcagtggatgcgacaccacacggccgcctttgaggaacgcaggttcccctccagcttcgaggagattgagatcctgtggtctcagttcctgaagtttaaggagatggagctaccagccaaggaggccgacaagaacaggtccaagggcatctaccaatccctggagggagcggtgcaagcaggccagctcaaggtgccccctggctaccacccgctggatgtggagaaggagtggggcaagctgcacgtggccatcctggagcgggagaagcagctccgcagcgagtttgagaggctggagtgtcttcagcgcatcgtgaccaagctgcagatggaggcggggctgtgtgaggagcagctgaaccaggccgacgccctgctgcagtcggatgtccggctgctggctgcaggcaaagtgccacagcgggcgggggaggtggaacgggacttggacaaggcggatagcatgatccggctgctcttcaacgacgtgcagaccctcaaggatggacggcacccgcagggcgagcagatgtaccgcagggtgtaccgtctgcacgagcgcctggtagccatccgcaccgagtacaacctacggctgaaggcaggcgtggcggcccctgcaacccaggtggcccaggtgactctgcagagtgtgcagaggcgccccgagctggaggactccactctgcgctacctgcaggacctgctggcctgggtggaggagaaccagcaccgtgtggatggcgctgagtggggtgtggacctgcccagcgtggaggcgcagctgggcagccaccgaggcctgcaccagtccatcgaagaattccgggccaagatcgagcgggcacggagtgacgagggccagctctcccccgccacccggggtgcctaccgtgactgcctgggtcggctggacctgcagtacgccaagctgctgaactcctccaaggcccgcctcaggtccctggagagcttgcacagctttgtggcagccgccactaaggagctaatgtggctgaatgagaaggaggaggaggaggtgggcttcgactggagcgaccgcaacaccaacatgaccgccaagaaggagagctactcggcgctgatgcgggagctggagctgaaggagaagaagatcaaggagctccaaaatgctggggaccggctgctgcgggaggaccacccggcccggcccacggtggagtccttccaggcggccctgcagacgcagtggagctggatgctacagctgtgctgctgtatcgaggcacacctgaaggagaacgctgcctactttcagttcttctcagatgtgcgggaggccgaggggcagttgcagaagctgcaggaggcactgcgtaggaaatacagttgtgatcgctccgccaccgtcacccggctggaggacctgctgcaggatgcccaggacgagaaggaacagctgaacgagtacaagggccacctctcaggcctggccaagcgggccaaggccgtcgtgcagctgaagccccgccacccagcccaccccatgcggggccgcctgcccctgctggccgtgtgcgactataagcaggtggaggtgactgtgcacaagggtgacgagtgccagctggtgggccctgcacagccgtcccactggaaggtgctcagcagctccggcagcgaggccgccgtgccctccgtgtgcttcctggtgcccccgcccaaccaggaggcccaggaggccgtcaccaggctggaggcccagcaccaggccctggtcacgctgtggcaccagttgcacgtggacatgaagagccttctggcctggcagagccttcgccgcgacgtgcagctcatccgctcctggtccctggccacgttccgcaccctgaagccagaggagcagcgccaagccctgcacagcctggagctgcactaccaggccttcctgcgggacagccaggacgcgggcggcttcggacccgaggaccggctgatggctgagcgcgagtacggctcctgcagccaccactaccagcagctgctgcagagcctggaacagggtgcacaggaagagtctcgctgccagcgctgcatctccgagctcaaagacatccggctgcagctggaggcctgtgagacgcgcaccgtgcaccgcctgcggctgccgctggacaaagagccggcacgggagtgtgcccagcgcatcgccgagcagcagaaggcacaggcagaggtggaggggctgggcaagggggtcgcccggctctctgccgaggccgagaaggtcttggccctaccagagccatcgcctgcggcccccacgctgcgctcggagctggagctgacgctgggcaagctggagcaggtccgcagcctgtctgccatctacctggagaagctcaagaccatcagcctggtgatccgcggcacgcagggggccgaggaggtgctcagggcccacgaggagcagctcaaggaggcccaggccgtgccggccaccctcccggagctcgaggccaccaaggcctctctgaagaagctgcgggcccaggccgaggcacagcagcccacgttcgacgccctgcgggatgagctgcggggggcacaggaggtgggggagcgactgcagcagcggcacggggagcgggacgtggaggtggagcgctggcgggagcgggtcgcccagttgcttgagcgctggcaggctgtgctggcccagaccgacgtgcggcagcgcgagctcgagcaactgggccgccagctgcgttactaccgcgagagtgcagaccccttgggcgcctggctgcaggacgccaggcggcggcaggagcagatccaggccatgccgctggccgacagccaggctgtgcgggagcagctgcggcaggagcaggccctgctggaggagatcgagcgccacggcgagaaggtcgaggagtgccagaggtttgcgaaacagtacatcaacgccatcaaggactatgaactccagctggtgacgtacaaggcgcagcttgagccggtggcctccccggccaagaagcccaaggtccagtcgggatcagagagtgtcatccaggagtacgtggacctgcgtacgcactacagcgagctgaccacactgacgagccagtacatcaagttcatcagcgagactctgcggcgcatggaggaggaggagaggctggctgagcagcagcgggcagaggagcgcgagcggctggccgaggtggaggccgcgctggagaagcagcggcagctggccgaggcgcacgcccaggcaaaggcacaggcggagcgggaggcgaaggagctgcagcagcgcatgcaggaggaggtggtgcggcgggaggaggcggcggtggacgcgcagcagcagaagcgcagcattcaggaggagctgcagcagctgcggcagagctcggaggcggagatccaggccaaggcccggcaggcagaggcggctgagcgcagccggctgcgcatcgaggaggagatccgcgtggtgcgcctgcagttggaggccaccgagcgccagcgtggcggggctgagggggagctgcaggcactgcgtgcacgggcggaggaggctgaggcacaaaagcgacaggcgcaggaggaggccgagcgcttgcggaggcaggtgcaggacgagagccagcgtaagcggcaggcggaggtggagctggcctcgcgcgtgaaggccgaggccgaggcggcgcgcgagaagcagcgggccctgcaggccctggaggagctgcggctgcaggcggaggaggcggagcggcgcctgcggcaggccgaggtggagcgagcgcggcaggtacaggtggccctggagacggcgcagcgcagtgcagaggcggagctgcagagcaaacgcgcctccttcgccgagaagacggcacagctggagcgctccctgcaggaggaacacgtggctgtggcacagctgcgggaggaggctgagcggcgggcacagcagcaggccgaggccgagcgggcgcgcgaggaggcagagcgggagctggagcgctggcagctcaaggccaacgaggcgctacggctgcggctgcaggcggaggaggtggcgcagcagaagagcctggcgcaggccgaggctgagaagcagaaggaggaggcggagcgcgaggcgcggcggcgcggcaaggcggaggagcaggccgtccggcagcgggagctggctgaacaagagctggagaagcagcggcagctggcggaaggcaccgcgcagcagcgcctggccgcggagcaggagttgatccggctgcgggccgagacggagcagggggagcagcagcggcagctgctggaggaggagctggcccggctgcagcgtgaggcggctgcagccacgcagaaacggcaggagctggaagccgagctggccaaggtgcgggccgagatggaggtgctgctggccagcaaggcgagggctgaggaggagtcgcgctccaccagcgagaagtccaagcagaggctggaggccgaggccggccggttccgcgagctggccgaggaggccgcccgcctgcgtgccctggcggaagaggccaagcggcagcggcagctggccgaggaagacgcggcgcggcagcgggccgaggcggagcgggtgcttgcggagaagctggccgccatcggcgaggccacgcggctcaagacggaggcggagatcgcgctcaaggagaaggaggcggagaacgagcgcctgcggcggctggcggaggacgaggccttccagcggcggcggctggaggagcaggccgcgcaacacaaggctgacatcgaggagcgcctggcccagctgcgcaaggcatcggacagcgagctggagcggcagaaggggctggtggaggacacgctgaggcagcggcggcaggtggaggaggagatcctggcgctgaaggcgagcttcgagaaggcggccgctggcaaggcggagctggagctggagctgggacgcatccgcagcaacgcggaggacacgctgcgcagcaaggagcaggccgagctggaggctgcgaggcagcggcagctggcggcggaggaggagcggcggcgccgtgaggctgaggagcgcgtgcagaagagcctggcggccgaggaggaggccgcacggcagcggaaggcggcgctggaggaagtcgagcggctgaaagccaaggtggaggaggcgcggcgcctgcgggagcgagcggagcaggagtcggcgcggcagctgcagctggcccaggaggccgcccagaagcggctgcaggcggaagagaaggcacacgccttcgcggtgcagcagaaggagcaggagctacagcagacgctgcagcaggagcagagcgtgctggaccagctgcgcggcgaggcggaggcggcccggcgggcggctgaggaggcggaggaggcccgggtgcaggcggagcgtgaggcggcgcagtcccggcggcaggtggaagaggccgagcggctgaagcagtcggcagaggagcaggcacaggcccgggctcaggcacaggcggctgcagagaagctgcgcaaggaggccgagcaagaggcggcgcggcgggcacaggcggagcaggcggccctgcggcagaagcaggcagctgacgcggagatggagaagcataagaaattcgccgagcagacgctgcggcagaaggcgcaggtggagcaggagctgacaacactgcggctgcagctggaggagaccgaccaccagaagaacctgctggacgaggagctgcagcggctgaaggcggaggccacggaggccgcacgccagcgcagccaggtggaggaggagctcttctcggtgcgcgtgcagatggaggagctgagcaagctcaaggcacgcatcgaggctgagaaccgcgcactcatcttgcgtgacaaggacaatacgcagcgcttcctgcaggaggaggctgagaagatgaagcaggtggcggaggaggccgcgcggctgagtgtggcggcccaagaggctgcgcgactgcggcagctggcagaggaggacctggcacagcagcgggccttggcagagaagatgctcaaggagaagatgcaggcggtgcaggaggccacgcgactcaaggctgaggcggaactgctgcagcagcagaaggagcttgcgcaggagcaggcgcggcggctgcaggaggacaaggagcagatggcgcagcagctggcggaggagacgcagggcttccagcggacgctggaggccgagcggcagcggcagctggagatgagcgctgaggctgagcgcctcaagctgcgtgtggccgagatgagccgagcccaggcccgcgctgaggaggacgcccagcgcttccggaagcaggcggaggagatcggtgagaagctgcaccgcacggagctcgccacccaggagaaggtgaccctggtgcagacactggagatccagcgacagcagagtgaccatgatgccgagcgcctgcgggaggccatcgctgagctggagcgtgagaaggagaagctccaacaggaggccaaactgctgcagctcaagtctgaggagatgcagacggtgcagcaggagcagctgctgcaggagacgcaggccctgcagcaaagcttcctctctgaaaaggacagcctgctacagcgggagcgcttcatcgagcaggagaaggccaagctggagcagctcttccaggacgaggtggccaaggcacagcagctgcgtgaggagcagcagcggcagcagcagcagatggagcaggaacggcagcggctggtggccagcatggaggaggcgcggcggcggcagcatgaggccgaggagggcgtgcggcgcaagcaggaggagctgcagcagctggagcagcagcggcggcagcaggaggagctgctggctgaggagaaccagaggctgcgtgagcagctgcagctcctggaggagcagcaccgggccgcgctggcgcactcagaggaggtcactgcctcgcaggtggctgccacaaagaccctgcccaatggccgggatgcacttgatggccccgcggcagaggcagagccggagcacagcttcgatggcctgcggcggaaggtgtcagctcagaggctgcaggaggccggcatcctgagtgcggaggagctgcagcggttggcgcagggccacaccacggtggacgagctcgcacggcgggaagacgtgcgccactacctgcagggccgcagcagtatcgcagggctgttgctgaaggccaccaatgagaagctgagtgtttacgccgccctgcagaggcagctgctgagtcccggcacggccctcatcctgctggaggcgcaggcggcctcaggcttcctgctggaccctgtgcggaaccggcggctgaccgtcaacgaggctgtgaaggagggtgtggtgggccccgagctgcaccacaagctgctgtcggccgagcgcgccgtcactggctacaaggacccctacactggccagcagatctctctcttccaagccatgcagaagggcctcatcgtccgggagcacggcatccgcctgctggaggcccagatcgccacgggcggcgttatcgaccccgtgcacagccaccgcgtgcccgtggacgtggcctaccggcgcggctacttcgacgaggagatgaaccgcgtcctggcggaccccagcgacgacaccaagggcttctttgaccccaacacgcacgagaacctcacgtacctgcagctactggagcgctgcgtggaggaccccgagacgggcctgtgccttctgccactcacggataaggctgccaagggcggggagctggtctacactgactccgaggcccgggacgtctttgagaaggccaccgtgtctgcgccgttcggcaagttccagggcaagacggtgaccatttgggagatcatcaactcggaatacttcacggcagagcagcggcgggacctgctgcggcagttccgcacgggccggatcacagtggagaagatcatcaagatcatcatcacggtggtggaggagcaggagcagaagggccggctttgctttgagggcctgcgcagcctggtgccagccgccgagctgctggagagcagggtcatcgaccgcgagctctaccagcagctgcagcgaggtgagcgctctgtgcgagacgtagccgaggtggacactgtgcggcgggctctccggggtgccaacgtcatcgcgggtgtatggctggaggaggcggggcagaagctgagtatctacaatgccctgaagaaagacctgctgccatccgacatggccgtggccctgttggaagcccaggccggcaccgggcacatcatcgaccccgccaccagcgcccggctgaccgtggacgaggcagtgcgtgctggcctggtgggccccgagtttcatgagaagctgctatcagccgagaaggctgtgacagggtacagggacccctacacagggcagagcgtctccctgttccaggccctgaagaagggcctcattccccgggagcagggcctgcgcctgttggacgcccagctgtccacgggcggcatcgtggaccccagcaagagccaccgcgtgcccctggatgtcgcctgcgcccgaggctgcctggatgaggagaccagcagggccctgtcggcaccaagggccgacgccaaggcctacagtgaccccagcacaggggagccggccacctacggcgagctccagcagcggtgccggcccgaccagctgaccgggctgagcctgctgccgctctcagaaaaggctgctcgggcccggcaggaggagctctactcagagctgcaggcccgtgagacctttgaaaagaccccggttgaggtccccgtgggtggcttcaagggcaggacggtgacggtgtgggagctcatcagctctgagtacttcactgcggagcagcggcaggagctgttgcgtcagttccgcacgggcaaggtcaccgtggagaaggtcatcaagattctcattaccatcgtggaggaggtggagaccctgcggcaggagaggctgtccttcagcggcctccgtgcccctgtgccagccagcgagctcctggcttccggggtcctcagcagagcccagtttgagcagctcaaggacggcaagacgacggtcaaggacctttcggagctgggctccgtgcggacgctgctgcagggcagtggctgcctcgccggcatctacctggaggacaccaaggagaaggtgtccatctacgaggccatgcgccggggcctgctgagagccacaacggctgcgctcctgctggaggcgcaggcggccactggcttcctggtggaccccgtgcggaaccagcgcctgtatgtccacgaggccgtgaaggcgggcgtggtgggccccgagcttcacgagcagctgctgtctgccgagaaggccgtcaccggctacagagacccctactcgggcagcaccatctccctcttccaggccatgcagaagggcctggttctccggcagcacggcatccgcctgctggaggcccagatcgccacgggcggcatcatcgaccccgtgcacagccaccgcgtgcctgtggacgtggcctaccagcgcggctacttcagtgaggagatgaaccgcgtcctggcggaccccagcgacgacaccaagggcttctttgaccccaacacgcatgagaacctcacgtacaggcagctgctggagcggtgcgtggaggaccccgagacgggcttgcgccttctgccactgaaaggggcggagaaggctgaggtggtggagaccacgcaggtgtacactgaggaggagacaagaagggcatttgaagagacacagatcgacattcccggcggcggcagccacggcggctccaccatgtccctgtgggaggtgatgcagtcggacctgatccccgaggagcagcgggcccagctgatggctgacttccaggccggccgggtgaccaaggaacgcatgatcatcatcatcatcgagatcattgagaagacagagatcatccgccagcagggtctggcctcctacgactacgtgcgccgccgcctcacggctgaggacctgttcgaggctcggatcatctctctcgagacctacaacctgctccgggagggcaccaggagcctccgtgaggctctcgaggcggagtccgcctggtgctacctctatggcacgggctccgtggctggtgtctacctgcccggttccaggcagacactgagcatctaccaggctctcaagaaagggctgctgagtgccgaggtggcccgcctgctgctggaggcacaggcagccacaggcttcctgctggacccggtgaagggggagcggctgactgtggatgaggctgtgcggaagggcctcgtggggcccgagctgcacgaccgcctgctctcggctgagcgggcggtcaccggctaccgtgacccctacaccgagcagaccatctcgctcttccaggccatgaagaaggagctgatccctactgaggaggccctgcggctgctggatgcccagctggccaccggcggcatcgtggacccccgcctgggcttccaccttcccctggaggtggcttaccagcgtggctacctcaacaaggacacgcacgaccagctgtcagagcccagcgaggtgcgcagctacgtggacccgtccaccgacgagcgcctcagctacacgcagctgctcaggcggtgccgtcgtgacgacggcaccggccagctgctcctgccactgtcggacgcccgcaagctgaccttccgtggcctgcggaagcagatcaccatggaggagctggtgcgctcgcaggtcatggacgaggccacggcgctgcagctgcgggagggcctgacctccatcgaggaggtcaccaagaacttgcagaagttcctggaaggcaccagctgcatcgctggtgtcttcgtggacgccaccaaggaacggctctcggtgtaccaggccatgaagaagggcatcatccgccccggcacagcctttgagctcctggaggcgcaggcggccaccggttacgtcatcgaccccatcaagggactgaagctgacggtggaggaggctgtgcgtatgggcattgtgggccccgagttcaaggacaagctgctgtcggccgagcgcgccgtcactgggtacaaggacccctactctgggaagctcatctccctcttccaggccatgaagaagggcctgatcctgaaggaccatggcatccgcctgctggaggcccagatcgccacgggcggcatcatcgaccctgaggagagccaccggctgcccgtggaggtggcctacaagcgcggcctcttcgatgaggagatgaacgagatcctgaccgacccctcggacgacaccaagggcttctttgaccctaacacggaggagaacctcacctacctgcagctgatggagcgttgtatcactgacccccagacgggcctgtgtctcttgccgctgaaggagaagaagcgggagcggaagacgtcctccaagtcctccgtgcgcaagcgccgagtggtcatcgtggaccccgagacgggcaaggagatgtcagtgtacgaggcctaccgcaagggcctgattgaccaccagacgtacctggagctgtccgagcaggagtgcgagtgggaggagatcaccatctcctcctcggacggcgtggtcaagtccatgatcatcgaccgccgctccgggcgccagtacgacatcgatgatgccatcgccaagaacctcatcgaccgctcggcactggaccagtaccgcgccggcacgctctccatcaccgagttcgccgacatgctctcgggcaacgccggtggtttccgctcccgttcctcctcggtgggatcctcctcctcctaccccatcagccccgccgtctccaggacccagctggcctcctggtcagaccccactgaggagacgggccccgtggctggcatcctggacacggagacgctggagaaggtgtccatcaccgaggccatgcaccggaacctggtggataacatcacggggcagcggctgctggaggcgcaggcctgcaccgggggcatcatcgaccccagcaccggtgagcgcttccctgtcaccgacgccgtcaacaagggcctggtggacaagatcatggtggaccgcatcaacctggcccagaaggccttctgcggcttcgaggacccacgcaccaagaccaagatgtcggccgcccaggccctgaagaagggctggctctactacgaggccggccagcgcttcctggaggtgcagtacctgaccggcggcttgatcgagcccgacacgccgggccgcgtgcccctggacgaggccctgcagcgcggcacggtggacgcccgcaccgcacagaagctgcgtgacgtgggcgcctactccaagtacctcacctgccctaagaccaagctcaagatctcctataaggacgcgctggaccgcagcatggtggaggagggcacggggctgcggctgctggaggctgccgcgcagtccaccaagggctactacagcccctacagcgtcagcggctccggctctaccgctggctcccgcaccggctcgcgcaccggctcccgggccggctcccgccgcggcagctttgacgccaccggctccggcttctccatgaccttctcttcatcctcctactcctcctcgggctacggccgccgctacgcctcggggtcctcggcctccctggggggccctgagtctgccgtggcctgaggctgcctgcgcccaccccgctctgcatgcggcccagcccggctcccaccgaggcgcgggggccgttttcaacgcttaaaggtgtcttcctcccaagtggtgcctaaagtttaaccaaaaagaccagactaatatattaatatatatctgctgtccagacagcctgtatcttgggggacagggctggcccagccctgctggccgcctcaccccctcgggtctcctcactcccttctacctgccactcacacagccaggtgccttggagggtcccaagctgggccccagcccaccctcctgtcttcccagggtagcccgcctgccagtcctagctgcacagggcagctgggcccaaccctgtctgtagagggccctggtgtttctagcactggcctgcacggtgggccttgctggggacggggggccccagtcagcctctctcccagtctacccagagaagccccttccccatgggaagacgaggccctcgggcccagcccccacagtgctgtctgatctgtgctttccagctcaccccccacactcactcctgagacccctggcctccggcgtcagcctccagcctctgttcccctagtaagtgccttccatgtcggcctctaaccccaggccccgaggacccagacccagtggggaggcggacgttccagccggcatggctgggaactgcagacctgtcctcctggtgggtccaggggcccctccagcttgtggagccccacactggggtgccgcctgcccgtctctctcccatggagccccagccccctttgggcccagggacaccagccaggctctgtgctgaccctcctgttgcacccagccctggtctcagcagcgaccacccctgcctccaccctctgagctttgcatgttccactaaccccgggcgggtggcaggtggaggtgtcaggctgctggcgcctctgcaagggcagaacactaacctgaccgtgggcggggccttgcggtatccgcccccaataaaagcaattccaacctt

SEQ ID NO: 166712 - DNA, 14751 bp, Homo sapiens
  Payload ID: 12821
  Gene Symbol: PLEC
  Gene Name: plectin
  Uniprot ID: Q15149
  ENST ID: ENST00000354958
  CDS Start-End: 150-13727
attgatcagctgaagccccgcccctggccggcaagccctgccccggacctccgggctcctcccccggctgcggcgctggcctgggcagtgcggtgcggggctggactctgcctggtggtggcacagccgccctcagccccggcgcagacatggacccctcgcgagccatccagaacgagatcagctccctcaaagatgagcgggatcgtgtgcagaagaaaaccttcaccaagtgggtcaacaagcacctcatcaaggcccagaggcacatcagtgacctgtatgaagacctccgcgatggccacaacctcatctccctgctggaggtcctctcgggggacagcctgccccgggagaaggggaggatgcgtttccacaagctgcagaatgtccagattgccctggactacctccggcaccgccaggtgaagctggtgaacatcaggaatgatgacatcgctgacggcaaccccaagctgacccttggcctcatctggacaatcattctgcacttccagatctcagatatccaggtgagtgggcagtcggaggacatgacggccaaggagaagctgctgctgtggtcgcagcgaatggtggaggggtaccagggcctgcgatgcgacaacttcacctccagctggagagacggccgcctcttcaatgccatcatccaccggcacaagcccctgctcatcgacatgaacaaggtgtaccggcagaccaacctggagaacctggaccaggccttctctgtggcggagcgggacctgggagtgacgcggctcctggaccctgaggacgtggatgtccctcagcccgacgagaagtccatcatcacctacgtctcgtcgctgtatgacgccatgccccgcgtgccggacgtgcaggatggggtgagggccaacgagctgcagctgcgctggcaggagtaccgggagctggtgctgctgctgcttcagtggatgcgacaccacacggccgcctttgaggaacgcaggttcccctccagcttcgaggagattgagatcctgtggtctcagttcctgaagtttaaggagatggagctaccagccaaggaggccgacaagaacaggtccaagggcatctaccaatccctggagggagcggtgcaagcaggccagctcaaggtgccccctggctaccacccgctggatgtggagaaggagtggggcaagctgcacgtggccatcctggagcgggagaagcagctccgcagcgagtttgagaggctggagtgtcttcagcgcatcgtgaccaagctgcagatggaggcggggctgtgtgaggagcagctgaaccaggccgacgccctgctgcagtcggatgtccggctgctggctgcaggcaaagtgccacagcgggcgggggaggtggaacgggacttggacaaggcggatagcatgatccggctgctcttcaacgacgtgcagaccctcaaggatggacggcacccgcagggcgagcagatgtaccgcagggtgtaccgtctgcacgagcgcctggtagccatccgcaccgagtacaacctacggctgaaggcaggcgtggcggcccctgcaacccaggtggcccaggtgactctgcagagtgtgcagaggcgccccgagctggaggactccactctgcgctacctgcaggacctgctggcctgggtggaggagaaccagcaccgtgtggatggcgctgagtggggtgtggacctgcccagcgtggaggcgcagctgggcagccaccgaggcctgcaccagtccatcgaagaattccgggccaagatcgagcgggcacggagtgacgagggccagctctcccccgccacccggggtgcctaccgtgactgcctgggtcggctggacctgcagtacgccaagctgctgaactcctccaaggcccgcctcaggtccctggagagcttgcacagctttgtggcagccgccactaaggagctaatgtggctgaatgagaaggaggaggaggaggtgggcttcgactggagcgaccgcaacaccaacatgaccgccaagaaggagagctactcggcgctgatgcgggagctggagctgaaggagaagaagatcaaggagctccaaaatgctggggaccggctgctgcgggaggaccacccggcccggcccacggtggagtccttccaggcggccctgcagacgcagtggagctggatgctacagctgtgctgctgtatcgaggcacacctgaaggagaacgctgcctactttcagttcttctcagatgtgcgggaggccgaggggcagttgcagaagctgcaggaggcactgcgtaggaaatacagttgtgatcgctccgccaccgtcacccggctggaggacctgctgcaggatgcccaggacgagaaggaacagctgaacgagtacaagggccacctctcaggcctggccaagcgggccaaggccgtcgtgcagctgaagccccgccacccagcccaccccatgcggggccgcctgcccctgctggccgtgtgcgactataagcaggtggaggtgactgtgcacaagggtgacgagtgccagctggtgggccctgcacagccgtcccactggaaggtgctcagcagctccggcagcgaggccgccgtgccctccgtgtgcttcctggtgcccccgcccaaccaggaggcccaggaggccgtcaccaggctggaggcccagcaccaggccctggtcacgctgtggcaccagttgcacgtggacatgaagagccttctggcctggcagagccttcgccgcgacgtgcagctcatccgctcctggtccctggccacgttccgcaccctgaagccagaggagcagcgccaagccctgcacagcctggagctgcactaccaggccttcctgcgggacagccaggacgcgggcggcttcggacccgaggaccggctgatggctgagcgcgagtacggctcctgcagccaccactaccagcagctgctgcagagcctggaacagggtgcacaggaagagtctcgctgccagcgctgcatctccgagctcaaagacatccggctgcagctggaggcctgtgagacgcgcaccgtgcaccgcctgcggctgccgctggacaaagagccggcacgggagtgtgcccagcgcatcgccgagcagcagaaggcacaggcagaggtggaggggctgggcaagggggtcgcccggctctctgccgaggccgagaaggtcttggccctaccagagccatcgcctgcggcccccacgctgcgctcggagctggagctgacgctgggcaagctggagcaggtccgcagcctgtctgccatctacctggagaagctcaagaccatcagcctggtgatccgcggcacgcagggggccgaggaggtgctcagggcccacgaggagcagctcaaggaggcccaggccgtgccggccaccctcccggagctcgaggccaccaaggcctctctgaagaagctgcgggcccaggccgaggcacagcagcccacgttcgacgccctgcgggatgagctgcggggggcacaggaggtgggggagcgactgcagcagcggcacggggagcgggacgtggaggtggagcgctggcgggagcgggtcgcccagttgcttgagcgctggcaggctgtgctggcccagaccgacgtgcggcagcgcgagctcgagcaactgggccgccagctgcgttactaccgcgagagtgcagaccccttgggcgcctggctgcaggacgccaggcggcggcaggagcagatccaggccatgccgctggccgacagccaggctgtgcgggagcagctgcggcaggagcaggccctgctggaggagatcgagcgccacggcgagaaggtcgaggagtgccagaggtttgcgaaacagtacatcaacgccatcaaggactatgaactccagctggtgacgtacaaggcgcagcttgagccggtggcctccccggccaagaagcccaaggtccagtcgggatcagagagtgtcatccaggagtacgtggacctgcgtacgcactacagcgagctgaccacactgacgagccagtacatcaagttcatcagcgagactctgcggcgcatggaggaggaggagaggctggctgagcagcagcgggcagaggagcgcgagcggctggccgaggtggaggccgcgctggagaagcagcggcagctggccgaggcgcacgcccaggcaaaggcacaggcggagcgggaggcgaaggagctgcagcagcgcatgcaggaggaggtggtgcggcgggaggaggcggcggtggacgcgcagcagcagaagcgcagcattcaggaggagctgcagcagctgcggcagagctcggaggcggagatccaggccaaggcccggcaggcagaggcggctgagcgcagccggctgcgcatcgaggaggagatccgcgtggtgcgcctgcagttggaggccaccgagcgccagcgtggcggggctgagggggagctgcaggcactgcgtgcacgggcggaggaggctgaggcacaaaagcgacaggcgcaggaggaggccgagcgcttgcggaggcaggtgcaggacgagagccagcgtaagcggcaggcggaggtggagctggcctcgcgcgtgaaggccgaggccgaggcggcgcgcgagaagcagcgggccctgcaggccctggaggagctgcggctgcaggcggaggaggcggagcggcgcctgcggcaggccgaggtggagcgagcgcggcaggtacaggtggccctggagacggcgcagcgcagtgcagaggcggagctgcagagcaaacgcgcctccttcgccgagaagacggcacagctggagcgctccctgcaggaggaacacgtggctgtggcacagctgcgggaggaggctgagcggcgggcacagcagcaggccgaggccgagcgggcgcgcgaggaggcagagcgggagctggagcgctggcagctcaaggccaacgaggcgctacggctgcggctgcaggcggaggaggtggcgcagcagaagagcctggcgcaggccgaggctgagaagcagaaggaggaggcggagcgcgaggcgcggcggcgcggcaaggcggaggagcaggccgtccggcagcgggagctggctgaacaagagctggagaagcagcggcagctggcggaaggcaccgcgcagcagcgcctggccgcggagcaggagttgatccggctgcgggccgagacggagcagggggagcagcagcggcagctgctggaggaggagctggcccggctgcagcgtgaggcggctgcagccacgcagaaacggcaggagctggaagccgagctggccaaggtgcgggccgagatggaggtgctgctggccagcaaggcgagggctgaggaggagtcgcgctccaccagcgagaagtccaagcagaggctggaggccgaggccggccggttccgcgagctggccgaggaggccgcccgcctgcgtgccctggcggaagaggccaagcggcagcggcagctggccgaggaagacgcggcgcggcagcgggccgaggcggagcgggtgcttgcggagaagctggccgccatcggcgaggccacgcggctcaagacggaggcggagatcgcgctcaaggagaaggaggcggagaacgagcgcctgcggcggctggcggaggacgaggccttccagcggcggcggctggaggagcaggccgcgcaacacaaggctgacatcgaggagcgcctggcccagctgcgcaaggcatcggacagcgagctggagcggcagaaggggctggtggaggacacgctgaggcagcggcggcaggtggaggaggagatcctggcgctgaaggcgagcttcgagaaggcggccgctggcaaggcggagctggagctggagctgggacgcatccgcagcaacgcggaggacacgctgcgcagcaaggagcaggccgagctggaggctgcgaggcagcggcagctggcggcggaggaggagcggcggcgccgtgaggctgaggagcgcgtgcagaagagcctggcggccgaggaggaggccgcacggcagcggaaggcggcgctggaggaagtcgagcggctgaaagccaaggtggaggaggcgcggcgcctgcgggagcgagcggagcaggagtcggcgcggcagctgcagctggcccaggaggccgcccagaagcggctgcaggcggaagagaaggcacacgccttcgcggtgcagcagaaggagcaggagctacagcagacgctgcagcaggagcagagcgtgctggaccagctgcgcggcgaggcggaggcggcccggcgggcggctgaggaggcggaggaggcccgggtgcaggcggagcgtgaggcggcgcagtcccggcggcaggtggaagaggccgagcggctgaagcagtcggcagaggagcaggcacaggcccgggctcaggcacaggcggctgcagagaagctgcgcaaggaggccgagcaagaggcggcgcggcgggcacaggcggagcaggcggccctgcggcagaagcaggcagctgacgcggagatggagaagcataagaaattcgccgagcagacgctgcggcagaaggcgcaggtggagcaggagctgacaacactgcggctgcagctggaggagaccgaccaccagaagaacctgctggacgaggagctgcagcggctgaaggcggaggccacggaggccgcacgccagcgcagccaggtggaggaggagctcttctcggtgcgcgtgcagatggaggagctgagcaagctcaaggcacgcatcgaggctgagaaccgcgcactcatcttgcgtgacaaggacaatacgcagcgcttcctgcaggaggaggctgagaagatgaagcaggtggcggaggaggccgcgcggctgagtgtggcggcccaagaggctgcgcgactgcggcagctggcagaggaggacctggcacagcagcgggccttggcagagaagatgctcaaggagaagatgcaggcggtgcaggaggccacgcgactcaaggctgaggcggaactgctgcagcagcagaaggagcttgcgcaggagcaggcgcggcggctgcaggaggacaaggagcagatggcgcagcagctggcggaggagacgcagggcttccagcggacgctggaggccgagcggcagcggcagctggagatgagcgctgaggctgagcgcctcaagctgcgtgtggccgagatgagccgagcccaggcccgcgctgaggaggacgcccagcgcttccggaagcaggcggaggagatcggtgagaagctgcaccgcacggagctcgccacccaggagaaggtgaccctggtgcagacactggagatccagcgacagcagagtgaccatgatgccgagcgcctgcgggaggccatcgctgagctggagcgtgagaaggagaagctccaacaggaggccaaactgctgcagctcaagtctgaggagatgcagacggtgcagcaggagcagctgctgcaggagacgcaggccctgcagcaaagcttcctctctgaaaaggacagcctgctacagcgggagcgcttcatcgagcaggagaaggccaagctggagcagctcttccaggacgaggtggccaaggcacagcagctgcgtgaggagcagcagcggcagcagcagcagatggagcaggaacggcagcggctggtggccagcatggaggaggcgcggcggcggcagcatgaggccgaggagggcgtgcggcgcaagcaggaggagctgcagcagctggagcagcagcggcggcagcaggaggagctgctggctgaggagaaccagaggctgcgtgagcagctgcagctcctggaggagcagcaccgggccgcgctggcgcactcagaggaggtcactgcctcgcaggtggctgccacaaagaccctgcccaatggccgggatgcacttgatggccccgcggcagaggcagagccggagcacagcttcgatggcctgcggcggaaggtgtcagctcagaggctgcaggaggccggcatcctgagtgcggaggagctgcagcggttggcgcagggccacaccacggtggacgagctcgcacggcgggaagacgtgcgccactacctgcagggccgcagcagtatcgcagggctgttgctgaaggccaccaatgagaagctgagtgtttacgccgccctgcagaggcagctgctgagtcccggcacggccctcatcctgctggaggcgcaggcggcctcaggcttcctgctggaccctgtgcggaaccggcggctgaccgtcaacgaggctgtgaaggagggtgtggtgggccccgagctgcaccacaagctgctgtcggccgagcgcgccgtcactggctacaaggacccctacactggccagcagatctctctcttccaagccatgcagaagggcctcatcgtccgggagcacggcatccgcctgctggaggcccagatcgccacgggcggcgttatcgaccccgtgcacagccaccgcgtgcccgtggacgtggcctaccggcgcggctacttcgacgaggagatgaaccgcgtcctggcggaccccagcgacgacaccaagggcttctttgaccccaacacgcacgagaacctcacgtacctgcagctactggagcgctgcgtggaggaccccgagacgggcctgtgccttctgccactcacggataaggctgccaagggcggggagctggtctacactgactccgaggcccgggacgtctttgagaaggccaccgtgtctgcgccgttcggcaagttccagggcaagacggtgaccatttgggagatcatcaactcggaatacttcacggcagagcagcggcgggacctgctgcggcagttccgcacgggccggatcacagtggagaagatcatcaagatcatcatcacggtggtggaggagcaggagcagaagggccggctttgctttgagggcctgcgcagcctggtgccagccgccgagctgctggagagcagggtcatcgaccgcgagctctaccagcagctgcagcgaggtgagcgctctgtgcgagacgtagccgaggtggacactgtgcggcgggctctccggggtgccaacgtcatcgcgggtgtatggctggaggaggcggggcagaagctgagtatctacaatgccctgaagaaagacctgctgccatccgacatggccgtggccctgttggaagcccaggccggcaccgggcacatcatcgaccccgccaccagcgcccggctgaccgtggacgaggcagtgcgtgctggcctggtgggccccgagtttcatgagaagctgctatcagccgagaaggctgtgacagggtacagggacccctacacagggcagagcgtctccctgttccaggccctgaagaagggcctcattccccgggagcagggcctgcgcctgttggacgcccagctgtccacgggcggcatcgtggaccccagcaagagccaccgcgtgcccctggatgtcgcctgcgcccgaggctgcctggatgaggagaccagcagggccctgtcggcaccaagggccgacgccaaggcctacagtgaccccagcacaggggagccggccacctacggcgagctccagcagcggtgccggcccgaccagctgaccgggctgagcctgctgccgctctcagaaaaggctgctcgggcccggcaggaggagctctactcagagctgcaggcccgtgagacctttgaaaagaccccggttgaggtccccgtgggtggcttcaagggcaggacggtgacggtgtgggagctcatcagctctgagtacttcactgcggagcagcggcaggagctgttgcgtcagttccgcacgggcaaggtcaccgtggagaaggtcatcaagattctcattaccatcgtggaggaggtggagaccctgcggcaggagaggctgtccttcagcggcctccgtgcccctgtgccagccagcgagctcctggcttccggggtcctcagcagagcccagtttgagcagctcaaggacggcaagacgacggtcaaggacctttcggagctgggctccgtgcggacgctgctgcagggcagtggctgcctcgccggcatctacctggaggacaccaaggagaaggtgtccatctacgaggccatgcgccggggcctgctgagagccacaacggctgcgctcctgctggaggcgcaggcggccactggcttcctggtggaccccgtgcggaaccagcgcctgtatgtccacgaggccgtgaaggcgggcgtggtgggccccgagcttcacgagcagctgctgtctgccgagaaggccgtcaccggctacagagacccctactcgggcagcaccatctccctcttccaggccatgcagaagggcctggttctccggcagcacggcatccgcctgctggaggcccagatcgccacgggcggcatcatcgaccccgtgcacagccaccgcgtgcctgtggacgtggcctaccagcgcggctacttcagtgaggagatgaaccgcgtcctggcggaccccagcgacgacaccaagggcttctttgaccccaacacgcatgagaacctcacgtacaggcagctgctggagcggtgcgtggaggaccccgagacgggcttgcgccttctgccactgaaaggggcggagaaggctgaggtggtggagaccacgcaggtgtacactgaggaggagacaagaagggcatttgaagagacacagatcgacattcccggcggcggcagccacggcggctccaccatgtccctgtgggaggtgatgcagtcggacctgatccccgaggagcagcgggcccagctgatggctgacttccaggccggccgggtgaccaaggaacgcatgatcatcatcatcatcgagatcattgagaagacagagatcatccgccagcagggtctggcctcctacgactacgtgcgccgccgcctcacggctgaggacctgttcgaggctcggatcatctctctcgagacctacaacctgctccgggagggcaccaggagcctccgtgaggctctcgaggcggagtccgcctggtgctacctctatggcacgggctccgtggctggtgtctacctgcccggttccaggcagacactgagcatctaccaggctctcaagaaagggctgctgagtgccgaggtggcccgcctgctgctggaggcacaggcagccacaggcttcctgctggacccggtgaagggggagcggctgactgtggatgaggctgtgcggaagggcctcgtggggcccgagctgcacgaccgcctgctctcggctgagcgggcggtcaccggctaccgtgacccctacaccgagcagaccatctcgctcttccaggccatgaagaaggagctgatccctactgaggaggccctgcggctgctggatgcccagctggccaccggcggcatcgtggacccccgcctgggcttccaccttcccctggaggtggcttaccagcgtggctacctcaacaaggacacgcacgaccagctgtcagagcccagcgaggtgcgcagctacgtggacccgtccaccgacgagcgcctcagctacacgcagctgctcaggcggtgccgtcgtgacgacggcaccggccagctgctcctgccactgtcggacgcccgcaagctgaccttccgtggcctgcggaagcagatcaccatggaggagctggtgcgctcgcaggtcatggacgaggccacggcgctgcagctgcgggagggcctgacctccatcgaggaggtcaccaagaacttgcagaagttcctggaaggcaccagctgcatcgctggtgtcttcgtggacgccaccaaggaacggctctcggtgtaccaggccatgaagaagggcatcatccgccccggcacagcctttgagctcctggaggcgcaggcggccaccggttacgtcatcgaccccatcaagggactgaagctgacggtggaggaggctgtgcgtatgggcattgtgggccccgagttcaaggacaagctgctgtcggccgagcgcgccgtcactgggtacaaggacccctactctgggaagctcatctccctcttccaggccatgaagaagggcctgatcctgaaggaccatggcatccgcctgctggaggcccagatcgccacgggcggcatcatcgaccctgaggagagccaccggctgcccgtggaggtggcctacaagcgcggcctcttcgatgaggagatgaacgagatcctgaccgacccctcggacgacaccaagggcttctttgaccctaacacggaggagaacctcacctacctgcagctgatggagcgttgtatcactgacccccagacgggcctgtgtctcttgccgctgaaggagaagaagcgggagcggaagacgtcctccaagtcctccgtgcgcaagcgccgagtggtcatcgtggaccccgagacgggcaaggagatgtcagtgtacgaggcctaccgcaagggcctgattgaccaccagacgtacctggagctgtccgagcaggagtgcgagtgggaggagatcaccatctcctcctcggacggcgtggtcaagtccatgatcatcgaccgccgctccgggcgccagtacgacatcgatgatgccatcgccaagaacctcatcgaccgctcggcactggaccagtaccgcgccggcacgctctccatcaccgagttcgccgacatgctctcgggcaacgccggtggtttccgctcccgttcctcctcggtgggatcctcctcctcctaccccatcagccccgccgtctccaggacccagctggcctcctggtcagaccccactgaggagacgggccccgtggctggcatcctggacacggagacgctggagaaggtgtccatcaccgaggccatgcaccggaacctggtggataacatcacggggcagcggctgctggaggcgcaggcctgcaccgggggcatcatcgaccccagcaccggtgagcgcttccctgtcaccgacgccgtcaacaagggcctggtggacaagatcatggtggaccgcatcaacctggcccagaaggccttctgcggcttcgaggacccacgcaccaagaccaagatgtcggccgcccaggccctgaagaagggctggctctactacgaggccggccagcgcttcctggaggtgcagtacctgaccggcggcttgatcgagcccgacacgccgggccgcgtgcccctggacgaggccctgcagcgcggcacggtggacgcccgcaccgcacagaagctgcgtgacgtgggcgcctactccaagtacctcacctgccctaagaccaagctcaagatctcctataaggacgcgctggaccgcagcatggtggaggagggcacggggctgcggctgctggaggctgccgcgcagtccaccaagggctactacagcccctacagcgtcagcggctccggctctaccgctggctcccgcaccggctcgcgcaccggctcccgggccggctcccgccgcggcagctttgacgccaccggctccggcttctccatgaccttctcttcatcctcctactcctcctcgggctacggccgccgctacgcctcggggtcctcggcctccctggggggccctgagtctgccgtggcctgaggctgcctgcgcccaccccgctctgcatgcggcccagcccggctcccaccgaggcgcgggggccgttttcaacgcttaaaggtgtcttcctcccaagtggtgcctaaagtttaaccaaaaagaccagactaatatattaatatatatctgctgtccagacagcctgtatcttgggggacagggctggcccagccctgctggccgcctcaccccctcgggtctcctcactcccttctacctgccactcacacagccaggtgccttggagggtcccaagctgggccccagcccaccctcctgtcttcccagggtagcccgcctgccagtcctagctgcacagggcagctgggcccaaccctgtctgtagagggccctggtgtttctagcactggcctgcacggtgggccttgctggggacggggggccccagtcagcctctctcccagtctacccagagaagccccttccccatgggaagacgaggccctcgggcccagcccccacagtgctgtctgatctgtgctttccagctcaccccccacactcactcctgagacccctggcctccggcgtcagcctccagcctctgttcccctagtaagtgccttccatgtcggcctctaaccccaggccccgaggacccagacccagtggggaggcggacgttccagccggcatggctgggaactgcagacctgtcctcctggtgggtccaggggcccctccagcttgtggagccccacactggggtgccgcctgcccgtctctctcccatggagccccagccccctttgggcccagggacaccagccaggctctgtgctgaccctcctgttgcacccagccctggtctcagcagcgaccacccctgcctccaccctctgagctttgcatgttccactaaccccgggcgggtggcaggtggaggtgtcaggctgctggcgcctctgcaagggcagaacactaacctgaccgtgggcggggccttgcggtatccgcccccaataaaagcaattccaacctt

SEQ ID NO: 166713 - DNA, 14683 bp, Homo sapiens
  Payload ID: 12821
  Gene Symbol: PLEC
  Gene Name: plectin
  Uniprot ID: Q15149
  ENST ID: ENST00000356346
  CDS Start-End: 58-13659
agagtggccgccgggtgctggaggctccgctgcaccccgcgccccgcgcccgccggcatggccggcccgctgcccgacgagcaggacttcatccaggcctacgaggaggtgcgcgagaagtacaaagatgagcgggatcgtgtgcagaagaaaaccttcaccaagtgggtcaacaagcacctcatcaaggcccagaggcacatcagtgacctgtatgaagacctccgcgatggccacaacctcatctccctgctggaggtcctctcgggggacagcctgccccgggagaaggggaggatgcgtttccacaagctgcagaatgtccagattgccctggactacctccggcaccgccaggtgaagctggtgaacatcaggaatgatgacatcgctgacggcaaccccaagctgacccttggcctcatctggacaatcattctgcacttccagatctcagatatccaggtgagtgggcagtcggaggacatgacggccaaggagaagctgctgctgtggtcgcagcgaatggtggaggggtaccagggcctgcgatgcgacaacttcacctccagctggagagacggccgcctcttcaatgccatcatccaccggcacaagcccctgctcatcgacatgaacaaggtgtaccggcagaccaacctggagaacctggaccaggccttctctgtggcggagcgggacctgggagtgacgcggctcctggaccctgaggacgtggatgtccctcagcccgacgagaagtccatcatcacctacgtctcgtcgctgtatgacgccatgccccgcgtgccggacgtgcaggatggggtgagggccaacgagctgcagctgcgctggcaggagtaccgggagctggtgctgctgctgcttcagtggatgcgacaccacacggccgcctttgaggaacgcaggttcccctccagcttcgaggagattgagatcctgtggtctcagttcctgaagtttaaggagatggagctaccagccaaggaggccgacaagaacaggtccaagggcatctaccaatccctggagggagcggtgcaagcaggccagctcaaggtgccccctggctaccacccgctggatgtggagaaggagtggggcaagctgcacgtggccatcctggagcgggagaagcagctccgcagcgagtttgagaggctggagtgtcttcagcgcatcgtgaccaagctgcagatggaggcggggctgtgtgaggagcagctgaaccaggccgacgccctgctgcagtcggatgtccggctgctggctgcaggcaaagtgccacagcgggcgggggaggtggaacgggacttggacaaggcggatagcatgatccggctgctcttcaacgacgtgcagaccctcaaggatggacggcacccgcagggcgagcagatgtaccgcagggtgtaccgtctgcacgagcgcctggtagccatccgcaccgagtacaacctacggctgaaggcaggcgtggcggcccctgcaacccaggtggcccaggtgactctgcagagtgtgcagaggcgccccgagctggaggactccactctgcgctacctgcaggacctgctggcctgggtggaggagaaccagcaccgtgtggatggcgctgagtggggtgtggacctgcccagcgtggaggcgcagctgggcagccaccgaggcctgcaccagtccatcgaagaattccgggccaagatcgagcgggcacggagtgacgagggccagctctcccccgccacccggggtgcctaccgtgactgcctgggtcggctggacctgcagtacgccaagctgctgaactcctccaaggcccgcctcaggtccctggagagcttgcacagctttgtggcagccgccactaaggagctaatgtggctgaatgagaaggaggaggaggaggtgggcttcgactggagcgaccgcaacaccaacatgaccgccaagaaggagagctactcggcgctgatgcgggagctggagctgaaggagaagaagatcaaggagctccaaaatgctggggaccggctgctgcgggaggaccacccggcccggcccacggtggagtccttccaggcggccctgcagacgcagtggagctggatgctacagctgtgctgctgtatcgaggcacacctgaaggagaacgctgcctactttcagttcttctcagatgtgcgggaggccgaggggcagttgcagaagctgcaggaggcactgcgtaggaaatacagttgtgatcgctccgccaccgtcacccggctggaggacctgctgcaggatgcccaggacgagaaggaacagctgaacgagtacaagggccacctctcaggcctggccaagcgggccaaggccgtcgtgcagctgaagccccgccacccagcccaccccatgcggggccgcctgcccctgctggccgtgtgcgactataagcaggtggaggtgactgtgcacaagggtgacgagtgccagctggtgggccctgcacagccgtcccactggaaggtgctcagcagctccggcagcgaggccgccgtgccctccgtgtgcttcctggtgcccccgcccaaccaggaggcccaggaggccgtcaccaggctggaggcccagcaccaggccctggtcacgctgtggcaccagttgcacgtggacatgaagagccttctggcctggcagagccttcgccgcgacgtgcagctcatccgctcctggtccctggccacgttccgcaccctgaagccagaggagcagcgccaagccctgcacagcctggagctgcactaccaggccttcctgcgggacagccaggacgcgggcggcttcggacccgaggaccggctgatggctgagcgcgagtacggctcctgcagccaccactaccagcagctgctgcagagcctggaacagggtgcacaggaagagtctcgctgccagcgctgcatctccgagctcaaagacatccggctgcagctggaggcctgtgagacgcgcaccgtgcaccgcctgcggctgccgctggacaaagagccggcacgggagtgtgcccagcgcatcgccgagcagcagaaggcacaggcagaggtggaggggctgggcaagggggtcgcccggctctctgccgaggccgagaaggtcttggccctaccagagccatcgcctgcggcccccacgctgcgctcggagctggagctgacgctgggcaagctggagcaggtccgcagcctgtctgccatctacctggagaagctcaagaccatcagcctggtgatccgcggcacgcagggggccgaggaggtgctcagggcccacgaggagcagctcaaggaggcccaggccgtgccggccaccctcccggagctcgaggccaccaaggcctctctgaagaagctgcgggcccaggccgaggcacagcagcccacgttcgacgccctgcgggatgagctgcggggggcacaggaggtgggggagcgactgcagcagcggcacggggagcgggacgtggaggtggagcgctggcgggagcgggtcgcccagttgcttgagcgctggcaggctgtgctggcccagaccgacgtgcggcagcgcgagctcgagcaactgggccgccagctgcgttactaccgcgagagtgcagaccccttgggcgcctggctgcaggacgccaggcggcggcaggagcagatccaggccatgccgctggccgacagccaggctgtgcgggagcagctgcggcaggagcaggccctgctggaggagatcgagcgccacggcgagaaggtcgaggagtgccagaggtttgcgaaacagtacatcaacgccatcaaggactatgaactccagctggtgacgtacaaggcgcagcttgagccggtggcctccccggccaagaagcccaaggtccagtcgggatcagagagtgtcatccaggagtacgtggacctgcgtacgcactacagcgagctgaccacactgacgagccagtacatcaagttcatcagcgagactctgcggcgcatggaggaggaggagaggctggctgagcagcagcgggcagaggagcgcgagcggctggccgaggtggaggccgcgctggagaagcagcggcagctggccgaggcgcacgcccaggcaaaggcacaggcggagcgggaggcgaaggagctgcagcagcgcatgcaggaggaggtggtgcggcgggaggaggcggcggtggacgcgcagcagcagaagcgcagcattcaggaggagctgcagcagctgcggcagagctcggaggcggagatccaggccaaggcccggcaggcagaggcggctgagcgcagccggctgcgcatcgaggaggagatccgcgtggtgcgcctgcagttggaggccaccgagcgccagcgtggcggggctgagggggagctgcaggcactgcgtgcacgggcggaggaggctgaggcacaaaagcgacaggcgcaggaggaggccgagcgcttgcggaggcaggtgcaggacgagagccagcgtaagcggcaggcggaggtggagctggcctcgcgcgtgaaggccgaggccgaggcggcgcgcgagaagcagcgggccctgcaggccctggaggagctgcggctgcaggcggaggaggcggagcggcgcctgcggcaggccgaggtggagcgagcgcggcaggtacaggtggccctggagacggcgcagcgcagtgcagaggcggagctgcagagcaaacgcgcctccttcgccgagaagacggcacagctggagcgctccctgcaggaggaacacgtggctgtggcacagctgcgggaggaggctgagcggcgggcacagcagcaggccgaggccgagcgggcgcgcgaggaggcagagcgggagctggagcgctggcagctcaaggccaacgaggcgctacggctgcggctgcaggcggaggaggtggcgcagcagaagagcctggcgcaggccgaggctgagaagcagaaggaggaggcggagcgcgaggcgcggcggcgcggcaaggcggaggagcaggccgtccggcagcgggagctggctgaacaagagctggagaagcagcggcagctggcggaaggcaccgcgcagcagcgcctggccgcggagcaggagttgatccggctgcgggccgagacggagcagggggagcagcagcggcagctgctggaggaggagctggcccggctgcagcgtgaggcggctgcagccacgcagaaacggcaggagctggaagccgagctggccaaggtgcgggccgagatggaggtgctgctggccagcaaggcgagggctgaggaggagtcgcgctccaccagcgagaagtccaagcagaggctggaggccgaggccggccggttccgcgagctggccgaggaggccgcccgcctgcgtgccctggcggaagaggccaagcggcagcggcagctggccgaggaagacgcggcgcggcagcgggccgaggcggagcgggtgcttgcggagaagctggccgccatcggcgaggccacgcggctcaagacggaggcggagatcgcgctcaaggagaaggaggcggagaacgagcgcctgcggcggctggcggaggacgaggccttccagcggcggcggctggaggagcaggccgcgcaacacaaggctgacatcgaggagcgcctggcccagctgcgcaaggcatcggacagcgagctggagcggcagaaggggctggtggaggacacgctgaggcagcggcggcaggtggaggaggagatcctggcgctgaaggcgagcttcgagaaggcggccgctggcaaggcggagctggagctggagctgggacgcatccgcagcaacgcggaggacacgctgcgcagcaaggagcaggccgagctggaggctgcgaggcagcggcagctggcggcggaggaggagcggcggcgccgtgaggctgaggagcgcgtgcagaagagcctggcggccgaggaggaggccgcacggcagcggaaggcggcgctggaggaagtcgagcggctgaaagccaaggtggaggaggcgcggcgcctgcgggagcgagcggagcaggagtcggcgcggcagctgcagctggcccaggaggccgcccagaagcggctgcaggcggaagagaaggcacacgccttcgcggtgcagcagaaggagcaggagctacagcagacgctgcagcaggagcagagcgtgctggaccagctgcgcggcgaggcggaggcggcccggcgggcggctgaggaggcggaggaggcccgggtgcaggcggagcgtgaggcggcgcagtcccggcggcaggtggaagaggccgagcggctgaagcagtcggcagaggagcaggcacaggcccgggctcaggcacaggcggctgcagagaagctgcgcaaggaggccgagcaagaggcggcgcggcgggcacaggcggagcaggcggccctgcggcagaagcaggcagctgacgcggagatggagaagcataagaaattcgccgagcagacgctgcggcagaaggcgcaggtggagcaggagctgacaacactgcggctgcagctggaggagaccgaccaccagaagaacctgctggacgaggagctgcagcggctgaaggcggaggccacggaggccgcacgccagcgcagccaggtggaggaggagctcttctcggtgcgcgtgcagatggaggagctgagcaagctcaaggcacgcatcgaggctgagaaccgcgcactcatcttgcgtgacaaggacaatacgcagcgcttcctgcaggaggaggctgagaagatgaagcaggtggcggaggaggccgcgcggctgagtgtggcggcccaagaggctgcgcgactgcggcagctggcagaggaggacctggcacagcagcgggccttggcagagaagatgctcaaggagaagatgcaggcggtgcaggaggccacgcgactcaaggctgaggcggaactgctgcagcagcagaaggagcttgcgcaggagcaggcgcggcggctgcaggaggacaaggagcagatggcgcagcagctggcggaggagacgcagggcttccagcggacgctggaggccgagcggcagcggcagctggagatgagcgctgaggctgagcgcctcaagctgcgtgtggccgagatgagccgagcccaggcccgcgctgaggaggacgcccagcgcttccggaagcaggcggaggagatcggtgagaagctgcaccgcacggagctcgccacccaggagaaggtgaccctggtgcagacactggagatccagcgacagcagagtgaccatgatgccgagcgcctgcgggaggccatcgctgagctggagcgtgagaaggagaagctccaacaggaggccaaactgctgcagctcaagtctgaggagatgcagacggtgcagcaggagcagctgctgcaggagacgcaggccctgcagcaaagcttcctctctgaaaaggacagcctgctacagcgggagcgcttcatcgagcaggagaaggccaagctggagcagctcttccaggacgaggtggccaaggcacagcagctgcgtgaggagcagcagcggcagcagcagcagatggagcaggaacggcagcggctggtggccagcatggaggaggcgcggcggcggcagcatgaggccgaggagggcgtgcggcgcaagcaggaggagctgcagcagctggagcagcagcggcggcagcaggaggagctgctggctgaggagaaccagaggctgcgtgagcagctgcagctcctggaggagcagcaccgggccgcgctggcgcactcagaggaggtcactgcctcgcaggtggctgccacaaagaccctgcccaatggccgggatgcacttgatggccccgcggcagaggcagagccggagcacagcttcgatggcctgcggcggaaggtgtcagctcagaggctgcaggaggccggcatcctgagtgcggaggagctgcagcggttggcgcagggccacaccacggtggacgagctcgcacggcgggaagacgtgcgccactacctgcagggccgcagcagtatcgcagggctgttgctgaaggccaccaatgagaagctgagtgtttacgccgccctgcagaggcagctgctgagtcccggcacggccctcatcctgctggaggcgcaggcggcctcaggcttcctgctggaccctgtgcggaaccggcggctgaccgtcaacgaggctgtgaaggagggtgtggtgggccccgagctgcaccacaagctgctgtcggccgagcgcgccgtcactggctacaaggacccctacactggccagcagatctctctcttccaagccatgcagaagggcctcatcgtccgggagcacggcatccgcctgctggaggcccagatcgccacgggcggcgttatcgaccccgtgcacagccaccgcgtgcccgtggacgtggcctaccggcgcggctacttcgacgaggagatgaaccgcgtcctggcggaccccagcgacgacaccaagggcttctttgaccccaacacgcacgagaacctcacgtacctgcagctactggagcgctgcgtggaggaccccgagacgggcctgtgccttctgccactcacggataaggctgccaagggcggggagctggtctacactgactccgaggcccgggacgtctttgagaaggccaccgtgtctgcgccgttcggcaagttccagggcaagacggtgaccatttgggagatcatcaactcggaatacttcacggcagagcagcggcgggacctgctgcggcagttccgcacgggccggatcacagtggagaagatcatcaagatcatcatcacggtggtggaggagcaggagcagaagggccggctttgctttgagggcctgcgcagcctggtgccagccgccgagctgctggagagcagggtcatcgaccgcgagctctaccagcagctgcagcgaggtgagcgctctgtgcgagacgtagccgaggtggacactgtgcggcgggctctccggggtgccaacgtcatcgcgggtgtatggctggaggaggcggggcagaagctgagtatctacaatgccctgaagaaagacctgctgccatccgacatggccgtggccctgttggaagcccaggccggcaccgggcacatcatcgaccccgccaccagcgcccggctgaccgtggacgaggcagtgcgtgctggcctggtgggccccgagtttcatgagaagctgctatcagccgagaaggctgtgacagggtacagggacccctacacagggcagagcgtctccctgttccaggccctgaagaagggcctcattccccgggagcagggcctgcgcctgttggacgcccagctgtccacgggcggcatcgtggaccccagcaagagccaccgcgtgcccctggatgtcgcctgcgcccgaggctgcctggatgaggagaccagcagggccctgtcggcaccaagggccgacgccaaggcctacagtgaccccagcacaggggagccggccacctacggcgagctccagcagcggtgccggcccgaccagctgaccgggctgagcctgctgccgctctcagaaaaggctgctcgggcccggcaggaggagctctactcagagctgcaggcccgtgagacctttgaaaagaccccggttgaggtccccgtgggtggcttcaagggcaggacggtgacggtgtgggagctcatcagctctgagtacttcactgcggagcagcggcaggagctgttgcgtcagttccgcacgggcaaggtcaccgtggagaaggtcatcaagattctcattaccatcgtggaggaggtggagaccctgcggcaggagaggctgtccttcagcggcctccgtgcccctgtgccagccagcgagctcctggcttccggggtcctcagcagagcccagtttgagcagctcaaggacggcaagacgacggtcaaggacctttcggagctgggctccgtgcggacgctgctgcagggcagtggctgcctcgccggcatctacctggaggacaccaaggagaaggtgtccatctacgaggccatgcgccggggcctgctgagagccacaacggctgcgctcctgctggaggcgcaggcggccactggcttcctggtggaccccgtgcggaaccagcgcctgtatgtccacgaggccgtgaaggcgggcgtggtgggccccgagcttcacgagcagctgctgtctgccgagaaggccgtcaccggctacagagacccctactcgggcagcaccatctccctcttccaggccatgcagaagggcctggttctccggcagcacggcatccgcctgctggaggcccagatcgccacgggcggcatcatcgaccccgtgcacagccaccgcgtgcctgtggacgtggcctaccagcgcggctacttcagtgaggagatgaaccgcgtcctggcggaccccagcgacgacaccaagggcttctttgaccccaacacgcatgagaacctcacgtacaggcagctgctggagcggtgcgtggaggaccccgagacgggcttgcgccttctgccactgaaaggggcggagaaggctgaggtggtggagaccacgcaggtgtacactgaggaggagacaagaagggcatttgaagagacacagatcgacattcccggcggcggcagccacggcggctccaccatgtccctgtgggaggtgatgcagtcggacctgatccccgaggagcagcgggcccagctgatggctgacttccaggccggccgggtgaccaaggaacgcatgatcatcatcatcatcgagatcattgagaagacagagatcatccgccagcagggtctggcctcctacgactacgtgcgccgccgcctcacggctgaggacctgttcgaggctcggatcatctctctcgagacctacaacctgctccgggagggcaccaggagcctccgtgaggctctcgaggcggagtccgcctggtgctacctctatggcacgggctccgtggctggtgtctacctgcccggttccaggcagacactgagcatctaccaggctctcaagaaagggctgctgagtgccgaggtggcccgcctgctgctggaggcacaggcagccacaggcttcctgctggacccggtgaagggggagcggctgactgtggatgaggctgtgcggaagggcctcgtggggcccgagctgcacgaccgcctgctctcggctgagcgggcggtcaccggctaccgtgacccctacaccgagcagaccatctcgctcttccaggccatgaagaaggagctgatccctactgaggaggccctgcggctgctggatgcccagctggccaccggcggcatcgtggacccccgcctgggcttccaccttcccctggaggtggcttaccagcgtggctacctcaacaaggacacgcacgaccagctgtcagagcccagcgaggtgcgcagctacgtggacccgtccaccgacgagcgcctcagctacacgcagctgctcaggcggtgccgtcgtgacgacggcaccggccagctgctcctgccactgtcggacgcccgcaagctgaccttccgtggcctgcggaagcagatcaccatggaggagctggtgcgctcgcaggtcatggacgaggccacggcgctgcagctgcgggagggcctgacctccatcgaggaggtcaccaagaacttgcagaagttcctggaaggcaccagctgcatcgctggtgtcttcgtggacgccaccaaggaacggctctcggtgtaccaggccatgaagaagggcatcatccgccccggcacagcctttgagctcctggaggcgcaggcggccaccggttacgtcatcgaccccatcaagggactgaagctgacggtggaggaggctgtgcgtatgggcattgtgggccccgagttcaaggacaagctgctgtcggccgagcgcgccgtcactgggtacaaggacccctactctgggaagctcatctccctcttccaggccatgaagaagggcctgatcctgaaggaccatggcatccgcctgctggaggcccagatcgccacgggcggcatcatcgaccctgaggagagccaccggctgcccgtggaggtggcctacaagcgcggcctcttcgatgaggagatgaacgagatcctgaccgacccctcggacgacaccaagggcttctttgaccctaacacggaggagaacctcacctacctgcagctgatggagcgttgtatcactgacccccagacgggcctgtgtctcttgccgctgaaggagaagaagcgggagcggaagacgtcctccaagtcctccgtgcgcaagcgccgagtggtcatcgtggaccccgagacgggcaaggagatgtcagtgtacgaggcctaccgcaagggcctgattgaccaccagacgtacctggagctgtccgagcaggagtgcgagtgggaggagatcaccatctcctcctcggacggcgtggtcaagtccatgatcatcgaccgccgctccgggcgccagtacgacatcgatgatgccatcgccaagaacctcatcgaccgctcggcactggaccagtaccgcgccggcacgctctccatcaccgagttcgccgacatgctctcgggcaacgccggtggtttccgctcccgttcctcctcggtgggatcctcctcctcctaccccatcagccccgccgtctccaggacccagctggcctcctggtcagaccccactgaggagacgggccccgtggctggcatcctggacacggagacgctggagaaggtgtccatcaccgaggccatgcaccggaacctggtggataacatcacggggcagcggctgctggaggcgcaggcctgcaccgggggcatcatcgaccccagcaccggtgagcgcttccctgtcaccgacgccgtcaacaagggcctggtggacaagatcatggtggaccgcatcaacctggcccagaaggccttctgcggcttcgaggacccacgcaccaagaccaagatgtcggccgcccaggccctgaagaagggctggctctactacgaggccggccagcgcttcctggaggtgcagtacctgaccggcggcttgatcgagcccgacacgccgggccgcgtgcccctggacgaggccctgcagcgcggcacggtggacgcccgcaccgcacagaagctgcgtgacgtgggcgcctactccaagtacctcacctgccctaagaccaagctcaagatctcctataaggacgcgctggaccgcagcatggtggaggagggcacggggctgcggctgctggaggctgccgcgcagtccaccaagggctactacagcccctacagcgtcagcggctccggctctaccgctggctcccgcaccggctcgcgcaccggctcccgggccggctcccgccgcggcagctttgacgccaccggctccggcttctccatgaccttctcttcatcctcctactcctcctcgggctacggccgccgctacgcctcggggtcctcggcctccctggggggccctgagtctgccgtggcctgaggctgcctgcgcccaccccgctctgcatgcggcccagcccggctcccaccgaggcgcgggggccgttttcaacgcttaaaggtgtcttcctcccaagtggtgcctaaagtttaaccaaaaagaccagactaatatattaatatatatctgctgtccagacagcctgtatcttgggggacagggctggcccagccctgctggccgcctcaccccctcgggtctcctcactcccttctacctgccactcacacagccaggtgccttggagggtcccaagctgggccccagcccaccctcctgtcttcccagggtagcccgcctgccagtcctagctgcacagggcagctgggcccaaccctgtctgtagagggccctggtgtttctagcactggcctgcacggtgggccttgctggggacggggggccccagtcagcctctctcccagtctacccagagaagccccttccccatgggaagacgaggccctcgggcccagcccccacagtgctgtctgatctgtgctttccagctcaccccccacactcactcctgagacccctggcctccggcgtcagcctccagcctctgttcccctagtaagtgccttccatgtcggcctctaaccccaggccccgaggacccagacccagtggggaggcggacgttccagccggcatggctgggaactgcagacctgtcctcctggtgggtccaggggcccctccagcttgtggagccccacactggggtgccgcctgcccgtctctctcccatggagccccagccccctttgggcccagggacaccagccaggctctgtgctgaccctcctgttgcacccagccctggtctcagcagcgaccacccctgcctccaccctctgagctttgcatgttccactaaccccgggcgggtggcaggtggaggtgtcaggctgctggcgcctctgcaagggcagaacactaacctgaccgtgggcggggccttgcggtatccgcccccaataaaagcaattccaacctt

SEQ ID NO: 166714 - DNA, 14689 bp, Homo sapiens
  Payload ID: 12821
  Gene Symbol: PLEC
  Gene Name: plectin
  Uniprot ID: Q15149
  ENST ID: ENST00000357649
  CDS Start-End: 10-13665
gtggccggcatgtcgggggcggggggcgcctttgcctcgccgagggaggtcttgctggagcggccgtgctggctggacgggggctgcgagccggcccgcaggggctacctctaccagcagctgtgctgcgtagatgagcgggatcgtgtgcagaagaaaaccttcaccaagtgggtcaacaagcacctcatcaaggcccagaggcacatcagtgacctgtatgaagacctccgcgatggccacaacctcatctccctgctggaggtcctctcgggggacagcctgccccgggagaaggggaggatgcgtttccacaagctgcagaatgtccagattgccctggactacctccggcaccgccaggtgaagctggtgaacatcaggaatgatgacatcgctgacggcaaccccaagctgacccttggcctcatctggacaatcattctgcacttccagatctcagatatccaggtgagtgggcagtcggaggacatgacggccaaggagaagctgctgctgtggtcgcagcgaatggtggaggggtaccagggcctgcgatgcgacaacttcacctccagctggagagacggccgcctcttcaatgccatcatccaccggcacaagcccctgctcatcgacatgaacaaggtgtaccggcagaccaacctggagaacctggaccaggccttctctgtggcggagcgggacctgggagtgacgcggctcctggaccctgaggacgtggatgtccctcagcccgacgagaagtccatcatcacctacgtctcgtcgctgtatgacgccatgccccgcgtgccggacgtgcaggatggggtgagggccaacgagctgcagctgcgctggcaggagtaccgggagctggtgctgctgctgcttcagtggatgcgacaccacacggccgcctttgaggaacgcaggttcccctccagcttcgaggagattgagatcctgtggtctcagttcctgaagtttaaggagatggagctaccagccaaggaggccgacaagaacaggtccaagggcatctaccaatccctggagggagcggtgcaagcaggccagctcaaggtgccccctggctaccacccgctggatgtggagaaggagtggggcaagctgcacgtggccatcctggagcgggagaagcagctccgcagcgagtttgagaggctggagtgtcttcagcgcatcgtgaccaagctgcagatggaggcggggctgtgtgaggagcagctgaaccaggccgacgccctgctgcagtcggatgtccggctgctggctgcaggcaaagtgccacagcgggcgggggaggtggaacgggacttggacaaggcggatagcatgatccggctgctcttcaacgacgtgcagaccctcaaggatggacggcacccgcagggcgagcagatgtaccgcagggtgtaccgtctgcacgagcgcctggtagccatccgcaccgagtacaacctacggctgaaggcaggcgtggcggcccctgcaacccaggtggcccaggtgactctgcagagtgtgcagaggcgccccgagctggaggactccactctgcgctacctgcaggacctgctggcctgggtggaggagaaccagcaccgtgtggatggcgctgagtggggtgtggacctgcccagcgtggaggcgcagctgggcagccaccgaggcctgcaccagtccatcgaagaattccgggccaagatcgagcgggcacggagtgacgagggccagctctcccccgccacccggggtgcctaccgtgactgcctgggtcggctggacctgcagtacgccaagctgctgaactcctccaaggcccgcctcaggtccctggagagcttgcacagctttgtggcagccgccactaaggagctaatgtggctgaatgagaaggaggaggaggaggtgggcttcgactggagcgaccgcaacaccaacatgaccgccaagaaggagagctactcggcgctgatgcgggagctggagctgaaggagaagaagatcaaggagctccaaaatgctggggaccggctgctgcgggaggaccacccggcccggcccacggtggagtccttccaggcggccctgcagacgcagtggagctggatgctacagctgtgctgctgtatcgaggcacacctgaaggagaacgctgcctactttcagttcttctcagatgtgcgggaggccgaggggcagttgcagaagctgcaggaggcactgcgtaggaaatacagttgtgatcgctccgccaccgtcacccggctggaggacctgctgcaggatgcccaggacgagaaggaacagctgaacgagtacaagggccacctctcaggcctggccaagcgggccaaggccgtcgtgcagctgaagccccgccacccagcccaccccatgcggggccgcctgcccctgctggccgtgtgcgactataagcaggtggaggtgactgtgcacaagggtgacgagtgccagctggtgggccctgcacagccgtcccactggaaggtgctcagcagctccggcagcgaggccgccgtgccctccgtgtgcttcctggtgcccccgcccaaccaggaggcccaggaggccgtcaccaggctggaggcccagcaccaggccctggtcacgctgtggcaccagttgcacgtggacatgaagagccttctggcctggcagagccttcgccgcgacgtgcagctcatccgctcctggtccctggccacgttccgcaccctgaagccagaggagcagcgccaagccctgcacagcctggagctgcactaccaggccttcctgcgggacagccaggacgcgggcggcttcggacccgaggaccggctgatggctgagcgcgagtacggctcctgcagccaccactaccagcagctgctgcagagcctggaacagggtgcacaggaagagtctcgctgccagcgctgcatctccgagctcaaagacatccggctgcagctggaggcctgtgagacgcgcaccgtgcaccgcctgcggctgccgctggacaaagagccggcacgggagtgtgcccagcgcatcgccgagcagcagaaggcacaggcagaggtggaggggctgggcaagggggtcgcccggctctctgccgaggccgagaaggtcttggccctaccagagccatcgcctgcggcccccacgctgcgctcggagctggagctgacgctgggcaagctggagcaggtccgcagcctgtctgccatctacctggagaagctcaagaccatcagcctggtgatccgcggcacgcagggggccgaggaggtgctcagggcccacgaggagcagctcaaggaggcccaggccgtgccggccaccctcccggagctcgaggccaccaaggcctctctgaagaagctgcgggcccaggccgaggcacagcagcccacgttcgacgccctgcgggatgagctgcggggggcacaggaggtgggggagcgactgcagcagcggcacggggagcgggacgtggaggtggagcgctggcgggagcgggtcgcccagttgcttgagcgctggcaggctgtgctggcccagaccgacgtgcggcagcgcgagctcgagcaactgggccgccagctgcgttactaccgcgagagtgcagaccccttgggcgcctggctgcaggacgccaggcggcggcaggagcagatccaggccatgccgctggccgacagccaggctgtgcgggagcagctgcggcaggagcaggccctgctggaggagatcgagcgccacggcgagaaggtcgaggagtgccagaggtttgcgaaacagtacatcaacgccatcaaggactatgaactccagctggtgacgtacaaggcgcagcttgagccggtggcctccccggccaagaagcccaaggtccagtcgggatcagagagtgtcatccaggagtacgtggacctgcgtacgcactacagcgagctgaccacactgacgagccagtacatcaagttcatcagcgagactctgcggcgcatggaggaggaggagaggctggctgagcagcagcgggcagaggagcgcgagcggctggccgaggtggaggccgcgctggagaagcagcggcagctggccgaggcgcacgcccaggcaaaggcacaggcggagcgggaggcgaaggagctgcagcagcgcatgcaggaggaggtggtgcggcgggaggaggcggcggtggacgcgcagcagcagaagcgcagcattcaggaggagctgcagcagctgcggcagagctcggaggcggagatccaggccaaggcccggcaggcagaggcggctgagcgcagccggctgcgcatcgaggaggagatccgcgtggtgcgcctgcagttggaggccaccgagcgccagcgtggcggggctgagggggagctgcaggcactgcgtgcacgggcggaggaggctgaggcacaaaagcgacaggcgcaggaggaggccgagcgcttgcggaggcaggtgcaggacgagagccagcgtaagcggcaggcggaggtggagctggcctcgcgcgtgaaggccgaggccgaggcggcgcgcgagaagcagcgggccctgcaggccctggaggagctgcggctgcaggcggaggaggcggagcggcgcctgcggcaggccgaggtggagcgagcgcggcaggtacaggtggccctggagacggcgcagcgcagtgcagaggcggagctgcagagcaaacgcgcctccttcgccgagaagacggcacagctggagcgctccctgcaggaggaacacgtggctgtggcacagctgcgggaggaggctgagcggcgggcacagcagcaggccgaggccgagcgggcgcgcgaggaggcagagcgggagctggagcgctggcagctcaaggccaacgaggcgctacggctgcggctgcaggcggaggaggtggcgcagcagaagagcctggcgcaggccgaggctgagaagcagaaggaggaggcggagcgcgaggcgcggcggcgcggcaaggcggaggagcaggccgtccggcagcgggagctggctgaacaagagctggagaagcagcggcagctggcggaaggcaccgcgcagcagcgcctggccgcggagcaggagttgatccggctgcgggccgagacggagcagggggagcagcagcggcagctgctggaggaggagctggcccggctgcagcgtgaggcggctgcagccacgcagaaacggcaggagctggaagccgagctggccaaggtgcgggccgagatggaggtgctgctggccagcaaggcgagggctgaggaggagtcgcgctccaccagcgagaagtccaagcagaggctggaggccgaggccggccggttccgcgagctggccgaggaggccgcccgcctgcgtgccctggcggaagaggccaagcggcagcggcagctggccgaggaagacgcggcgcggcagcgggccgaggcggagcgggtgcttgcggagaagctggccgccatcggcgaggccacgcggctcaagacggaggcggagatcgcgctcaaggagaaggaggcggagaacgagcgcctgcggcggctggcggaggacgaggccttccagcggcggcggctggaggagcaggccgcgcaacacaaggctgacatcgaggagcgcctggcccagctgcgcaaggcatcggacagcgagctggagcggcagaaggggctggtggaggacacgctgaggcagcggcggcaggtggaggaggagatcctggcgctgaaggcgagcttcgagaaggcggccgctggcaaggcggagctggagctggagctgggacgcatccgcagcaacgcggaggacacgctgcgcagcaaggagcaggccgagctggaggctgcgaggcagcggcagctggcggcggaggaggagcggcggcgccgtgaggctgaggagcgcgtgcagaagagcctggcggccgaggaggaggccgcacggcagcggaaggcggcgctggaggaagtcgagcggctgaaagccaaggtggaggaggcgcggcgcctgcgggagcgagcggagcaggagtcggcgcggcagctgcagctggcccaggaggccgcccagaagcggctgcaggcggaagagaaggcacacgccttcgcggtgcagcagaaggagcaggagctacagcagacgctgcagcaggagcagagcgtgctggaccagctgcgcggcgaggcggaggcggcccggcgggcggctgaggaggcggaggaggcccgggtgcaggcggagcgtgaggcggcgcagtcccggcggcaggtggaagaggccgagcggctgaagcagtcggcagaggagcaggcacaggcccgggctcaggcacaggcggctgcagagaagctgcgcaaggaggccgagcaagaggcggcgcggcgggcacaggcggagcaggcggccctgcggcagaagcaggcagctgacgcggagatggagaagcataagaaattcgccgagcagacgctgcggcagaaggcgcaggtggagcaggagctgacaacactgcggctgcagctggaggagaccgaccaccagaagaacctgctggacgaggagctgcagcggctgaaggcggaggccacggaggccgcacgccagcgcagccaggtggaggaggagctcttctcggtgcgcgtgcagatggaggagctgagcaagctcaaggcacgcatcgaggctgagaaccgcgcactcatcttgcgtgacaaggacaatacgcagcgcttcctgcaggaggaggctgagaagatgaagcaggtggcggaggaggccgcgcggctgagtgtggcggcccaagaggctgcgcgactgcggcagctggcagaggaggacctggcacagcagcgggccttggcagagaagatgctcaaggagaagatgcaggcggtgcaggaggccacgcgactcaaggctgaggcggaactgctgcagcagcagaaggagcttgcgcaggagcaggcgcggcggctgcaggaggacaaggagcagatggcgcagcagctggcggaggagacgcagggcttccagcggacgctggaggccgagcggcagcggcagctggagatgagcgctgaggctgagcgcctcaagctgcgtgtggccgagatgagccgagcccaggcccgcgctgaggaggacgcccagcgcttccggaagcaggcggaggagatcggtgagaagctgcaccgcacggagctcgccacccaggagaaggtgaccctggtgcagacactggagatccagcgacagcagagtgaccatgatgccgagcgcctgcgggaggccatcgctgagctggagcgtgagaaggagaagctccaacaggaggccaaactgctgcagctcaagtctgaggagatgcagacggtgcagcaggagcagctgctgcaggagacgcaggccctgcagcaaagcttcctctctgaaaaggacagcctgctacagcgggagcgcttcatcgagcaggagaaggccaagctggagcagctcttccaggacgaggtggccaaggcacagcagctgcgtgaggagcagcagcggcagcagcagcagatggagcaggaacggcagcggctggtggccagcatggaggaggcgcggcggcggcagcatgaggccgaggagggcgtgcggcgcaagcaggaggagctgcagcagctggagcagcagcggcggcagcaggaggagctgctggctgaggagaaccagaggctgcgtgagcagctgcagctcctggaggagcagcaccgggccgcgctggcgcactcagaggaggtcactgcctcgcaggtggctgccacaaagaccctgcccaatggccgggatgcacttgatggccccgcggcagaggcagagccggagcacagcttcgatggcctgcggcggaaggtgtcagctcagaggctgcaggaggccggcatcctgagtgcggaggagctgcagcggttggcgcagggccacaccacggtggacgagctcgcacggcgggaagacgtgcgccactacctgcagggccgcagcagtatcgcagggctgttgctgaaggccaccaatgagaagctgagtgtttacgccgccctgcagaggcagctgctgagtcccggcacggccctcatcctgctggaggcgcaggcggcctcaggcttcctgctggaccctgtgcggaaccggcggctgaccgtcaacgaggctgtgaaggagggtgtggtgggccccgagctgcaccacaagctgctgtcggccgagcgcgccgtcactggctacaaggacccctacactggccagcagatctctctcttccaagccatgcagaagggcctcatcgtccgggagcacggcatccgcctgctggaggcccagatcgccacgggcggcgttatcgaccccgtgcacagccaccgcgtgcccgtggacgtggcctaccggcgcggctacttcgacgaggagatgaaccgcgtcctggcggaccccagcgacgacaccaagggcttctttgaccccaacacgcacgagaacctcacgtacctgcagctactggagcgctgcgtggaggaccccgagacgggcctgtgccttctgccactcacggataaggctgccaagggcggggagctggtctacactgactccgaggcccgggacgtctttgagaaggccaccgtgtctgcgccgttcggcaagttccagggcaagacggtgaccatttgggagatcatcaactcggaatacttcacggcagagcagcggcgggacctgctgcggcagttccgcacgggccggatcacagtggagaagatcatcaagatcatcatcacggtggtggaggagcaggagcagaagggccggctttgctttgagggcctgcgcagcctggtgccagccgccgagctgctggagagcagggtcatcgaccgcgagctctaccagcagctgcagcgaggtgagcgctctgtgcgagacgtagccgaggtggacactgtgcggcgggctctccggggtgccaacgtcatcgcgggtgtatggctggaggaggcggggcagaagctgagtatctacaatgccctgaagaaagacctgctgccatccgacatggccgtggccctgttggaagcccaggccggcaccgggcacatcatcgaccccgccaccagcgcccggctgaccgtggacgaggcagtgcgtgctggcctggtgggccccgagtttcatgagaagctgctatcagccgagaaggctgtgacagggtacagggacccctacacagggcagagcgtctccctgttccaggccctgaagaagggcctcattccccgggagcagggcctgcgcctgttggacgcccagctgtccacgggcggcatcgtggaccccagcaagagccaccgcgtgcccctggatgtcgcctgcgcccgaggctgcctggatgaggagaccagcagggccctgtcggcaccaagggccgacgccaaggcctacagtgaccccagcacaggggagccggccacctacggcgagctccagcagcggtgccggcccgaccagctgaccgggctgagcctgctgccgctctcagaaaaggctgctcgggcccggcaggaggagctctactcagagctgcaggcccgtgagacctttgaaaagaccccggttgaggtccccgtgggtggcttcaagggcaggacggtgacggtgtgggagctcatcagctctgagtacttcactgcggagcagcggcaggagctgttgcgtcagttccgcacgggcaaggtcaccgtggagaaggtcatcaagattctcattaccatcgtggaggaggtggagaccctgcggcaggagaggctgtccttcagcggcctccgtgcccctgtgccagccagcgagctcctggcttccggggtcctcagcagagcccagtttgagcagctcaaggacggcaagacgacggtcaaggacctttcggagctgggctccgtgcggacgctgctgcagggcagtggctgcctcgccggcatctacctggaggacaccaaggagaaggtgtccatctacgaggccatgcgccggggcctgctgagagccacaacggctgcgctcctgctggaggcgcaggcggccactggcttcctggtggaccccgtgcggaaccagcgcctgtatgtccacgaggccgtgaaggcgggcgtggtgggccccgagcttcacgagcagctgctgtctgccgagaaggccgtcaccggctacagagacccctactcgggcagcaccatctccctcttccaggccatgcagaagggcctggttctccggcagcacggcatccgcctgctggaggcccagatcgccacgggcggcatcatcgaccccgtgcacagccaccgcgtgcctgtggacgtggcctaccagcgcggctacttcagtgaggagatgaaccgcgtcctggcggaccccagcgacgacaccaagggcttctttgaccccaacacgcatgagaacctcacgtacaggcagctgctggagcggtgcgtggaggaccccgagacgggcttgcgccttctgccactgaaaggggcggagaaggctgaggtggtggagaccacgcaggtgtacactgaggaggagacaagaagggcatttgaagagacacagatcgacattcccggcggcggcagccacggcggctccaccatgtccctgtgggaggtgatgcagtcggacctgatccccgaggagcagcgggcccagctgatggctgacttccaggccggccgggtgaccaaggaacgcatgatcatcatcatcatcgagatcattgagaagacagagatcatccgccagcagggtctggcctcctacgactacgtgcgccgccgcctcacggctgaggacctgttcgaggctcggatcatctctctcgagacctacaacctgctccgggagggcaccaggagcctccgtgaggctctcgaggcggagtccgcctggtgctacctctatggcacgggctccgtggctggtgtctacctgcccggttccaggcagacactgagcatctaccaggctctcaagaaagggctgctgagtgccgaggtggcccgcctgctgctggaggcacaggcagccacaggcttcctgctggacccggtgaagggggagcggctgactgtggatgaggctgtgcggaagggcctcgtggggcccgagctgcacgaccgcctgctctcggctgagcgggcggtcaccggctaccgtgacccctacaccgagcagaccatctcgctcttccaggccatgaagaaggagctgatccctactgaggaggccctgcggctgctggatgcccagctggccaccggcggcatcgtggacccccgcctgggcttccaccttcccctggaggtggcttaccagcgtggctacctcaacaaggacacgcacgaccagctgtcagagcccagcgaggtgcgcagctacgtggacccgtccaccgacgagcgcctcagctacacgcagctgctcaggcggtgccgtcgtgacgacggcaccggccagctgctcctgccactgtcggacgcccgcaagctgaccttccgtggcctgcggaagcagatcaccatggaggagctggtgcgctcgcaggtcatggacgaggccacggcgctgcagctgcgggagggcctgacctccatcgaggaggtcaccaagaacttgcagaagttcctggaaggcaccagctgcatcgctggtgtcttcgtggacgccaccaaggaacggctctcggtgtaccaggccatgaagaagggcatcatccgccccggcacagcctttgagctcctggaggcgcaggcggccaccggttacgtcatcgaccccatcaagggactgaagctgacggtggaggaggctgtgcgtatgggcattgtgggccccgagttcaaggacaagctgctgtcggccgagcgcgccgtcactgggtacaaggacccctactctgggaagctcatctccctcttccaggccatgaagaagggcctgatcctgaaggaccatggcatccgcctgctggaggcccagatcgccacgggcggcatcatcgaccctgaggagagccaccggctgcccgtggaggtggcctacaagcgcggcctcttcgatgaggagatgaacgagatcctgaccgacccctcggacgacaccaagggcttctttgaccctaacacggaggagaacctcacctacctgcagctgatggagcgttgtatcactgacccccagacgggcctgtgtctcttgccgctgaaggagaagaagcgggagcggaagacgtcctccaagtcctccgtgcgcaagcgccgagtggtcatcgtggaccccgagacgggcaaggagatgtcagtgtacgaggcctaccgcaagggcctgattgaccaccagacgtacctggagctgtccgagcaggagtgcgagtgggaggagatcaccatctcctcctcggacggcgtggtcaagtccatgatcatcgaccgccgctccgggcgccagtacgacatcgatgatgccatcgccaagaacctcatcgaccgctcggcactggaccagtaccgcgccggcacgctctccatcaccgagttcgccgacatgctctcgggcaacgccggtggtttccgctcccgttcctcctcggtgggatcctcctcctcctaccccatcagccccgccgtctccaggacccagctggcctcctggtcagaccccactgaggagacgggccccgtggctggcatcctggacacggagacgctggagaaggtgtccatcaccgaggccatgcaccggaacctggtggataacatcacggggcagcggctgctggaggcgcaggcctgcaccgggggcatcatcgaccccagcaccggtgagcgcttccctgtcaccgacgccgtcaacaagggcctggtggacaagatcatggtggaccgcatcaacctggcccagaaggccttctgcggcttcgaggacccacgcaccaagaccaagatgtcggccgcccaggccctgaagaagggctggctctactacgaggccggccagcgcttcctggaggtgcagtacctgaccggcggcttgatcgagcccgacacgccgggccgcgtgcccctggacgaggccctgcagcgcggcacggtggacgcccgcaccgcacagaagctgcgtgacgtgggcgcctactccaagtacctcacctgccctaagaccaagctcaagatctcctataaggacgcgctggaccgcagcatggtggaggagggcacggggctgcggctgctggaggctgccgcgcagtccaccaagggctactacagcccctacagcgtcagcggctccggctctaccgctggctcccgcaccggctcgcgcaccggctcccgggccggctcccgccgcggcagctttgacgccaccggctccggcttctccatgaccttctcttcatcctcctactcctcctcgggctacggccgccgctacgcctcggggtcctcggcctccctggggggccctgagtctgccgtggcctgaggctgcctgcgcccaccccgctctgcatgcggcccagcccggctcccaccgaggcgcgggggccgttttcaacgcttaaaggtgtcttcctcccaagtggtgcctaaagtttaaccaaaaagaccagactaatatattaatatatatctgctgtccagacagcctgtatcttgggggacagggctggcccagccctgctggccgcctcaccccctcgggtctcctcactcccttctacctgccactcacacagccaggtgccttggagggtcccaagctgggccccagcccaccctcctgtcttcccagggtagcccgcctgccagtcctagctgcacagggcagctgggcccaaccctgtctgtagagggccctggtgtttctagcactggcctgcacggtgggccttgctggggacggggggccccagtcagcctctctcccagtctacccagagaagccccttccccatgggaagacgaggccctcgggcccagcccccacagtgctgtctgatctgtgctttccagctcaccccccacactcactcctgagacccctggcctccggcgtcagcctccagcctctgttcccctagtaagtgccttccatgtcggcctctaaccccaggccccgaggacccagacccagtggggaggcggacgttccagccggcatggctgggaactgcagacctgtcctcctggtgggtccaggggcccctccagcttgtggagccccacactggggtgccgcctgcccgtctctctcccatggagccccagccccctttgggcccagggacaccagccaggctctgtgctgaccctcctgttgcacccagccctggtctcagcagcgaccacccctgcctccaccctctgagctttgcatgttccactaaccccgggcgggtggcaggtggaggtgtcaggctgctggcgcctctgcaagggcagaacactaacctgaccgtgggcggggccttgcggtatccgcccccaataaaagcaattccaacctt

SEQ ID NO: 166715 - DNA, 14646 bp, Homo sapiens
  Payload ID: 12821
  Gene Symbol: PLEC
  Gene Name: plectin
  Uniprot ID: Q15149
  ENST ID: ENST00000398774
  CDS Start-End: 75-13622
cctccgaggggcctgtgacctcccacacccctggcccgctccgtctgccccgtgggctcctgccaccgtccccgatgaagatcgtgcccgatgagcgggatcgtgtgcagaagaaaaccttcaccaagtgggtcaacaagcacctcatcaaggcccagaggcacatcagtgacctgtatgaagacctccgcgatggccacaacctcatctccctgctggaggtcctctcgggggacagcctgccccgggagaaggggaggatgcgtttccacaagctgcagaatgtccagattgccctggactacctccggcaccgccaggtgaagctggtgaacatcaggaatgatgacatcgctgacggcaaccccaagctgacccttggcctcatctggacaatcattctgcacttccagatctcagatatccaggtgagtgggcagtcggaggacatgacggccaaggagaagctgctgctgtggtcgcagcgaatggtggaggggtaccagggcctgcgatgcgacaacttcacctccagctggagagacggccgcctcttcaatgccatcatccaccggcacaagcccctgctcatcgacatgaacaaggtgtaccggcagaccaacctggagaacctggaccaggccttctctgtggcggagcgggacctgggagtgacgcggctcctggaccctgaggacgtggatgtccctcagcccgacgagaagtccatcatcacctacgtctcgtcgctgtatgacgccatgccccgcgtgccggacgtgcaggatggggtgagggccaacgagctgcagctgcgctggcaggagtaccgggagctggtgctgctgctgcttcagtggatgcgacaccacacggccgcctttgaggaacgcaggttcccctccagcttcgaggagattgagatcctgtggtctcagttcctgaagtttaaggagatggagctaccagccaaggaggccgacaagaacaggtccaagggcatctaccaatccctggagggagcggtgcaagcaggccagctcaaggtgccccctggctaccacccgctggatgtggagaaggagtggggcaagctgcacgtggccatcctggagcgggagaagcagctccgcagcgagtttgagaggctggagtgtcttcagcgcatcgtgaccaagctgcagatggaggcggggctgtgtgaggagcagctgaaccaggccgacgccctgctgcagtcggatgtccggctgctggctgcaggcaaagtgccacagcgggcgggggaggtggaacgggacttggacaaggcggatagcatgatccggctgctcttcaacgacgtgcagaccctcaaggatggacggcacccgcagggcgagcagatgtaccgcagggtgtaccgtctgcacgagcgcctggtagccatccgcaccgagtacaacctacggctgaaggcaggcgtggcggcccctgcaacccaggtggcccaggtgactctgcagagtgtgcagaggcgccccgagctggaggactccactctgcgctacctgcaggacctgctggcctgggtggaggagaaccagcaccgtgtggatggcgctgagtggggtgtggacctgcccagcgtggaggcgcagctgggcagccaccgaggcctgcaccagtccatcgaagaattccgggccaagatcgagcgggcacggagtgacgagggccagctctcccccgccacccggggtgcctaccgtgactgcctgggtcggctggacctgcagtacgccaagctgctgaactcctccaaggcccgcctcaggtccctggagagcttgcacagctttgtggcagccgccactaaggagctaatgtggctgaatgagaaggaggaggaggaggtgggcttcgactggagcgaccgcaacaccaacatgaccgccaagaaggagagctactcggcgctgatgcgggagctggagctgaaggagaagaagatcaaggagctccaaaatgctggggaccggctgctgcgggaggaccacccggcccggcccacggtggagtccttccaggcggccctgcagacgcagtggagctggatgctacagctgtgctgctgtatcgaggcacacctgaaggagaacgctgcctactttcagttcttctcagatgtgcgggaggccgaggggcagttgcagaagctgcaggaggcactgcgtaggaaatacagttgtgatcgctccgccaccgtcacccggctggaggacctgctgcaggatgcccaggacgagaaggaacagctgaacgagtacaagggccacctctcaggcctggccaagcgggccaaggccgtcgtgcagctgaagccccgccacccagcccaccccatgcggggccgcctgcccctgctggccgtgtgcgactataagcaggtggaggtgactgtgcacaagggtgacgagtgccagctggtgggccctgcacagccgtcccactggaaggtgctcagcagctccggcagcgaggccgccgtgccctccgtgtgcttcctggtgcccccgcccaaccaggaggcccaggaggccgtcaccaggctggaggcccagcaccaggccctggtcacgctgtggcaccagttgcacgtggacatgaagagccttctggcctggcagagccttcgccgcgacgtgcagctcatccgctcctggtccctggccacgttccgcaccctgaagccagaggagcagcgccaagccctgcacagcctggagctgcactaccaggccttcctgcgggacagccaggacgcgggcggcttcggacccgaggaccggctgatggctgagcgcgagtacggctcctgcagccaccactaccagcagctgctgcagagcctggaacagggtgcacaggaagagtctcgctgccagcgctgcatctccgagctcaaagacatccggctgcagctggaggcctgtgagacgcgcaccgtgcaccgcctgcggctgccgctggacaaagagccggcacgggagtgtgcccagcgcatcgccgagcagcagaaggcacaggcagaggtggaggggctgggcaagggggtcgcccggctctctgccgaggccgagaaggtcttggccctaccagagccatcgcctgcggcccccacgctgcgctcggagctggagctgacgctgggcaagctggagcaggtccgcagcctgtctgccatctacctggagaagctcaagaccatcagcctggtgatccgcggcacgcagggggccgaggaggtgctcagggcccacgaggagcagctcaaggaggcccaggccgtgccggccaccctcccggagctcgaggccaccaaggcctctctgaagaagctgcgggcccaggccgaggcacagcagcccacgttcgacgccctgcgggatgagctgcggggggcacaggaggtgggggagcgactgcagcagcggcacggggagcgggacgtggaggtggagcgctggcgggagcgggtcgcccagttgcttgagcgctggcaggctgtgctggcccagaccgacgtgcggcagcgcgagctcgagcaactgggccgccagctgcgttactaccgcgagagtgcagaccccttgggcgcctggctgcaggacgccaggcggcggcaggagcagatccaggccatgccgctggccgacagccaggctgtgcgggagcagctgcggcaggagcaggccctgctggaggagatcgagcgccacggcgagaaggtcgaggagtgccagaggtttgcgaaacagtacatcaacgccatcaaggactatgaactccagctggtgacgtacaaggcgcagcttgagccggtggcctccccggccaagaagcccaaggtccagtcgggatcagagagtgtcatccaggagtacgtggacctgcgtacgcactacagcgagctgaccacactgacgagccagtacatcaagttcatcagcgagactctgcggcgcatggaggaggaggagaggctggctgagcagcagcgggcagaggagcgcgagcggctggccgaggtggaggccgcgctggagaagcagcggcagctggccgaggcgcacgcccaggcaaaggcacaggcggagcgggaggcgaaggagctgcagcagcgcatgcaggaggaggtggtgcggcgggaggaggcggcggtggacgcgcagcagcagaagcgcagcattcaggaggagctgcagcagctgcggcagagctcggaggcggagatccaggccaaggcccggcaggcagaggcggctgagcgcagccggctgcgcatcgaggaggagatccgcgtggtgcgcctgcagttggaggccaccgagcgccagcgtggcggggctgagggggagctgcaggcactgcgtgcacgggcggaggaggctgaggcacaaaagcgacaggcgcaggaggaggccgagcgcttgcggaggcaggtgcaggacgagagccagcgtaagcggcaggcggaggtggagctggcctcgcgcgtgaaggccgaggccgaggcggcgcgcgagaagcagcgggccctgcaggccctggaggagctgcggctgcaggcggaggaggcggagcggcgcctgcggcaggccgaggtggagcgagcgcggcaggtacaggtggccctggagacggcgcagcgcagtgcagaggcggagctgcagagcaaacgcgcctccttcgccgagaagacggcacagctggagcgctccctgcaggaggaacacgtggctgtggcacagctgcgggaggaggctgagcggcgggcacagcagcaggccgaggccgagcgggcgcgcgaggaggcagagcgggagctggagcgctggcagctcaaggccaacgaggcgctacggctgcggctgcaggcggaggaggtggcgcagcagaagagcctggcgcaggccgaggctgagaagcagaaggaggaggcggagcgcgaggcgcggcggcgcggcaaggcggaggagcaggccgtccggcagcgggagctggctgaacaagagctggagaagcagcggcagctggcggaaggcaccgcgcagcagcgcctggccgcggagcaggagttgatccggctgcgggccgagacggagcagggggagcagcagcggcagctgctggaggaggagctggcccggctgcagcgtgaggcggctgcagccacgcagaaacggcaggagctggaagccgagctggccaaggtgcgggccgagatggaggtgctgctggccagcaaggcgagggctgaggaggagtcgcgctccaccagcgagaagtccaagcagaggctggaggccgaggccggccggttccgcgagctggccgaggaggccgcccgcctgcgtgccctggcggaagaggccaagcggcagcggcagctggccgaggaagacgcggcgcggcagcgggccgaggcggagcgggtgcttgcggagaagctggccgccatcggcgaggccacgcggctcaagacggaggcggagatcgcgctcaaggagaaggaggcggagaacgagcgcctgcggcggctggcggaggacgaggccttccagcggcggcggctggaggagcaggccgcgcaacacaaggctgacatcgaggagcgcctggcccagctgcgcaaggcatcggacagcgagctggagcggcagaaggggctggtggaggacacgctgaggcagcggcggcaggtggaggaggagatcctggcgctgaaggcgagcttcgagaaggcggccgctggcaaggcggagctggagctggagctgggacgcatccgcagcaacgcggaggacacgctgcgcagcaaggagcaggccgagctggaggctgcgaggcagcggcagctggcggcggaggaggagcggcggcgccgtgaggctgaggagcgcgtgcagaagagcctggcggccgaggaggaggccgcacggcagcggaaggcggcgctggaggaagtcgagcggctgaaagccaaggtggaggaggcgcggcgcctgcgggagcgagcggagcaggagtcggcgcggcagctgcagctggcccaggaggccgcccagaagcggctgcaggcggaagagaaggcacacgccttcgcggtgcagcagaaggagcaggagctacagcagacgctgcagcaggagcagagcgtgctggaccagctgcgcggcgaggcggaggcggcccggcgggcggctgaggaggcggaggaggcccgggtgcaggcggagcgtgaggcggcgcagtcccggcggcaggtggaagaggccgagcggctgaagcagtcggcagaggagcaggcacaggcccgggctcaggcacaggcggctgcagagaagctgcgcaaggaggccgagcaagaggcggcgcggcgggcacaggcggagcaggcggccctgcggcagaagcaggcagctgacgcggagatggagaagcataagaaattcgccgagcagacgctgcggcagaaggcgcaggtggagcaggagctgacaacactgcggctgcagctggaggagaccgaccaccagaagaacctgctggacgaggagctgcagcggctgaaggcggaggccacggaggccgcacgccagcgcagccaggtggaggaggagctcttctcggtgcgcgtgcagatggaggagctgagcaagctcaaggcacgcatcgaggctgagaaccgcgcactcatcttgcgtgacaaggacaatacgcagcgcttcctgcaggaggaggctgagaagatgaagcaggtggcggaggaggccgcgcggctgagtgtggcggcccaagaggctgcgcgactgcggcagctggcagaggaggacctggcacagcagcgggccttggcagagaagatgctcaaggagaagatgcaggcggtgcaggaggccacgcgactcaaggctgaggcggaactgctgcagcagcagaaggagcttgcgcaggagcaggcgcggcggctgcaggaggacaaggagcagatggcgcagcagctggcggaggagacgcagggcttccagcggacgctggaggccgagcggcagcggcagctggagatgagcgctgaggctgagcgcctcaagctgcgtgtggccgagatgagccgagcccaggcccgcgctgaggaggacgcccagcgcttccggaagcaggcggaggagatcggtgagaagctgcaccgcacggagctcgccacccaggagaaggtgaccctggtgcagacactggagatccagcgacagcagagtgaccatgatgccgagcgcctgcgggaggccatcgctgagctggagcgtgagaaggagaagctccaacaggaggccaaactgctgcagctcaagtctgaggagatgcagacggtgcagcaggagcagctgctgcaggagacgcaggccctgcagcaaagcttcctctctgaaaaggacagcctgctacagcgggagcgcttcatcgagcaggagaaggccaagctggagcagctcttccaggacgaggtggccaaggcacagcagctgcgtgaggagcagcagcggcagcagcagcagatggagcaggaacggcagcggctggtggccagcatggaggaggcgcggcggcggcagcatgaggccgaggagggcgtgcggcgcaagcaggaggagctgcagcagctggagcagcagcggcggcagcaggaggagctgctggctgaggagaaccagaggctgcgtgagcagctgcagctcctggaggagcagcaccgggccgcgctggcgcactcagaggaggtcactgcctcgcaggtggctgccacaaagaccctgcccaatggccgggatgcacttgatggccccgcggcagaggcagagccggagcacagcttcgatggcctgcggcggaaggtgtcagctcagaggctgcaggaggccggcatcctgagtgcggaggagctgcagcggttggcgcagggccacaccacggtggacgagctcgcacggcgggaagacgtgcgccactacctgcagggccgcagcagtatcgcagggctgttgctgaaggccaccaatgagaagctgagtgtttacgccgccctgcagaggcagctgctgagtcccggcacggccctcatcctgctggaggcgcaggcggcctcaggcttcctgctggaccctgtgcggaaccggcggctgaccgtcaacgaggctgtgaaggagggtgtggtgggccccgagctgcaccacaagctgctgtcggccgagcgcgccgtcactggctacaaggacccctacactggccagcagatctctctcttccaagccatgcagaagggcctcatcgtccgggagcacggcatccgcctgctggaggcccagatcgccacgggcggcgttatcgaccccgtgcacagccaccgcgtgcccgtggacgtggcctaccggcgcggctacttcgacgaggagatgaaccgcgtcctggcggaccccagcgacgacaccaagggcttctttgaccccaacacgcacgagaacctcacgtacctgcagctactggagcgctgcgtggaggaccccgagacgggcctgtgccttctgccactcacggataaggctgccaagggcggggagctggtctacactgactccgaggcccgggacgtctttgagaaggccaccgtgtctgcgccgttcggcaagttccagggcaagacggtgaccatttgggagatcatcaactcggaatacttcacggcagagcagcggcgggacctgctgcggcagttccgcacgggccggatcacagtggagaagatcatcaagatcatcatcacggtggtggaggagcaggagcagaagggccggctttgctttgagggcctgcgcagcctggtgccagccgccgagctgctggagagcagggtcatcgaccgcgagctctaccagcagctgcagcgaggtgagcgctctgtgcgagacgtagccgaggtggacactgtgcggcgggctctccggggtgccaacgtcatcgcgggtgtatggctggaggaggcggggcagaagctgagtatctacaatgccctgaagaaagacctgctgccatccgacatggccgtggccctgttggaagcccaggccggcaccgggcacatcatcgaccccgccaccagcgcccggctgaccgtggacgaggcagtgcgtgctggcctggtgggccccgagtttcatgagaagctgctatcagccgagaaggctgtgacagggtacagggacccctacacagggcagagcgtctccctgttccaggccctgaagaagggcctcattccccgggagcagggcctgcgcctgttggacgcccagctgtccacgggcggcatcgtggaccccagcaagagccaccgcgtgcccctggatgtcgcctgcgcccgaggctgcctggatgaggagaccagcagggccctgtcggcaccaagggccgacgccaaggcctacagtgaccccagcacaggggagccggccacctacggcgagctccagcagcggtgccggcccgaccagctgaccgggctgagcctgctgccgctctcagaaaaggctgctcgggcccggcaggaggagctctactcagagctgcaggcccgtgagacctttgaaaagaccccggttgaggtccccgtgggtggcttcaagggcaggacggtgacggtgtgggagctcatcagctctgagtacttcactgcggagcagcggcaggagctgttgcgtcagttccgcacgggcaaggtcaccgtggagaaggtcatcaagattctcattaccatcgtggaggaggtggagaccctgcggcaggagaggctgtccttcagcggcctccgtgcccctgtgccagccagcgagctcctggcttccggggtcctcagcagagcccagtttgagcagctcaaggacggcaagacgacggtcaaggacctttcggagctgggctccgtgcggacgctgctgcagggcagtggctgcctcgccggcatctacctggaggacaccaaggagaaggtgtccatctacgaggccatgcgccggggcctgctgagagccacaacggctgcgctcctgctggaggcgcaggcggccactggcttcctggtggaccccgtgcggaaccagcgcctgtatgtccacgaggccgtgaaggcgggcgtggtgggccccgagcttcacgagcagctgctgtctgccgagaaggccgtcaccggctacagagacccctactcgggcagcaccatctccctcttccaggccatgcagaagggcctggttctccggcagcacggcatccgcctgctggaggcccagatcgccacgggcggcatcatcgaccccgtgcacagccaccgcgtgcctgtggacgtggcctaccagcgcggctacttcagtgaggagatgaaccgcgtcctggcggaccccagcgacgacaccaagggcttctttgaccccaacacgcatgagaacctcacgtacaggcagctgctggagcggtgcgtggaggaccccgagacgggcttgcgccttctgccactgaaaggggcggagaaggctgaggtggtggagaccacgcaggtgtacactgaggaggagacaagaagggcatttgaagagacacagatcgacattcccggcggcggcagccacggcggctccaccatgtccctgtgggaggtgatgcagtcggacctgatccccgaggagcagcgggcccagctgatggctgacttccaggccggccgggtgaccaaggaacgcatgatcatcatcatcatcgagatcattgagaagacagagatcatccgccagcagggtctggcctcctacgactacgtgcgccgccgcctcacggctgaggacctgttcgaggctcggatcatctctctcgagacctacaacctgctccgggagggcaccaggagcctccgtgaggctctcgaggcggagtccgcctggtgctacctctatggcacgggctccgtggctggtgtctacctgcccggttccaggcagacactgagcatctaccaggctctcaagaaagggctgctgagtgccgaggtggcccgcctgctgctggaggcacaggcagccacaggcttcctgctggacccggtgaagggggagcggctgactgtggatgaggctgtgcggaagggcctcgtggggcccgagctgcacgaccgcctgctctcggctgagcgggcggtcaccggctaccgtgacccctacaccgagcagaccatctcgctcttccaggccatgaagaaggagctgatccctactgaggaggccctgcggctgctggatgcccagctggccaccggcggcatcgtggacccccgcctgggcttccaccttcccctggaggtggcttaccagcgtggctacctcaacaaggacacgcacgaccagctgtcagagcccagcgaggtgcgcagctacgtggacccgtccaccgacgagcgcctcagctacacgcagctgctcaggcggtgccgtcgtgacgacggcaccggccagctgctcctgccactgtcggacgcccgcaagctgaccttccgtggcctgcggaagcagatcaccatggaggagctggtgcgctcgcaggtcatggacgaggccacggcgctgcagctgcgggagggcctgacctccatcgaggaggtcaccaagaacttgcagaagttcctggaaggcaccagctgcatcgctggtgtcttcgtggacgccaccaaggaacggctctcggtgtaccaggccatgaagaagggcatcatccgccccggcacagcctttgagctcctggaggcgcaggcggccaccggttacgtcatcgaccccatcaagggactgaagctgacggtggaggaggctgtgcgtatgggcattgtgggccccgagttcaaggacaagctgctgtcggccgagcgcgccgtcactgggtacaaggacccctactctgggaagctcatctccctcttccaggccatgaagaagggcctgatcctgaaggaccatggcatccgcctgctggaggcccagatcgccacgggcggcatcatcgaccctgaggagagccaccggctgcccgtggaggtggcctacaagcgcggcctcttcgatgaggagatgaacgagatcctgaccgacccctcggacgacaccaagggcttctttgaccctaacacggaggagaacctcacctacctgcagctgatggagcgttgtatcactgacccccagacgggcctgtgtctcttgccgctgaaggagaagaagcgggagcggaagacgtcctccaagtcctccgtgcgcaagcgccgagtggtcatcgtggaccccgagacgggcaaggagatgtcagtgtacgaggcctaccgcaagggcctgattgaccaccagacgtacctggagctgtccgagcaggagtgcgagtgggaggagatcaccatctcctcctcggacggcgtggtcaagtccatgatcatcgaccgccgctccgggcgccagtacgacatcgatgatgccatcgccaagaacctcatcgaccgctcggcactggaccagtaccgcgccggcacgctctccatcaccgagttcgccgacatgctctcgggcaacgccggtggtttccgctcccgttcctcctcggtgggatcctcctcctcctaccccatcagccccgccgtctccaggacccagctggcctcctggtcagaccccactgaggagacgggccccgtggctggcatcctggacacggagacgctggagaaggtgtccatcaccgaggccatgcaccggaacctggtggataacatcacggggcagcggctgctggaggcgcaggcctgcaccgggggcatcatcgaccccagcaccggtgagcgcttccctgtcaccgacgccgtcaacaagggcctggtggacaagatcatggtggaccgcatcaacctggcccagaaggccttctgcggcttcgaggacccacgcaccaagaccaagatgtcggccgcccaggccctgaagaagggctggctctactacgaggccggccagcgcttcctggaggtgcagtacctgaccggcggcttgatcgagcccgacacgccgggccgcgtgcccctggacgaggccctgcagcgcggcacggtggacgcccgcaccgcacagaagctgcgtgacgtgggcgcctactccaagtacctcacctgccctaagaccaagctcaagatctcctataaggacgcgctggaccgcagcatggtggaggagggcacggggctgcggctgctggaggctgccgcgcagtccaccaagggctactacagcccctacagcgtcagcggctccggctctaccgctggctcccgcaccggctcgcgcaccggctcccgggccggctcccgccgcggcagctttgacgccaccggctccggcttctccatgaccttctcttcatcctcctactcctcctcgggctacggccgccgctacgcctcggggtcctcggcctccctggggggccctgagtctgccgtggcctgaggctgcctgcgcccaccccgctctgcatgcggcccagcccggctcccaccgaggcgcgggggccgttttcaacgcttaaaggtgtcttcctcccaagtggtgcctaaagtttaaccaaaaagaccagactaatatattaatatatatctgctgtccagacagcctgtatcttgggggacagggctggcccagccctgctggccgcctcaccccctcgggtctcctcactcccttctacctgccactcacacagccaggtgccttggagggtcccaagctgggccccagcccaccctcctgtcttcccagggtagcccgcctgccagtcctagctgcacagggcagctgggcccaaccctgtctgtagagggccctggtgtttctagcactggcctgcacggtgggccttgctggggacggggggccccagtcagcctctctcccagtctacccagagaagccccttccccatgggaagacgaggccctcgggcccagcccccacagtgctgtctgatctgtgctttccagctcaccccccacactcactcctgagacccctggcctccggcgtcagcctccagcctctgttcccctagtaagtgccttccatgtcggcctctaaccccaggccccgaggacccagacccagtggggaggcggacgttccagccggcatggctgggaactgcagacctgtcctcctggtgggtccaggggcccctccagcttgtggagccccacactggggtgccgcctgcccgtctctctcccatggagccccagccccctttgggcccagggacaccagccaggctctgtgctgaccctcctgttgcacccagccctggtctcagcagcgaccacccctgcctccaccctctgagctttgcatgttccactaaccccgggcgggtggcaggtggaggtgtcaggctgctggcgcctctgcaagggcagaacactaacctgaccgtgggcggggccttgcggtatccgcccccaataaaagcaattccaacctt

SEQ ID NO: 166716 - DNA, 14787 bp, Homo sapiens
  Payload ID: 12821
  Gene Symbol: PLEC
  Gene Name: plectin
  Uniprot ID: Q15149
  ENST ID: ENST00000436759
  CDS Start-End: 39-13763
ggcggcagagctgaagtgagcggagccaccaggaggccatgtcgggtgaggacgctgaggtccgggcagtctctgaagatgtctccaatggaagcagtggctcgcccagccctggggacacactgccctggaaccttgggaaaacgcagcggagccggcgcagcgggggtggcgctgggagcaacgggagtgtcctggacccagctgagcgggcggtcattcgcatcgcagatgagcgggatcgtgtgcagaagaaaaccttcaccaagtgggtcaacaagcacctcatcaaggcccagaggcacatcagtgacctgtatgaagacctccgcgatggccacaacctcatctccctgctggaggtcctctcgggggacagcctgccccgggagaaggggaggatgcgtttccacaagctgcagaatgtccagattgccctggactacctccggcaccgccaggtgaagctggtgaacatcaggaatgatgacatcgctgacggcaaccccaagctgacccttggcctcatctggacaatcattctgcacttccagatctcagatatccaggtgagtgggcagtcggaggacatgacggccaaggagaagctgctgctgtggtcgcagcgaatggtggaggggtaccagggcctgcgatgcgacaacttcacctccagctggagagacggccgcctcttcaatgccatcatccaccggcacaagcccctgctcatcgacatgaacaaggtgtaccggcagaccaacctggagaacctggaccaggccttctctgtggcggagcgggacctgggagtgacgcggctcctggaccctgaggacgtggatgtccctcagcccgacgagaagtccatcatcacctacgtctcgtcgctgtatgacgccatgccccgcgtgccggacgtgcaggatggggtgagggccaacgagctgcagctgcgctggcaggagtaccgggagctggtgctgctgctgcttcagtggatgcgacaccacacggccgcctttgaggaacgcaggttcccctccagcttcgaggagattgagatcctgtggtctcagttcctgaagtttaaggagatggagctaccagccaaggaggccgacaagaacaggtccaagggcatctaccaatccctggagggagcggtgcaagcaggccagctcaaggtgccccctggctaccacccgctggatgtggagaaggagtggggcaagctgcacgtggccatcctggagcgggagaagcagctccgcagcgagtttgagaggctggagtgtcttcagcgcatcgtgaccaagctgcagatggaggcggggctgtgtgaggagcagctgaaccaggccgacgccctgctgcagtcggatgtccggctgctggctgcaggcaaagtgccacagcgggcgggggaggtggaacgggacttggacaaggcggatagcatgatccggctgctcttcaacgacgtgcagaccctcaaggatggacggcacccgcagggcgagcagatgtaccgcagggtgtaccgtctgcacgagcgcctggtagccatccgcaccgagtacaacctacggctgaaggcaggcgtggcggcccctgcaacccaggtggcccaggtgactctgcagagtgtgcagaggcgccccgagctggaggactccactctgcgctacctgcaggacctgctggcctgggtggaggagaaccagcaccgtgtggatggcgctgagtggggtgtggacctgcccagcgtggaggcgcagctgggcagccaccgaggcctgcaccagtccatcgaagaattccgggccaagatcgagcgggcacggagtgacgagggccagctctcccccgccacccggggtgcctaccgtgactgcctgggtcggctggacctgcagtacgccaagctgctgaactcctccaaggcccgcctcaggtccctggagagcttgcacagctttgtggcagccgccactaaggagctaatgtggctgaatgagaaggaggaggaggaggtgggcttcgactggagcgaccgcaacaccaacatgaccgccaagaaggagagctactcggcgctgatgcgggagctggagctgaaggagaagaagatcaaggagctccaaaatgctggggaccggctgctgcgggaggaccacccggcccggcccacggtggagtccttccaggcggccctgcagacgcagtggagctggatgctacagctgtgctgctgtatcgaggcacacctgaaggagaacgctgcctactttcagttcttctcagatgtgcgggaggccgaggggcagttgcagaagctgcaggaggcactgcgtaggaaatacagttgtgatcgctccgccaccgtcacccggctggaggacctgctgcaggatgcccaggacgagaaggaacagctgaacgagtacaagggccacctctcaggcctggccaagcgggccaaggccgtcgtgcagctgaagccccgccacccagcccaccccatgcggggccgcctgcccctgctggccgtgtgcgactataagcaggtggaggtgactgtgcacaagggtgacgagtgccagctggtgggccctgcacagccgtcccactggaaggtgctcagcagctccggcagcgaggccgccgtgccctccgtgtgcttcctggtgcccccgcccaaccaggaggcccaggaggccgtcaccaggctggaggcccagcaccaggccctggtcacgctgtggcaccagttgcacgtggacatgaagagccttctggcctggcagagccttcgccgcgacgtgcagctcatccgctcctggtccctggccacgttccgcaccctgaagccagaggagcagcgccaagccctgcacagcctggagctgcactaccaggccttcctgcgggacagccaggacgcgggcggcttcggacccgaggaccggctgatggctgagcgcgagtacggctcctgcagccaccactaccagcagctgctgcagagcctggaacagggtgcacaggaagagtctcgctgccagcgctgcatctccgagctcaaagacatccggctgcagctggaggcctgtgagacgcgcaccgtgcaccgcctgcggctgccgctggacaaagagccggcacgggagtgtgcccagcgcatcgccgagcagcagaaggcacaggcagaggtggaggggctgggcaagggggtcgcccggctctctgccgaggccgagaaggtcttggccctaccagagccatcgcctgcggcccccacgctgcgctcggagctggagctgacgctgggcaagctggagcaggtccgcagcctgtctgccatctacctggagaagctcaagaccatcagcctggtgatccgcggcacgcagggggccgaggaggtgctcagggcccacgaggagcagctcaaggaggcccaggccgtgccggccaccctcccggagctcgaggccaccaaggcctctctgaagaagctgcgggcccaggccgaggcacagcagcccacgttcgacgccctgcgggatgagctgcggggggcacaggaggtgggggagcgactgcagcagcggcacggggagcgggacgtggaggtggagcgctggcgggagcgggtcgcccagttgcttgagcgctggcaggctgtgctggcccagaccgacgtgcggcagcgcgagctcgagcaactgggccgccagctgcgttactaccgcgagagtgcagaccccttgggcgcctggctgcaggacgccaggcggcggcaggagcagatccaggccatgccgctggccgacagccaggctgtgcgggagcagctgcggcaggagcaggccctgctggaggagatcgagcgccacggcgagaaggtcgaggagtgccagaggtttgcgaaacagtacatcaacgccatcaaggactatgaactccagctggtgacgtacaaggcgcagcttgagccggtggcctccccggccaagaagcccaaggtccagtcgggatcagagagtgtcatccaggagtacgtggacctgcgtacgcactacagcgagctgaccacactgacgagccagtacatcaagttcatcagcgagactctgcggcgcatggaggaggaggagaggctggctgagcagcagcgggcagaggagcgcgagcggctggccgaggtggaggccgcgctggagaagcagcggcagctggccgaggcgcacgcccaggcaaaggcacaggcggagcgggaggcgaaggagctgcagcagcgcatgcaggaggaggtggtgcggcgggaggaggcggcggtggacgcgcagcagcagaagcgcagcattcaggaggagctgcagcagctgcggcagagctcggaggcggagatccaggccaaggcccggcaggcagaggcggctgagcgcagccggctgcgcatcgaggaggagatccgcgtggtgcgcctgcagttggaggccaccgagcgccagcgtggcggggctgagggggagctgcaggcactgcgtgcacgggcggaggaggctgaggcacaaaagcgacaggcgcaggaggaggccgagcgcttgcggaggcaggtgcaggacgagagccagcgtaagcggcaggcggaggtggagctggcctcgcgcgtgaaggccgaggccgaggcggcgcgcgagaagcagcgggccctgcaggccctggaggagctgcggctgcaggcggaggaggcggagcggcgcctgcggcaggccgaggtggagcgagcgcggcaggtacaggtggccctggagacggcgcagcgcagtgcagaggcggagctgcagagcaaacgcgcctccttcgccgagaagacggcacagctggagcgctccctgcaggaggaacacgtggctgtggcacagctgcgggaggaggctgagcggcgggcacagcagcaggccgaggccgagcgggcgcgcgaggaggcagagcgggagctggagcgctggcagctcaaggccaacgaggcgctacggctgcggctgcaggcggaggaggtggcgcagcagaagagcctggcgcaggccgaggctgagaagcagaaggaggaggcggagcgcgaggcgcggcggcgcggcaaggcggaggagcaggccgtccggcagcgggagctggctgaacaagagctggagaagcagcggcagctggcggaaggcaccgcgcagcagcgcctggccgcggagcaggagttgatccggctgcgggccgagacggagcagggggagcagcagcggcagctgctggaggaggagctggcccggctgcagcgtgaggcggctgcagccacgcagaaacggcaggagctggaagccgagctggccaaggtgcgggccgagatggaggtgctgctggccagcaaggcgagggctgaggaggagtcgcgctccaccagcgagaagtccaagcagaggctggaggccgaggccggccggttccgcgagctggccgaggaggccgcccgcctgcgtgccctggcggaagaggccaagcggcagcggcagctggccgaggaagacgcggcgcggcagcgggccgaggcggagcgggtgcttgcggagaagctggccgccatcggcgaggccacgcggctcaagacggaggcggagatcgcgctcaaggagaaggaggcggagaacgagcgcctgcggcggctggcggaggacgaggccttccagcggcggcggctggaggagcaggccgcgcaacacaaggctgacatcgaggagcgcctggcccagctgcgcaaggcatcggacagcgagctggagcggcagaaggggctggtggaggacacgctgaggcagcggcggcaggtggaggaggagatcctggcgctgaaggcgagcttcgagaaggcggccgctggcaaggcggagctggagctggagctgggacgcatccgcagcaacgcggaggacacgctgcgcagcaaggagcaggccgagctggaggctgcgaggcagcggcagctggcggcggaggaggagcggcggcgccgtgaggctgaggagcgcgtgcagaagagcctggcggccgaggaggaggccgcacggcagcggaaggcggcgctggaggaagtcgagcggctgaaagccaaggtggaggaggcgcggcgcctgcgggagcgagcggagcaggagtcggcgcggcagctgcagctggcccaggaggccgcccagaagcggctgcaggcggaagagaaggcacacgccttcgcggtgcagcagaaggagcaggagctacagcagacgctgcagcaggagcagagcgtgctggaccagctgcgcggcgaggcggaggcggcccggcgggcggctgaggaggcggaggaggcccgggtgcaggcggagcgtgaggcggcgcagtcccggcggcaggtggaagaggccgagcggctgaagcagtcggcagaggagcaggcacaggcccgggctcaggcacaggcggctgcagagaagctgcgcaaggaggccgagcaagaggcggcgcggcgggcacaggcggagcaggcggccctgcggcagaagcaggcagctgacgcggagatggagaagcataagaaattcgccgagcagacgctgcggcagaaggcgcaggtggagcaggagctgacaacactgcggctgcagctggaggagaccgaccaccagaagaacctgctggacgaggagctgcagcggctgaaggcggaggccacggaggccgcacgccagcgcagccaggtggaggaggagctcttctcggtgcgcgtgcagatggaggagctgagcaagctcaaggcacgcatcgaggctgagaaccgcgcactcatcttgcgtgacaaggacaatacgcagcgcttcctgcaggaggaggctgagaagatgaagcaggtggcggaggaggccgcgcggctgagtgtggcggcccaagaggctgcgcgactgcggcagctggcagaggaggacctggcacagcagcgggccttggcagagaagatgctcaaggagaagatgcaggcggtgcaggaggccacgcgactcaaggctgaggcggaactgctgcagcagcagaaggagcttgcgcaggagcaggcgcggcggctgcaggaggacaaggagcagatggcgcagcagctggcggaggagacgcagggcttccagcggacgctggaggccgagcggcagcggcagctggagatgagcgctgaggctgagcgcctcaagctgcgtgtggccgagatgagccgagcccaggcccgcgctgaggaggacgcccagcgcttccggaagcaggcggaggagatcggtgagaagctgcaccgcacggagctcgccacccaggagaaggtgaccctggtgcagacactggagatccagcgacagcagagtgaccatgatgccgagcgcctgcgggaggccatcgctgagctggagcgtgagaaggagaagctccaacaggaggccaaactgctgcagctcaagtctgaggagatgcagacggtgcagcaggagcagctgctgcaggagacgcaggccctgcagcaaagcttcctctctgaaaaggacagcctgctacagcgggagcgcttcatcgagcaggagaaggccaagctggagcagctcttccaggacgaggtggccaaggcacagcagctgcgtgaggagcagcagcggcagcagcagcagatggagcaggaacggcagcggctggtggccagcatggaggaggcgcggcggcggcagcatgaggccgaggagggcgtgcggcgcaagcaggaggagctgcagcagctggagcagcagcggcggcagcaggaggagctgctggctgaggagaaccagaggctgcgtgagcagctgcagctcctggaggagcagcaccgggccgcgctggcgcactcagaggaggtcactgcctcgcaggtggctgccacaaagaccctgcccaatggccgggatgcacttgatggccccgcggcagaggcagagccggagcacagcttcgatggcctgcggcggaaggtgtcagctcagaggctgcaggaggccggcatcctgagtgcggaggagctgcagcggttggcgcagggccacaccacggtggacgagctcgcacggcgggaagacgtgcgccactacctgcagggccgcagcagtatcgcagggctgttgctgaaggccaccaatgagaagctgagtgtttacgccgccctgcagaggcagctgctgagtcccggcacggccctcatcctgctggaggcgcaggcggcctcaggcttcctgctggaccctgtgcggaaccggcggctgaccgtcaacgaggctgtgaaggagggtgtggtgggccccgagctgcaccacaagctgctgtcggccgagcgcgccgtcactggctacaaggacccctacactggccagcagatctctctcttccaagccatgcagaagggcctcatcgtccgggagcacggcatccgcctgctggaggcccagatcgccacgggcggcgttatcgaccccgtgcacagccaccgcgtgcccgtggacgtggcctaccggcgcggctacttcgacgaggagatgaaccgcgtcctggcggaccccagcgacgacaccaagggcttctttgaccccaacacgcacgagaacctcacgtacctgcagctactggagcgctgcgtggaggaccccgagacgggcctgtgccttctgccactcacggataaggctgccaagggcggggagctggtctacactgactccgaggcccgggacgtctttgagaaggccaccgtgtctgcgccgttcggcaagttccagggcaagacggtgaccatttgggagatcatcaactcggaatacttcacggcagagcagcggcgggacctgctgcggcagttccgcacgggccggatcacagtggagaagatcatcaagatcatcatcacggtggtggaggagcaggagcagaagggccggctttgctttgagggcctgcgcagcctggtgccagccgccgagctgctggagagcagggtcatcgaccgcgagctctaccagcagctgcagcgaggtgagcgctctgtgcgagacgtagccgaggtggacactgtgcggcgggctctccggggtgccaacgtcatcgcgggtgtatggctggaggaggcggggcagaagctgagtatctacaatgccctgaagaaagacctgctgccatccgacatggccgtggccctgttggaagcccaggccggcaccgggcacatcatcgaccccgccaccagcgcccggctgaccgtggacgaggcagtgcgtgctggcctggtgggccccgagtttcatgagaagctgctatcagccgagaaggctgtgacagggtacagggacccctacacagggcagagcgtctccctgttccaggccctgaagaagggcctcattccccgggagcagggcctgcgcctgttggacgcccagctgtccacgggcggcatcgtggaccccagcaagagccaccgcgtgcccctggatgtcgcctgcgcccgaggctgcctggatgaggagaccagcagggccctgtcggcaccaagggccgacgccaaggcctacagtgaccccagcacaggggagccggccacctacggcgagctccagcagcggtgccggcccgaccagctgaccgggctgagcctgctgccgctctcagaaaaggctgctcgggcccggcaggaggagctctactcagagctgcaggcccgtgagacctttgaaaagaccccggttgaggtccccgtgggtggcttcaagggcaggacggtgacggtgtgggagctcatcagctctgagtacttcactgcggagcagcggcaggagctgttgcgtcagttccgcacgggcaaggtcaccgtggagaaggtcatcaagattctcattaccatcgtggaggaggtggagaccctgcggcaggagaggctgtccttcagcggcctccgtgcccctgtgccagccagcgagctcctggcttccggggtcctcagcagagcccagtttgagcagctcaaggacggcaagacgacggtcaaggacctttcggagctgggctccgtgcggacgctgctgcagggcagtggctgcctcgccggcatctacctggaggacaccaaggagaaggtgtccatctacgaggccatgcgccggggcctgctgagagccacaacggctgcgctcctgctggaggcgcaggcggccactggcttcctggtggaccccgtgcggaaccagcgcctgtatgtccacgaggccgtgaaggcgggcgtggtgggccccgagcttcacgagcagctgctgtctgccgagaaggccgtcaccggctacagagacccctactcgggcagcaccatctccctcttccaggccatgcagaagggcctggttctccggcagcacggcatccgcctgctggaggcccagatcgccacgggcggcatcatcgaccccgtgcacagccaccgcgtgcctgtggacgtggcctaccagcgcggctacttcagtgaggagatgaaccgcgtcctggcggaccccagcgacgacaccaagggcttctttgaccccaacacgcatgagaacctcacgtacaggcagctgctggagcggtgcgtggaggaccccgagacgggcttgcgccttctgccactgaaaggggcggagaaggctgaggtggtggagaccacgcaggtgtacactgaggaggagacaagaagggcatttgaagagacacagatcgacattcccggcggcggcagccacggcggctccaccatgtccctgtgggaggtgatgcagtcggacctgatccccgaggagcagcgggcccagctgatggctgacttccaggccggccgggtgaccaaggaacgcatgatcatcatcatcatcgagatcattgagaagacagagatcatccgccagcagggtctggcctcctacgactacgtgcgccgccgcctcacggctgaggacctgttcgaggctcggatcatctctctcgagacctacaacctgctccgggagggcaccaggagcctccgtgaggctctcgaggcggagtccgcctggtgctacctctatggcacgggctccgtggctggtgtctacctgcccggttccaggcagacactgagcatctaccaggctctcaagaaagggctgctgagtgccgaggtggcccgcctgctgctggaggcacaggcagccacaggcttcctgctggacccggtgaagggggagcggctgactgtggatgaggctgtgcggaagggcctcgtggggcccgagctgcacgaccgcctgctctcggctgagcgggcggtcaccggctaccgtgacccctacaccgagcagaccatctcgctcttccaggccatgaagaaggagctgatccctactgaggaggccctgcggctgctggatgcccagctggccaccggcggcatcgtggacccccgcctgggcttccaccttcccctggaggtggcttaccagcgtggctacctcaacaaggacacgcacgaccagctgtcagagcccagcgaggtgcgcagctacgtggacccgtccaccgacgagcgcctcagctacacgcagctgctcaggcggtgccgtcgtgacgacggcaccggccagctgctcctgccactgtcggacgcccgcaagctgaccttccgtggcctgcggaagcagatcaccatggaggagctggtgcgctcgcaggtcatggacgaggccacggcgctgcagctgcgggagggcctgacctccatcgaggaggtcaccaagaacttgcagaagttcctggaaggcaccagctgcatcgctggtgtcttcgtggacgccaccaaggaacggctctcggtgtaccaggccatgaagaagggcatcatccgccccggcacagcctttgagctcctggaggcgcaggcggccaccggttacgtcatcgaccccatcaagggactgaagctgacggtggaggaggctgtgcgtatgggcattgtgggccccgagttcaaggacaagctgctgtcggccgagcgcgccgtcactgggtacaaggacccctactctgggaagctcatctccctcttccaggccatgaagaagggcctgatcctgaaggaccatggcatccgcctgctggaggcccagatcgccacgggcggcatcatcgaccctgaggagagccaccggctgcccgtggaggtggcctacaagcgcggcctcttcgatgaggagatgaacgagatcctgaccgacccctcggacgacaccaagggcttctttgaccctaacacggaggagaacctcacctacctgcagctgatggagcgttgtatcactgacccccagacgggcctgtgtctcttgccgctgaaggagaagaagcgggagcggaagacgtcctccaagtcctccgtgcgcaagcgccgagtggtcatcgtggaccccgagacgggcaaggagatgtcagtgtacgaggcctaccgcaagggcctgattgaccaccagacgtacctggagctgtccgagcaggagtgcgagtgggaggagatcaccatctcctcctcggacggcgtggtcaagtccatgatcatcgaccgccgctccgggcgccagtacgacatcgatgatgccatcgccaagaacctcatcgaccgctcggcactggaccagtaccgcgccggcacgctctccatcaccgagttcgccgacatgctctcgggcaacgccggtggtttccgctcccgttcctcctcggtgggatcctcctcctcctaccccatcagccccgccgtctccaggacccagctggcctcctggtcagaccccactgaggagacgggccccgtggctggcatcctggacacggagacgctggagaaggtgtccatcaccgaggccatgcaccggaacctggtggataacatcacggggcagcggctgctggaggcgcaggcctgcaccgggggcatcatcgaccccagcaccggtgagcgcttccctgtcaccgacgccgtcaacaagggcctggtggacaagatcatggtggaccgcatcaacctggcccagaaggccttctgcggcttcgaggacccacgcaccaagaccaagatgtcggccgcccaggccctgaagaagggctggctctactacgaggccggccagcgcttcctggaggtgcagtacctgaccggcggcttgatcgagcccgacacgccgggccgcgtgcccctggacgaggccctgcagcgcggcacggtggacgcccgcaccgcacagaagctgcgtgacgtgggcgcctactccaagtacctcacctgccctaagaccaagctcaagatctcctataaggacgcgctggaccgcagcatggtggaggagggcacggggctgcggctgctggaggctgccgcgcagtccaccaagggctactacagcccctacagcgtcagcggctccggctctaccgctggctcccgcaccggctcgcgcaccggctcccgggccggctcccgccgcggcagctttgacgccaccggctccggcttctccatgaccttctcttcatcctcctactcctcctcgggctacggccgccgctacgcctcggggtcctcggcctccctggggggccctgagtctgccgtggcctgaggctgcctgcgcccaccccgctctgcatgcggcccagcccggctcccaccgaggcgcgggggccgttttcaacgcttaaaggtgtcttcctcccaagtggtgcctaaagtttaaccaaaaagaccagactaatatattaatatatatctgctgtccagacagcctgtatcttgggggacagggctggcccagccctgctggccgcctcaccccctcgggtctcctcactcccttctacctgccactcacacagccaggtgccttggagggtcccaagctgggccccagcccaccctcctgtcttcccagggtagcccgcctgccagtcctagctgcacagggcagctgggcccaaccctgtctgtagagggccctggtgtttctagcactggcctgcacggtgggccttgctggggacggggggccccagtcagcctctctcccagtctacccagagaagccccttccccatgggaagacgaggccctcgggcccagcccccacagtgctgtctgatctgtgctttccagctcaccccccacactcactcctgagacccctggcctccggcgtcagcctccagcctctgttcccctagtaagtgccttccatgtcggcctctaaccccaggccccgaggacccagacccagtggggaggcggacgttccagccggcatggctgggaactgcagacctgtcctcctggtgggtccaggggcccctccagcttgtggagccccacactggggtgccgcctgcccgtctctctcccatggagccccagccccctttgggcccagggacaccagccaggctctgtgctgaccctcctgttgcacccagccctggtctcagcagcgaccacccctgcctccaccctctgagctttgcatgttccactaaccccgggcgggtggcaggtggaggtgtcaggctgctggcgcctctgcaagggcagaacactaacctgaccgtgggcggggccttgcggtatccgcccccaataaaagcaattccaacctt

SEQ ID NO: 166717 - DNA, 583 bp, Homo sapiens
  Payload ID: 12821
  Gene Symbol: PLEC
  Gene Name: plectin
  ENST ID: ENST00000526416
  CDS Start-End: 14-583
ctgtgtggcagccatggacaggtacagcatggaggagctgattcagctgggccaagatgagcgggatcgtgtgcagaagaaaaccttcaccaagtgggtcaacaagcacctcatcaaggcccagaggcacatcagtgacctgtatgaagacctccgcgatggccacaacctcatctccctgctggaggtcctctcgggggacagcctgccccgggagaaggggaggatgcgtttccacaagctgcagaatgtccagattgccctggactacctccggcaccgccaggtgaagctggtgaacatcaggaatgatgacatcgctgacggcaaccccaagctgacccttggcctcatctggacaatcattctgcacttccagatctcagatatccaggtgagtgggcagtcggaggacatgacggccaaggagaagctgctgctgtggtcgcagcgaatggtggaggggtaccagggcctgcgatgcgacaacttcacctccagctggagagacggccgcctcttcaatgccatcatccaccggcacaagcccctgctcatcgacatgaacaaggtgtaccggcag

SEQ ID NO: 166718 - DNA, 598 bp, Homo sapiens
  Payload ID: 12821
  Gene Symbol: PLEC
  Gene Name: plectin
  ENST ID: ENST00000527303
  CDS Start-End: 1-598
aggtccagtcgggatcagagagtgtcatccaggagtacgtggacctgcgtacgcactacagcgagctgaccacactgacgagccagtacatcaagttcatcagcgagactctgcggcgcatggaggaggaggagatgcagacggtgcagcaggagcagctgctgcaggagacgcaggccctgcagcaaagcttcctctctgaaaaggacagcctgctacagcgggagcgcttcatcgagcaggagaaggccaagctggagcagctcttccaggacgaggtggccaaggcacagcagctgcgtgaggagcagcagcggcagcagcagcagatggagcaggaacggcagcggctggtggccagcatggaggaggcgcggcggcggcagcatgaggccgaggagggcgtgcggcgcaagcaggaggagctgcagcagctggagcagcagcggcggcagcaggaggagctgctggctgaggagaaccagaggctgcgtgagcagctgcagctcctggaggagcagcaccgggccgcgctggcgcactcagaggaggtcactgcctcgcaggtggctgccacaaagaccctgcccaatggccg

SEQ ID NO: 166719 - DNA, 583 bp, Homo sapiens
  Payload ID: 12821
  Gene Symbol: PLEC
  Gene Name: plectin
  ENST ID: ENST00000527816
  CDS Start-End: 334-583
ttcatctctgcttactgactaaggggtggctgcgaggaggagccgctgctaccagggcatgagtgggccctccctctgcctcccaccccttccctccttcctgcctcgccttcctccctgccggctctcggagcagcctggcctgtgtggcagccatggacagatgagcgggatcgtgtgcagaagaaaaccttcaccaagtgggtcaacaagcacctcatcaaggcccagaggcacatcagtgacctgtatgaagacctccgcgatggccacaacctcatctccctgctggaggtcctctcgggggacagcctgccccgggagaaggggaggatgcgtttccacaagctgcagaatgtccagattgccctggactacctccggcaccgccaggtgaagctggtgaacatcaggaatgatgacatcgctgacggcaaccccaagctgacccttggcctcatctggacaatcattctgcacttccagatctcagatatccaggtgagtgggcagtcggaggacatgacggccaaggagaagctgctgctgtggtcgcagcgaatggtggaggggtaccagggcc

SEQ ID NO: 166720 - DNA, 13713 bp, Homo sapiens
  Payload ID: 12821
  Gene Symbol: PLEC
  Gene Name: plectin
  Uniprot ID: Q15149
  ENST ID: ENST00000527096
  CDS Start-End: 1-13713
atgtcgggtgaggacgctgaggtccgggcagtctctgaagatgtctccaatggaagcagtggctcgcccagccctggggacacactgccctggaaccttgggaaaacgcagcggagccggcgcagcgggggtggcgctgggagcaacgggagtgtcctggacccagctgagcgggcggtcattcgcatcgcagatgagcgggatcgtgtgcagaagaaaaccttcaccaagtgggtcaacaagcacctcatcaaggcccagaggcacatcagtgacctgtatgaagacctccgcgatggccacaacctcatctccctgctggaggtcctctcgggggacagcctgccccgggagaaggggaggatgcgtttccacaagctgcagaatgtccagattgccctggactacctccggcaccgccaggtgaagctggtgaacatcaggaatgatgacatcgctgacggcaaccccaagctgacccttggcctcatctggacaatcattctgcacttccagatctcagatatccaggtgagtgggcagtcggaggacatgacggccaaggagaagctgctgctgtggtcgcagcgaatggtggaggggtaccagggcctgcgatgcgacaacttcacctccagctggagagacggccgcctcttcaatgccatcatccaccggcacaagcccctgctcatcgacatgaacaaggtgtaccggcagaccaacctggagaacctggaccaggccttctctgtggcggagcgggacctgggagtgacgcggctcctggaccctgaggacgtggatgtccctcagcccgacgagaagtccatcatcacctacgtctcgtcgctgtatgacgccatgccccgcgtgccggacgtgcaggatggggagctgcagctgcgctggcaggagtaccgggagctggtgctgctgctgcttcagtggatgcgacaccacacggccgcctttgaggaacgcaggttcccctccagcttcgaggagattgagatcctgtggtctcagttcctgaagtttaaggagatggagctaccagccaaggaggccgacaagaacaggtccaagggcatctaccaatccctggagggagcggtgcaagcaggccagctcaaggtgccccctggctaccacccgctggatgtggagaaggagtggggcaagctgcacgtggccatcctggagcgggagaagcagctccgcagcgagtttgagaggctggagtgtcttcagcgcatcgtgaccaagctgcagatggaggcggggctgtgtgaggagcagctgaaccaggccgacgccctgctgcagtcggatgtccggctgctggctgcaggcaaagtgccacagcgggcgggggaggtggaacgggacttggacaaggcggatagcatgatccggctgctcttcaacgacgtgcagaccctcaaggatggacggcacccgcagggcgagcagatgtaccgcagggtgtaccgtctgcacgagcgcctggtagccatccgcaccgagtacaacctacggctgaaggcaggcgtggcggcccctgcaacccaggtggcccaggtgactctgcagagtgtgcagaggcgccccgagctggaggactccactctgcgctacctgcaggacctgctggcctgggtggaggagaaccagcaccgtgtggatggcgctgagtggggtgtggacctgcccagcgtggaggcgcagctgggcagccaccgaggcctgcaccagtccatcgaagaattccgggccaagatcgagcgggcacggagtgacgagggccagctctcccccgccacccggggtgcctaccgtgactgcctgggtcggctggacctgcagtacgccaagctgctgaactcctccaaggcccgcctcaggtccctggagagcttgcacagctttgtggcagccgccactaaggagctaatgtggctgaatgagaaggaggaggaggaggtgggcttcgactggagcgaccgcaacaccaacatgaccgccaagaaggagagctactcggcgctgatgcgggagctggagctgaaggagaagaagatcaaggagctccaaaatgctggggaccggctgctgcgggaggaccacccggcccggcccacggtggagtccttccaggcggccctgcagacgcagtggagctggatgctacagctgtgctgctgtatcgaggcacacctgaaggagaacgctgcctactttcagttcttctcagatgtgcgggaggccgaggggcagttgcagaagctgcaggaggcactgcgtaggaaatacagttgtgatcgctccgccaccgtcacccggctggaggacctgctgcaggatgcccaggacgagaaggaacagctgaacgagtacaagggccacctctcaggcctggccaagcgggccaaggccgtcgtgcagctgaagccccgccacccagcccaccccatgcggggccgcctgcccctgctggccgtgtgcgactataagcaggtggaggtgactgtgcacaagggtgacgagtgccagctggtgggccctgcacagccgtcccactggaaggtgctcagcagctccggcagcgaggccgccgtgccctccgtgtgcttcctggtgcccccgcccaaccaggaggcccaggaggccgtcaccaggctggaggcccagcaccaggccctggtcacgctgtggcaccagttgcacgtggacatgaagagccttctggcctggcagagccttcgccgcgacgtgcagctcatccgctcctggtccctggccacgttccgcaccctgaagccagaggagcagcgccaagccctgcacagcctggagctgcactaccaggccttcctgcgggacagccaggacgcgggcggcttcggacccgaggaccggctgatggctgagcgcgagtacggctcctgcagccaccactaccagcagctgctgcagagcctggaacagggtgcacaggaagagtctcgctgccagcgctgcatctccgagctcaaagacatccggctgcagctggaggcctgtgagacgcgcaccgtgcaccgcctgcggctgccgctggacaaagagccggcacgggagtgtgcccagcgcatcgccgagcagcagaaggcacaggcagaggtggaggggctgggcaagggggtcgcccggctctctgccgaggccgagaaggtcttggccctaccagagccatcgcctgcggcccccacgctgcgctcggagctggagctgacgctgggcaagctggagcaggtccgcagcctgtctgccatctacctggagaagctcaagaccatcagcctggtgatccgcggcacgcagggggccgaggaggtgctcagggcccacgaggagcagctcaaggaggcccaggccgtgccggccaccctcccggagctcgaggccaccaaggcctctctgaagaagctgcgggcccaggccgaggcacagcagcccacgttcgacgccctgcgggatgagctgcggggggcacaggaggtgggggagcgactgcagcagcggcacggggagcgggacgtggaggtggagcgctggcgggagcgggtcgcccagttgcttgagcgctggcaggctgtgctggcccagaccgacgtgcggcagcgcgagctcgagcaactgggccgccagctgcgttactaccgcgagagtgcagaccccttgggcgcctggctgcaggacgccaggcggcggcaggagcagatccaggccatgccgctggccgacagccaggctgtgcgggagcagctgcggcaggagcaggccctgctggaggagatcgagcgccacggcgagaaggtcgaggagtgccagaggtttgcgaaacagtacatcaacgccatcaaggactatgaactccagctggtgacgtacaaggcgcagcttgagccggtggcctccccggccaagaagcccaaggtccagtcgggatcagagagtgtcatccaggagtacgtggacctgcgtacgcactacagcgagctgaccacactgacgagccagtacatcaagttcatcagcgagactctgcggcgcatggaggaggaggagaggctggctgagcagcagcgggcagaggagcgcgagcggctggccgaggtggaggccgcgctggagaagcagcggcagctggccgaggcgcacgcccaggcaaaggcacaggcggagcgggaggcgaaggagctgcagcagcgcatgcaggaggaggtggtgcggcgggaggaggcggcggtggacgcgcagcagcagaagcgcagcattcaggaggagctgcagcagctgcggcagagctcggaggcggagatccaggccaaggcccggcaggcagaggcggctgagcgcagccggctgcgcatcgaggaggagatccgcgtggtgcgcctgcagttggaggccaccgagcgccagcgtggcggggctgagggggagctgcaggcactgcgtgcacgggcggaggaggctgaggcacaaaagcgacaggcgcaggaggaggccgagcgcttgcggaggcaggtgcaggacgagagccagcgtaagcggcaggcggaggtggagctggcctcgcgcgtgaaggccgaggccgaggcggcgcgcgagaagcagcgggccctgcaggccctggaggagctgcggctgcaggcggaggaggcggagcggcgcctgcggcaggccgaggtggagcgagcgcggcaggtacaggtggccctggagacggcgcagcgcagtgcagaggcggagctgcagagcaaacgcgcctccttcgccgagaagacggcacagctggagcgctccctgcaggaggaacacgtggctgtggcacagctgcgggaggaggctgagcggcgggcacagcagcaggccgaggccgagcgggcgcgcgaggaggcagagcgggagctggagcgctggcagctcaaggccaacgaggcgctacggctgcggctgcaggcggaggaggtggcgcagcagaagagcctggcgcaggccgaggctgagaagcagaaggaggaggcggagcgcgaggcgcggcggcgcggcaaggcggaggagcaggccgtccggcagcgggagctggctgaacaagagctggagaagcagcggcagctggcggaaggcaccgcgcagcagcgcctggccgcggagcaggagttgatccggctgcgggccgagacggagcagggggagcagcagcggcagctgctggaggaggagctggcccggctgcagcgtgaggcggctgcagccacgcagaaacggcaggagctggaagccgagctggccaaggtgcgggccgagatggaggtgctgctggccagcaaggcgagggctgaggaggagtcgcgctccaccagcgagaagtccaagcagaggctggaggccgaggccggccggttccgcgagctggccgaggaggccgcccgcctgcgtgccctggcggaagaggccaagcggcagcggcagctggccgaggaagacgcggcgcggcagcgggccgaggcggagcgggtgcttgcggagaagctggccgccatcggcgaggccacgcggctcaagacggaggcggagatcgcgctcaaggagaaggaggcggagaacgagcgcctgcggcggctggcggaggacgaggccttccagcggcggcggctggaggagcaggccgcgcaacacaaggctgacatcgaggagcgcctggcccagctgcgcaaggcatcggacagcgagctggagcggcagaaggggctggtggaggacacgctgaggcagcggcggcaggtggaggaggagatcctggcgctgaaggcgagcttcgagaaggcggccgctggcaaggcggagctggagctggagctgggacgcatccgcagcaacgcggaggacacgctgcgcagcaaggagcaggccgagctggaggctgcgaggcagcggcagctggcggcggaggaggagcggcggcgccgtgaggctgaggagcgcgtgcagaagagcctggcggccgaggaggaggccgcacggcagcggaaggcggcgctggaggaagtcgagcggctgaaagccaaggtggaggaggcgcggcgcctgcgggagcgagcggagcaggagtcggcgcggcagctgcagctggcccaggaggccgcccagaagcggctgcaggcggaagagaaggcacacgccttcgcggtgcagcagaaggagcaggagctacagcagacgctgcagcaggagcagagcgtgctggaccagctgcgcggcgaggcggaggcggcccggcgggcggctgaggaggcggaggaggcccgggtgcaggcggagcgtgaggcggcgcagtcccggcggcaggtggaagaggccgagcggctgaagcagtcggcagaggagcaggcacaggcccgggctcaggcacaggcggctgcagagaagctgcgcaaggaggccgagcaagaggcggcgcggcgggcacaggcggagcaggcggccctgcggcagaagcaggcagctgacgcggagatggagaagcataagaaattcgccgagcagacgctgcggcagaaggcgcaggtggagcaggagctgacaacactgcggctgcagctggaggagaccgaccaccagaagaacctgctggacgaggagctgcagcggctgaaggcggaggccacggaggccgcacgccagcgcagccaggtggaggaggagctcttctcggtgcgcgtgcagatggaggagctgagcaagctcaaggcacgcatcgaggctgagaaccgcgcactcatcttgcgtgacaaggacaatacgcagcgcttcctgcaggaggaggctgagaagatgaagcaggtggcggaggaggccgcgcggctgagtgtggcggcccaagaggctgcgcgactgcggcagctggcagaggaggacctggcacagcagcgggccttggcagagaagatgctcaaggagaagatgcaggcggtgcaggaggccacgcgactcaaggctgaggcggaactgctgcagcagcagaaggagcttgcgcaggagcaggcgcggcggctgcaggaggacaaggagcagatggcgcagcagctggcggaggagacgcagggcttccagcggacgctggaggccgagcggcagcggcagctggagatgagcgctgaggctgagcgcctcaagctgcgtgtggccgagatgagccgagcccaggcccgcgctgaggaggacgcccagcgcttccggaagcaggcggaggagatcggtgagaagctgcaccgcacggagctcgccacccaggagaaggtgaccctggtgcagacactggagatccagcgacagcagagtgaccatgatgccgagcgcctgcgggaggccatcgctgagctggagcgtgagaaggagaagctccaacaggaggccaaactgctgcagctcaagtctgaggagatgcagacggtgcagcaggagcagctgctgcaggagacgcaggccctgcagcaaagcttcctctctgaaaaggacagcctgctacagcgggagcgcttcatcgagcaggagaaggccaagctggagcagctcttccaggacgaggtggccaaggcacagcagctgcgtgaggagcagcagcggcagcagcagcagatggagcaggaacggcagcggctggtggccagcatggaggaggcgcggcggcggcagcatgaggccgaggagggcgtgcggcgcaagcaggaggagctgcagcagctggagcagcagcggcggcagcaggaggagctgctggctgaggagaaccagaggctgcgtgagcagctgcagctcctggaggagcagcaccgggccgcgctggcgcactcagaggaggtcactgcctcgcaggtggctgccacaaagaccctgcccaatggccgggatgcacttgatggccccgcggcagaggcagagccggagcacagcttcgatggcctgcggcggaaggtgtcagctcagaggctgcaggaggccggcatcctgagtgcggaggagctgcagcggttggcgcagggccacaccacggtggacgagctcgcacggcgggaagacgtgcgccactacctgcagggccgcagcagtatcgcagggctgttgctgaaggccaccaatgagaagctgagtgtttacgccgccctgcagaggcagctgctgagtcccggcacggccctcatcctgctggaggcgcaggcggcctcaggcttcctgctggaccctgtgcggaaccggcggctgaccgtcaacgaggctgtgaaggagggtgtggtgggccccgagctgcaccacaagctgctgtcggccgagcgcgccgtcactggctacaaggacccctacactggccagcagatctctctcttccaagccatgcagaagggcctcatcgtccgggagcacggcatccgcctgctggaggcccagatcgccacgggcggcgttatcgaccccgtgcacagccaccgcgtgcccgtggacgtggcctaccggcgcggctacttcgacgaggagatgaaccgcgtcctggcggaccccagcgacgacaccaagggcttctttgaccccaacacgcacgagaacctcacgtacctgcagctactggagcgctgcgtggaggaccccgagacgggcctgtgccttctgccactcacggataaggctgccaagggcggggagctggtctacactgactccgaggcccgggacgtctttgagaaggccaccgtgtctgcgccgttcggcaagttccagggcaagacggtgaccatttgggagatcatcaactcggaatacttcacggcagagcagcggcgggacctgctgcggcagttccgcacgggccggatcacagtggagaagatcatcaagatcatcatcacggtggtggaggagcaggagcagaagggccggctttgctttgagggcctgcgcagcctggtgccagccgccgagctgctggagagcagggtcatcgaccgcgagctctaccagcagctgcagcgaggtgagcgctctgtgcgagacgtagccgaggtggacactgtgcggcgggctctccggggtgccaacgtcatcgcgggtgtatggctggaggaggcggggcagaagctgagtatctacaatgccctgaagaaagacctgctgccatccgacatggccgtggccctgttggaagcccaggccggcaccgggcacatcatcgaccccgccaccagcgcccggctgaccgtggacgaggcagtgcgtgctggcctggtgggccccgagtttcatgagaagctgctatcagccgagaaggctgtgacagggtacagggacccctacacagggcagagcgtctccctgttccaggccctgaagaagggcctcattccccgggagcagggcctgcgcctgttggacgcccagctgtccacgggcggcatcgtggaccccagcaagagccaccgcgtgcccctggatgtcgcctgcgcccgaggctgcctggatgaggagaccagcagggccctgtcggcaccaagggccgacgccaaggcctacagtgaccccagcacaggggagccggccacctacggcgagctccagcagcggtgccggcccgaccagctgaccgggctgagcctgctgccgctctcagaaaaggctgctcgggcccggcaggaggagctctactcagagctgcaggcccgtgagacctttgaaaagaccccggttgaggtccccgtgggtggcttcaagggcaggacggtgacggtgtgggagctcatcagctctgagtacttcactgcggagcagcggcaggagctgttgcgtcagttccgcacgggcaaggtcaccgtggagaaggtcatcaagattctcattaccatcgtggaggaggtggagaccctgcggcaggagaggctgtccttcagcggcctccgtgcccctgtgccagccagcgagctcctggcttccggggtcctcagcagagcccagtttgagcagctcaaggacggcaagacgacggtcaaggacctttcggagctgggctccgtgcggacgctgctgcagggcagtggctgcctcgccggcatctacctggaggacaccaaggagaaggtgtccatctacgaggccatgcgccggggcctgctgagagccacaacggctgcgctcctgctggaggcgcaggcggccactggcttcctggtggaccccgtgcggaaccagcgcctgtatgtccacgaggccgtgaaggcgggcgtggtgggccccgagcttcacgagcagctgctgtctgccgagaaggccgtcaccggctacagagacccctactcgggcagcaccatctccctcttccaggccatgcagaagggcctggttctccggcagcacggcatccgcctgctggaggcccagatcgccacgggcggcatcatcgaccccgtgcacagccaccgcgtgcctgtggacgtggcctaccagcgcggctacttcagtgaggagatgaaccgcgtcctggcggaccccagcgacgacaccaagggcttctttgaccccaacacgcatgagaacctcacgtacaggcagctgctggagcggtgcgtggaggaccccgagacgggcttgcgccttctgccactgaaaggggcggagaaggctgaggtggtggagaccacgcaggtgtacactgaggaggagacaagaagggcatttgaagagacacagatcgacattcccggcggcggcagccacggcggctccaccatgtccctgtgggaggtgatgcagtcggacctgatccccgaggagcagcgggcccagctgatggctgacttccaggccggccgggtgaccaaggaacgcatgatcatcatcatcatcgagatcattgagaagacagagatcatccgccagcagggtctggcctcctacgactacgtgcgccgccgcctcacggctgaggacctgttcgaggctcggatcatctctctcgagacctacaacctgctccgggagggcaccaggagcctccgtgaggctctcgaggcggagtccgcctggtgctacctctatggcacgggctccgtggctggtgtctacctgcccggttccaggcagacactgagcatctaccaggctctcaagaaagggctgctgagtgccgaggtggcccgcctgctgctggaggcacaggcagccacaggcttcctgctggacccggtgaagggggagcggctgactgtggatgaggctgtgcggaagggcctcgtggggcccgagctgcacgaccgcctgctctcggctgagcgggcggtcaccggctaccgtgacccctacaccgagcagaccatctcgctcttccaggccatgaagaaggagctgatccctactgaggaggccctgcggctgctggatgcccagctggccaccggcggcatcgtggacccccgcctgggcttccaccttcccctggaggtggcttaccagcgtggctacctcaacaaggacacgcacgaccagctgtcagagcccagcgaggtgcgcagctacgtggacccgtccaccgacgagcgcctcagctacacgcagctgctcaggcggtgccgtcgtgacgacggcaccggccagctgctcctgccactgtcggacgcccgcaagctgaccttccgtggcctgcggaagcagatcaccatggaggagctggtgcgctcgcaggtcatggacgaggccacggcgctgcagctgcgggagggcctgacctccatcgaggaggtcaccaagaacttgcagaagttcctggaaggcaccagctgcatcgctggtgtcttcgtggacgccaccaaggaacggctctcggtgtaccaggccatgaagaagggcatcatccgccccggcacagcctttgagctcctggaggcgcaggcggccaccggttacgtcatcgaccccatcaagggactgaagctgacggtggaggaggctgtgcgtatgggcattgtgggccccgagttcaaggacaagctgctgtcggccgagcgcgccgtcactgggtacaaggacccctactctgggaagctcatctccctcttccaggccatgaagaagggcctgatcctgaaggaccatggcatccgcctgctggaggcccagatcgccacgggcggcatcatcgaccctgaggagagccaccggctgcccgtggaggtggcctacaagcgcggcctcttcgatgaggagatgaacgagatcctgaccgacccctcggacgacaccaagggcttctttgaccctaacacggaggagaacctcacctacctgcagctgatggagcgttgtatcactgacccccagacgggcctgtgtctcttgccgctgaaggagaagaagcgggagcggaagacgtcctccaagtcctccgtgcgcaagcgccgagtggtcatcgtggaccccgagacgggcaaggagatgtcagtgtacgaggcctaccgcaagggcctgattgaccaccagacgtacctggagctgtccgagcaggagtgcgagtgggaggagatcaccatctcctcctcggacggcgtggtcaagtccatgatcatcgaccgccgctccgggcgccagtacgacatcgatgatgccatcgccaagaacctcatcgaccgctcggcactggaccagtaccgcgccggcacgctctccatcaccgagttcgccgacatgctctcgggcaacgccggtggtttccgctcccgttcctcctcggtgggatcctcctcctcctaccccatcagccccgccgtctccaggacccagctggcctcctggtcagaccccactgaggagacgggccccgtggctggcatcctggacacggagacgctggagaaggtgtccatcaccgaggccatgcaccggaacctggtggataacatcacggggcagcggctgctggaggcgcaggcctgcaccgggggcatcatcgaccccagcaccggtgagcgcttccctgtcaccgacgccgtcaacaagggcctggtggacaagatcatggtggaccgcatcaacctggcccagaaggccttctgcggcttcgaggacccacgcaccaagaccaagatgtcggccgcccaggccctgaagaagggctggctctactacgaggccggccagcgcttcctggaggtgcagtacctgaccggcggcttgatcgagcccgacacgccgggccgcgtgcccctggacgaggccctgcagcgcggcacggtggacgcccgcaccgcacagaagctgcgtgacgtgggcgcctactccaagtacctcacctgccctaagaccaagctcaagatctcctataaggacgcgctggaccgcagcatggtggaggagggcacggggctgcggctgctggaggctgccgcgcagtccaccaagggctactacagcccctacagcgtcagcggctccggctctaccgctggctcccgcaccggctcgcgcaccggctcccgggccggctcccgccgcggcagctttgacgccaccggctccggcttctccatgaccttctcttcatcctcctactcctcctcgggctacggccgccgctacgcctcggggtcctcggcctccctggggggccctgagtctgccgtggcctga

SEQ ID NO: 166721 - DNA, 564 bp, Homo sapiens
  Payload ID: 12821
  Gene Symbol: PLEC
  Gene Name: plectin
  ENST ID: ENST00000528131
  CDS Start-End: 43-564
ctcggtgttggagggctgagagggagggaagggggagccaccatggatcaggtgagaagcctctccacagaggcctggcgaggtccaccctgctgcagcagagcaggtgcctgcgtgaggagggcctccagagggcagcggcagggctgtggtgggacctgcttgtgctcggagagcactggctgctgttgtccagtgcttggagatgagcgggatcgtgtgcagaagaaaaccttcaccaagtgggtcaacaagcacctcatcaaggcccagaggcacatcagtgacctgtatgaagacctccgcgatggccacaacctcatctccctgctggaggtcctctcgggggacagcctgccccgggagaaggggaggatgcgtttccacaagctgcagaatgtccagattgccctggactacctccggcaccgccaggtgaagctggtgaacatcaggaatgatgacatcgctgacggcaaccccaagctgacccttggcctcatctggacaatcattctgcacttccagatctcagatatccaggtgagtgggcagtcggaggac

SEQ ID NO: 166722 - DNA, 2115 bp, Homo sapiens
  Payload ID: 12821
  Gene Symbol: PLEC
  Gene Name: plectin
  ENST ID: ENST00000528025
  CDS Start-End: 7-2115
gaggccatgtcgggtgaggacgctgaggtccgggcagtctctgaagatgtctccaatggaagcagtggctcgcccagccctggggacacactgccctggaaccttgggaaaacgcagcggagccggcgcagcgggggtggcgctgggagcaacgggagtgtcctggacccagctgagcgggcggtcattcgcatcgcagatgagcgggatcgtgtgcagaagaaaaccttcaccaagtgggtcaacaagcacctcatcaagcactggcgggcagaggcccagaggcacatcagtgacctgtatgaagacctccgcgatggccacaacctcatctccctgctggaggtcctctcgggggacagcctgccgagggagcgggacgtaagcaggagctcacgcctgccccgggagaaggggaggatgcgtttccacaagctgcagaatgtccagattgccctggactacctccggcaccgccaggtgaagctggtgaacatcaggaatgatgacatcgctgacggcaaccccaagctgacccttggcctcatctggacaatcattctgcacttccagatctcagatatccaggtgagtgggcagtcggaggacatgacggccaaggagaagctgctgctgtggtcgcagcgaatggtggaggggtaccagggcctgcgatgcgacaacttcacctccagctggagagacggccgcctcttcaatgccatcatccaccggcacaagcccctgctcatcgacatgaacaaggtgtaccggcagaccaacctggagaacctggaccaggccttctctgtggcggagcgggacctgggagtgacgcggctcctggaccctgaggacgtggatgtccctcagcccgacgagaagtccatcatcacctacgtctcgtcgctgtatgacgccatgccccgcgtgccggacgtgcaggatggggtgagggccaacgagctgcagctgcgctggcaggagtaccgggagctggtgctgctgctgcttcagtggatgcgacaccacacggccgcctttgaggaacgcaggttcccctccagcttcgaggagattgagatcctgtggtctcagttcctgaagtttaaggagatggagctaccagccaaggaggccgacaagaacaggtccaagggcatctaccaatccctggagggagcggtgcaagcaggccagctcaaggtgccccctggctaccacccgctggatgtggagaaggagtggggcaagctgcacgtggccatcctggagcgggagaagcagctccgcagcgagtttgagaggctggagtgtcttcagcgcatcgtgaccaagctgcagatggaggcggggctgtgtgaggagcagctgaaccaggccgacgccctgctgcagtcggatgtccggctgctggctgcaggcaaagtgccacagcgggcgggggaggtggaacgggacttggacaaggcggatagcatgatccggctgctcttcaacgacgtgcagaccctcaaggatggacggcacccgcagggcgagcagatgtaccgcagggtgtaccgtctgcacgagcgcctggtagccatccgcaccgagtacaacctacggctgaaggcaggcgtggcggcccctgcaacccaggtggcccaggtgactctgcagagtgtgcagaggcgccccgagctggaggactccactctgcgctacctgcaggacctgctggcctgggtggaggagaaccagcaccgtgtggatggcgctgagtggggtgtggacctgcccagcgtggaggcgcagctgggcagccaccgaggcctgcaccagtccatcgaagaattccgggccaagatcgagcgggcacggagtgacgagggccagctctcccccgccacccggggtgcctaccgtgactgcctgggtcggctggacctgcagtacgccaagctgctgaactcctccaaggcccgcctcaggtccctggagagcttgcacagctttgtggcagccgccactaaggagctaatgtggctgaatgagaaggaggaggaggaggtgggcttcgactggagcgaccgcaacaccaacatgaccgccaagaaggagagctactcg

SEQ ID NO: 166723 - DNA, 7322 bp, Homo sapiens
  Payload ID: 12822
  Gene Symbol: PLAG1
  Gene Name: pleiomorphic adenoma gene 1
  Uniprot ID: Q6DJT9
  ENST ID: ENST00000316981
  CDS Start-End: 481-1983
ggcagcgcatacactacaatggctgctggaaagaggcgtaaggaaacaatttccaggcccgccgcgtccagcccgaaatatgagaaaaaaattattagaaattccgcgggcggtgtagaggcggcggacgggccggagggaggatgttaaagccccgcggttgcctcttggtgctgccttggccgtatttggcacccagaatgcttcattctgtgacggtctattaataaggttgccttgctagagtttggagcagggcctcagattggccaaaatgggaaggattggattccactctcttccacgaagagtcaatgggactggctaagatcaaagtctgaggctttttccatcagtaatcagtccctttttgctttcttttacgaccacatgaaacttgagaagccacctaaagctatatcatttagtggagttgggcagttcccaagtgtccaacaagaaggcctggtttaggctgcgatggccactgtcattcctggtgatttgtcagaagtaagagatacccagaaagtcccttcagggaaacgtaagcgtggtgaaaccaaaccaagaaaaaactttccttgccaactgtgtgacaaggcctttaacagtgttgagaaattaaaggttcactcctactctcacacaggagagaggccctacaagtgcatacaacaagactgcaccaaggcctttgtttctaagtacaaattacaaaggcacatggctactcattctcctgagaaaacccacaagtgtaattattgtgagaaaatgtttcaccggaaagatcatctgaagaatcacctccatacacacgaccctaacaaagagacgtttaagtgcgaagaatgtggcaagaactacaataccaagcttggatttaaacgtcacttggccttgcatgccgcaacaagtggtgacctcacctgtaaggtatgtttgcaaacttttgaaagcacgggagtgcttctggagcaccttaaatctcatgcaggcaagtcgtctggtggggttaaagaaaaaaagcaccagtgcgaacattgtgatcgccggttctacacccgaaaggatgtccggagacacatggtggtgcacactggaagaaaggacttcctctgtcagtattgtgcacagagatttgggcgaaaggatcacctgactcgacatatgaagaagagtcacaatcaagagcttctgaaggtcaaaacagaaccagtggatttccttgacccatttacctgcaatgtgtctgtgcctataaaagacgagctccttccggtgatgtccttaccttccagtgaactgttatcaaagccattcacaaacactttgcagttaaacctctacaacactccatttcagtccatgcagagctcgggatctgcccaccaaatgatcacaactttacctttgggaatgacatgcccaatagatatggacactgttcatccctctcaccacctttctttcaaatatccgttcagttctacctcatatgcaatttctattcctgaaaaagaacagccattaaagggggaaattgagagttacctgatggagttacaaggtggcgtgccctcttcatcccaagattctcaagcatcgtcatcatctaagctagggttggatcctcagattgggtccctagatgatggtgcaggagacctctccctatccaaaagctctatctccatcagtgaccccctaaacacaccagcattggatttttctcagttgtttaatttcatacctttaaatggtcctccctataatcctctatcagtggggagccttggaatgagctattcccaggaagaagcacattcttctgtttcccagctccccccacaaacacaggatcttcaggatcctgcaaacactatagggcttgggtctctgcactcactgtcagcagctttcaccagcagtttaagcacaagtaccaccctcccacgtttccatcaagcttttcagtaggattctgggacatggattcattacagaaatgtatgtgtagctgtgccctagatgaccatttttattttagtgcctactttaaaacagtataaaaatttctgcttttgtataatacaaattttcattaagccagtataaaatagaaactagcttttaaactgagctttggaaccatttgtgttcagttaagtttacctgggtattttgtcctgattcactgccaattgtcacattttaagacttttttttttccatataggaaagccattattagtagtaaacttttacaaatcccattttcaaattacttttagatcttaaaattttcatttttgtctaataacagtggctctaccttttgacatctggctcattaaaaaatttagcaatagaatgtaaattgtataaaaagtttgtgaataactcaagggtttaaattttcttactagcttctaaatggattaataatcaagtgcttcaaatgaattaagagtccagtttcggaagataataaatgtttgttagatacaccataatttcagatcagtatattctgaagactccctgttgtctggctaaaatatttgccatctttattatgagcctttaaggaaaacaaaccctaaacacaaagcatcagtatttatagcaaaaagagactctgttaggtgacatggcatttcgtgtcacttaatagttggccctaaattagtacacaggatattttgtcgtgtttcatccttcttaacatgctatcttttcatttaataatagtaatagtgtatggcattggggtcttcagagtcgatatataggtagatctctttagtcttttccacctttcacatccaaggggtgggtcaagtgcagccagcaatttattttcattgttggcccacggttagtccataatctagagccattgtggaactgcagccatgaggtgtgtttatcccacagtggattgactcagcctctgtgggtgacagacttctaagcaggaagatagacgtgaagcacatggttacatttgggaacttgtgtagggatcatggcccctgtagccagggttaaaaactggactttttagaagtaaagtaaaagcatatcgcttatatcatttcttgctgaatttgatatgtttttctttcccttaagaatcaaaagcagaaaacaaaaacaacagtcctactccgatgttatctttctgattcaatgtgaatccatctttccttgcaatattttggatggagaatttgaagttaaatgcattagaaaactacctgatgaactaccacaaagttttaagtgactagaaatatatacagtaaaatcccactttcatgcatctctgggaaatgataggagtattgcaaataagttgagtttgtagagggtaacaaagtaaagtaaaacaaacctatcttggttaacatgaaaataacaattgagaatatattatattcactgaataattataggcttttcctcacattagacaaccaacataatcttcttaaaggtctaattaatatatttttctaagggtcagttgggacattaacctaagaaacatatctattaagcacttgttaacaccttattttaggaccctttccgttggggatgggggcaagggtgggaggtttttagaagagtatatatctctttaaaaaaaaacagaaagaaaaatatttctgagcactcattagccctatatggaaacttctttcctttttgtagggccagttatcactgcagattgcaatgtttaccaagaatttctaaaaatgagtgcagattactgaatataatacattatttaaaatatttgggagtagtataatttgtggagaaatgtaaattgtaataatgtaaatgggggcttcaatatatatatataatacacacacacacacacatgcacacataccgcacttcatagaatcaaagttgctctctgaaggagctttggctcctgatattttatcatgctcctatatttttttaatccttggagcagtagtttttatacttatgtatttaaattttattatgaaaaattacatttattaaaaaagtgtgttccaaaggcattaaaattatatatgttaataaggaagtacatttttaaatttttcaaactgctcctagcttttgattaggagaatattttttctgaaagtaggcttttcgctctgcttcattactgcttcctttagtttctatgaaacagattgcttacctaaatctttagttgaatgattagtgttcaatattgctttaatcaccatataaaaggaaaaaaattggtgacagagcacaaatagaaaacctatttttaaatagaaatcacaaatagcaagtgtggaagcactactttattctgtttaaaatgtacttaagaagtcatcaaattagtgaactgagacattggccttagtaggctgtattcactgctaatttaaaaaagggagtaccaggatttattaagtaaagcattttggaaatggggaatagcgccatatatgtatgtatgtgtatgtgtgtgtgtgtgtgtgtatatatacacacacacacacatacttaaatcttgccctgcatgaaattcaaatacatggaggcacatcttcagggcaccagtgttaaaattttggagtcttaattttcatgtgtacacctctttgcctgttcccacccccagacttgaaataacacttcagagtaagagggaattcagctaatttgtttttaaaattgactgtagtggtcactaaaccctttttgagagaatttctattaaagatgaggcagactcgcttatttgaattgcacaatgttctaacaaggatgtaacacagaattggcttttttttccctagaaaaagattgtttgtttctatgtcaactagatatgattaaaaataagtattgccaatgctgttttcattctctagtggccagaatcattatccttgaaatttctggtagtgccttagcttggttaaaaaaaaaaaaaaaaaaaaaaaaaagggattaacattaaataaaagtagtttagaatttgggcctcagacaagatattgaacctcattcagtttcacttccacatgtatgtacaagttaggtcaccaaacacggaagtgtgagtgtggaaggatcttggcactgtaagcaatgctatccattgatgtatacaagtacctttatagttatcgatcactgttaaaactttcattttaaaatcctattaccaagttcagttttttaaaacttcaattgtcctggctgattatgcatcactctgtgtgcaacttttttatttcatttagtgtttctttcaagctgtgtatttttgcctatttgttgcttgtgctttatttttcttagtcatttgtggaatatagtgatatattgtgttaatttggacagtagcggtttttaaaaaccatatactgactgaaacatgagccagagccgattgctttattaagctaataatgaatgttaaagagtacatattttcaggatcgttcatctagtgagcaatacacatattataggccaatatttttttaaaaaatagagcttggtcaacctctatactacacatattacaagatatagcactttcaaaatgaatctaaacctttacagaaactttcttataggttatgccttttattttaagacttattataattcaagtgccattagatgatatatatgtaggcctttgatatataatgctttgtgtacaaaaatggtagatggtattttaaacaggtacatttttacagtgttttcttatcaatttgctatattgcacagaatcagtgtgtgtcttttcataaggttttacaatggtttatttttttacaaggtttacgtgtctcaaagcacactgtcttcccagtacgtaagttaaaaaataccagttcacccaagttgcttctagcctactgagatccatgtgacattggaggagatcttttaaatgtttagtattcgtcattagcaatggctggctgttagttctggtaaatgtgtgcctaagttgaatttgtcttgtttttctcacactgtgtcagcagccatgtctacaacacagataagtctgttgtgatcacatagatctacataagttgtgcagttttgtgctaaaaacccatagggagctcctttgggatcatagaaaagaagatcatgcaaccagcattggtgaaggcacactcagattgcacttagggcctttctatgatgttgtcaaccctctgaggatggaaggcagtgtcttttgatgttatctagcctagaaatgacacagaactattgctaatgtataaaacacttcattatataagcttcagtggtacagatgaaccagaatgaatgtttatcttctcagaaacactccttcaatattatattggatcatgctgctaatgtaacttgggctacaactcttcatggtgctacaaacttctctgtctcattcagtcgtatttttttatccatagaaaaaggactacattaggtgtaaaagtgtacaatatatttttatactgtgacttaatttgtcattaacaaacttttacaccaccacaatgtattcatgtgcacttgcaaaaggagatctcggacatgcaaatgttaccagaacaaacccagcttttgtccacaaggtgactgtaactcagaatggaaagtgggctttataatagggtgtggagtgaagaacatgctgtatgttactaacagccctttgaatttaacaaaaactgggaatccattaggaaacggattgcatcatacctgaacataagctggactgctgaaattgtatttttagctaatgaaaaagtgtttggactagtactctaaaaatgttctaatgataaagttttgagtcaaaatagaaaagaaaaaaatctgcattccaggccgaattttgtatatttttattgcatttaaaattgctattctgtaatattgggaaatcaagtggcttatcatgtatatcgtgtacttaaaatgtattcacaaactactgttgtatttgtataaaatatagacaaagatcatattttttgtgtgtgtataagctctgtaaaatagcaatcacattatgaagctgcagtgatactacattttaaacattcacatccaaagaagcagactatttattgtccatataccagatttaaaatattaatttgctgctaattaaataatagtactgcagcttcttgtggcctacagtgttatgtttgctgtaagaataagatatgtgaattccacaaaatatatgaataaaattatagaatggctttagataa

SEQ ID NO: 166724 - DNA, 1684 bp, Homo sapiens
  Payload ID: 12822
  Gene Symbol: PLAG1
  Gene Name: pleiomorphic adenoma gene 1
  Uniprot ID: Q6DJT9
  ENST ID: ENST00000423799
  CDS Start-End: 284-1540
agctgcaagttgggctgcaggggcagcgcatacactacaatggctgctggaaagaggcgtaaggaaacaatttccaggcccgccgcgtccagcccgaaatatgagaaaaaaattattagaaattccgcgggcggtgtagaggcggcggacgggccggagggaggatgttaaagccccgcgattggccaaaatgggaaggattggattccactctcttccacgaagagtcaatgggactggctaagatcaaagtctgaggctttttccatcagtaatcaggcacatggctactcattctcctgagaaaacccacaagtgtaattattgtgagaaaatgtttcaccggaaagatcatctgaagaatcacctccatacacacgaccctaacaaagagacgtttaagtgcgaagaatgtggcaagaactacaataccaagcttggatttaaacgtcacttggccttgcatgccgcaacaagtggtgacctcacctgtaaggtatgtttgcaaacttttgaaagcacgggagtgcttctggagcaccttaaatctcatgcaggcaagtcgtctggtggggttaaagaaaaaaagcaccagtgcgaacattgtgatcgccggttctacacccgaaaggatgtccggagacacatggtggtgcacactggaagaaaggacttcctctgtcagtattgtgcacagagatttgggcgaaaggatcacctgactcgacatatgaagaagagtcacaatcaagagcttctgaaggtcaaaacagaaccagtggatttccttgacccatttacctgcaatgtgtctgtgcctataaaagacgagctccttccggtgatgtccttaccttccagtgaactgttatcaaagccattcacaaacactttgcagttaaacctctacaacactccatttcagtccatgcagagctcgggatctgcccaccaaatgatcacaactttacctttgggaatgacatgcccaatagatatggacactgttcatccctctcaccacctttctttcaaatatccgttcagttctacctcatatgcaatttctattcctgaaaaagaacagccattaaagggggaaattgagagttacctgatggagttacaaggtggcgtgccctcttcatcccaagattctcaagcatcgtcatcatctaagctagggttggatcctcagattgggtccctagatgatggtgcaggagacctctccctatccaaaagctctatctccatcagtgaccccctaaacacaccagcattggatttttctcagttgtttaatttcatacctttaaatggtcctccctataatcctctatcagtggggagccttggaatgagctattcccaggaagaagcacattcttctgtttcccagctccccccacaaacacaggatcttcaggatcctgcaaacactatagggcttgggtctctgcactcactgtcagcagctttcaccagcagtttaagcacaagtaccaccctcccacgtttccatcaagcttttcagtaggattctgggacatggattcattacagaaatgtatgtgtagctgtgccctagatgaccatttttattttagtgcctactttaaaacagtataaaaatttctgcttttgtataatacaaattttcattaagccagtataaaataga

SEQ ID NO: 166725 - DNA, 1899 bp, Homo sapiens
  Payload ID: 12822
  Gene Symbol: PLAG1
  Gene Name: pleiomorphic adenoma gene 1
  Uniprot ID: Q6DJT9
  ENST ID: ENST00000429357
  CDS Start-End: 397-1899
agctgcaagttgggctgcaggggcagcgcatacactacaatggctgctggaaagaggcgtaaggaaacaatttccaggcccgccgcgtccagcccgaaatatgagaaaaaaattattagaaattccgcgggcggtgtagaggcggcggacgggccggagggaggatgttaaagccccgcgattggccaaaatgggaaggattggattccactctcttccacgaagagtcaatgggactggctaagatcaaagtctgaggctttttccatcagtaatcagtccctttttgctttcttttacgaccacatgaaacttgagaagccacctaaagctatatcatttagtggagttgggcagttcccaagtgtccaacaagaaggcctggtttaggctgcgatggccactgtcattcctggtgatttgtcagaagtaagagatacccagaaagtcccttcagggaaacgtaagcgtggtgaaaccaaaccaagaaaaaactttccttgccaactgtgtgacaaggcctttaacagtgttgagaaattaaaggttcactcctactctcacacaggagagaggccctacaagtgcatacaacaagactgcaccaaggcctttgtttctaagtacaaattacaaaggcacatggctactcattctcctgagaaaacccacaagtgtaattattgtgagaaaatgtttcaccggaaagatcatctgaagaatcacctccatacacacgaccctaacaaagagacgtttaagtgcgaagaatgtggcaagaactacaataccaagcttggatttaaacgtcacttggccttgcatgccgcaacaagtggtgacctcacctgtaaggtatgtttgcaaacttttgaaagcacgggagtgcttctggagcaccttaaatctcatgcaggcaagtcgtctggtggggttaaagaaaaaaagcaccagtgcgaacattgtgatcgccggttctacacccgaaaggatgtccggagacacatggtggtgcacactggaagaaaggacttcctctgtcagtattgtgcacagagatttgggcgaaaggatcacctgactcgacatatgaagaagagtcacaatcaagagcttctgaaggtcaaaacagaaccagtggatttccttgacccatttacctgcaatgtgtctgtgcctataaaagacgagctccttccggtgatgtccttaccttccagtgaactgttatcaaagccattcacaaacactttgcagttaaacctctacaacactccatttcagtccatgcagagctcgggatctgcccaccaaatgatcacaactttacctttgggaatgacatgcccaatagatatggacactgttcatccctctcaccacctttctttcaaatatccgttcagttctacctcatatgcaatttctattcctgaaaaagaacagccattaaagggggaaattgagagttacctgatggagttacaaggtggcgtgccctcttcatcccaagattctcaagcatcgtcatcatctaagctagggttggatcctcagattgggtccctagatgatggtgcaggagacctctccctatccaaaagctctatctccatcagtgaccccctaaacacaccagcattggatttttctcagttgtttaatttcatacctttaaatggtcctccctataatcctctatcagtggggagccttggaatgagctattcccaggaagaagcacattcttctgtttcccagctccccccacaaacacaggatcttcaggatcctgcaaacactatagggcttgggtctctgcactcactgtcagcagctttcaccagcagtttaagcacaagtaccaccctcccacgtttccatcaagcttttcagtag

SEQ ID NO: 166726 - DNA, 3663 bp, Homo sapiens
  Payload ID: 12823
  Gene Symbol: PLAGL1
  Gene Name: pleiomorphic adenoma gene-like 1
  Uniprot ID: Q9UM63
  ENST ID: ENST00000354765
  CDS Start-End: 1150-2541
ccgagccccgcctgcgcgcggcctcctcggcgcagccatcctcttggctgccgcgggcggcaaagcccacggcatctgccatttgtcattcagcccgtcggtaccgccccgagccttgatttagacacggctggggcgtgctctggcctcactctccgggcgggtgctggacggacggacggacggggcagccgtgctcacagctcagcagcgcggggccttggcgcgcggggcgcttccccgggtcgccgtcatggccgcggaggtggcacgcccgagcggcctcgcctgagctccgggggtcgtcgccccgcaggattgttcctgcctgattcataaacatcgtgattggcttttgattgctgtcacgtctaatgtggctgctgcctcgtgtcacatctgaaactcatctgtacctcacttagaaagtttctttctataacacaagcctgaacatattgctctcctgattaacaactttcagtggttctgattagacaagacttttcgttgcagtcgacagaaacctaatgggaccattgaagaattccaaacagggtctttataagcttcttctgaaggtctcagacattcagccacggaactcaagtggaatttgtttggataacgtgactgatttcaaagcccggaccccttagacgtgcccatttggtgctgcaagtatttgcataggaatcagaggagttaatcttcttcattccctgacgatgtacaaggtctcttctcacaggtttgaatcttcagacaaacttctgggaggactcggtccctgcctcgcagcagatgttccctgtcactcagtagccaatccgggggacccaggacatgccccagctatagtgatgcagattacctttctgctcctgaatcgcacctgtgcctcagactttctcccctcagcttgagactgcatgtaaactgggatgtgtgaaagcaggaagcaaagctagtgacagctgagaggtccatgtctgggtagaaccaggcccacgatgctgcctctcccgtggtctggagttcagctgcagggactctgctgatgtgcccagcaccatcgttctgtttgtgcttaaatggcacagcatttggtcagcacatctgaaaaggaaggtgtgagaagcaaagcccatggccacgttcccctgccagttatgtggcaagacgttcctcaccctggagaagttcacgattcacaattattcccactccagggagcggccgtacaagtgtgtgcagcctgactgtggcaaagcctttgtttccagatataaattgatgaggcatatggctacccattctccccagaaatctcaccagtgtgctcactgtgagaagacgttcaaccggaaagaccacctgaaaaaccacctccagacccacgaccccaacaaaatggcctttgggtgtgaggagtgtgggaagaagtacaacaccatgctgggctataagaggcacctggccctccatgcggccagcagtggggacctcacctgtggggtctgtgccctggagctagggagcaccgaggtgctactggaccacctcaaagcccatgcggaagagaagccccctagcggaaccaaggaaaagaagcaccagtgcgaccactgtgaaagatgcttctacacccggaaggatgtgcgacgccacctggtggtccacacaggatgcaaggacttcctgtgccagttctgtgcccagagatttgggcgcaaggatcacctcacccggcataccaagaagacccactcacaggagctgatgaaagagagcttgcagaccggagaccttctgagcaccttccacaccatctcgccttcattccaactgaaggctgctgccttgcctcctttccctttaggagcttctgcccagaacgggcttgcaagtagcttgccagctgaggtccatagcctcaccctcagtcccccagaacaagccgcccagcctatgcagccgctgccagagtccctggcctccctccacccctcggtatcccctggctctcctccgccaccccttcccaatcacaagtacaacaccacttctacctcatactccccacttgcaagcctgcccctcaaagcagatactaaaggtttttgcaatatcagtttgtttgaggacttgcctctgcaagagcctcagtcacctcaaaagctcaacccaggttttgatctggctaagggaaatgctggtaaagtaaacctgcccaaggagctgcctgcagatgctgtgaacctaacaatacctgcctctctggacctgtcccccctgttgggcttctggcagctgccccctcctgctacccaaaatacctttgggaatagcactcttgccctggggcctggggaatctttgccccacaggttaagctgtctggggcagcagcagcaagaacccccacttgccatgggcactgtgagcctgggccagctccccctgccccccatccctcatgtgttctcagctggcactggctctgccatcctgcctcatttccatcatgcattcagataattgatttttaaagtgtatttttcgtattctggaagatgttttaagaagcattttaaatgtcagttacaatatgagaaagatttggaaaacgagactgggactatggcttattcagtgatgactggcttgagatgataagagaattctcgaactgcatgtattgtgccaatctgtcctgagtgttcatgctttgtaccaaatttaatgaacgcgtgttctgtaatcaaactgcaaatattgtcataaccaacatccaaaatgacggctgctatatataagtgtttgtcatatggaatttaatcgtaagccatgatcataatgttaactaaataactttatgtggcactgcctagtaagggaactatggaaaggtttggatttctccaaatctgggagaattttcaaaataagaaaataacctttatatgatatactatgactaggctgtgtatttcttttcagggatttttctaccttcagggttggatgtagtttagttactattaccatagccaacctgtagttttacatatacattttcttgtggagcaatagagttctccattttacagaagcattttaaatgtagtttgaatattttccacaagatgctgcaatgtgagttatcacttcatttatcttaaagaaagactaaactggttgtcagttacatctgacagaaaaaaaaaaaaaatcactgtgtaaccaggttaagtggtaaaataatccaggcgtcagtcaaaggcattttgctgactttaatattgattatatttttaacaggaatttaagaaaatattactggaattaaaaatatatatatattaaacaagaattttctttgctctgtctagcttaaactactactcaagctgcttaagttcttaagtattgtttgtaatcaccaataaataagtgcatttgtaattcatcagtcattattagcttttattaaaagaagattacgttttacaatgtaactataatctcttgaatttggtatcttattaatgagttttaaagatgtaaaacctaaccttttttaaagctccattgtcttatgtttttagaggcttttccgtaaacatatatcttacatataataaacttttcaaatcttgc

SEQ ID NO: 166727 - DNA, 4430 bp, Homo sapiens
  Payload ID: 12823
  Gene Symbol: PLAGL1
  Gene Name: pleiomorphic adenoma gene-like 1
  Uniprot ID: Q9UM63
  ENST ID: ENST00000360537
  CDS Start-End: 1915-3306
gattgctgtcacgtctaatgtggctgctgcctcgtgtcacatctgaaactcatctgtacctcacttagaaagtggttctgattagacaagacttttcgttgcagtcgacagaaacctaatgggaccattgaagaattccaaacaggcaagtgacaggaacatatttgcatgttagaagaatcagcctggcagcagcattgtgattagaatgaaggggaaccgtccaaaaacagactggggaaccaatatggatctgcctctagcatgcggaaatatctctctacactgacctaactgactcactaagcttgtggtttgtttaaaggaagccacatgaaaattgagtttgggccaatagagtgaactcgttctccattctctagcatccctccccatgcaaccaccctatccctgccaagtttctgggcaccacagattggaaagtagcctcctgtaggtatttgcccatgttaagtggtggggtctctttctgtcttcccttcttggtctcacctgtctggtgtgacaagggaagcatgtgccaaccaaggctagacccttgtgagaccagagcagccccactttcggtaaagcaagcaacctctgcttacttgcccaacacaccctagcttccgtgttccttgccttgtgagttatcttcttgggtacaatttaacacagcgttcccacctccttataactaaaatagctagagggggctttgtgcctcaaaccccaaggagaccatcttggcaatctctgcctctgcaacagggcacttgctccctgggcaactcctttcccaggtcatcttctcccttgacatgcccatcagatttaatagtgtgcctatttggcagaaaaatggggtcccttggttgctgattcttaggaatgtgaggttctcccagccagagctctcagcactaaaagttctagtctctgcgtaatggccggcatatctttggcgtatctaaaatcctcttcagtttccagcagggtctttataagcttcttctgaaggtctcagacattcagccacggaactcaagtggaatttgtttggataacgtgactgatttcaaagcccggaccccttagacgtgcccatttggtgctgcaagtactgaccattactacaacatcttacagtcaacaaatttgacacattaaagatttatatcctttcttttgggttaggatcttctctcccctaaagcatctcagtttccagcatgcaatcatttccatcttatggaaatcagccatcccgctccgtgccagcatgctaccctgggaggcacatccaggcttgggaaacgggggtgtcctggatctcatgactccagcagcaccagctgctctctttcctcttccaagtagacttccgttccccccccacttgggtgtttttgtttgttttagcaattcagagctcaagataaagaccttaaagataactttgtgtgtctctccctttctaggtatttgcataggaatcagaggagttaatcttgtttgaatcttcagacaaacttctgggaggactcggtccctgcctcgcagcagatgttccctgtcactcagtagccaatccgggggacccaggacatgccccagctatagtgatgcagattacctttctgctcctgaatcgcacctgtgcctcagactttctcccctcagcttgagactgcatgtaaactgggatgtgtgaaagcaggaagcaaagctagtgacagctgagaggtccatgtctgggtagaaccaggcccacgatgctgcctctcccgtggtctggagttcagctgcagggactctgctgatgtgcccagcaccatcgttctgtttgtgcttaaatggcacagcatttggtcagcacatctgaaaaggaaggtgtgagaagcaaagcccatggccacgttcccctgccagttatgtggcaagacgttcctcaccctggagaagttcacgattcacaattattcccactccagggagcggccgtacaagtgtgtgcagcctgactgtggcaaagcctttgtttccagatataaattgatgaggcatatggctacccattctccccagaaatctcaccagtgtgctcactgtgagaagacgttcaaccggaaagaccacctgaaaaaccacctccagacccacgaccccaacaaaatggcctttgggtgtgaggagtgtgggaagaagtacaacaccatgctgggctataagaggcacctggccctccatgcggccagcagtggggacctcacctgtggggtctgtgccctggagctagggagcaccgaggtgctactggaccacctcaaagcccatgcggaagagaagccccctagcggaaccaaggaaaagaagcaccagtgcgaccactgtgaaagatgcttctacacccggaaggatgtgcgacgccacctggtggtccacacaggatgcaaggacttcctgtgccagttctgtgcccagagatttgggcgcaaggatcacctcacccggcataccaagaagacccactcacaggagctgatgaaagagagcttgcagaccggagaccttctgagcaccttccacaccatctcgccttcattccaactgaaggctgctgccttgcctcctttccctttaggagcttctgcccagaacgggcttgcaagtagcttgccagctgaggtccatagcctcaccctcagtcccccagaacaagccgcccagcctatgcagccgctgccagagtccctggcctccctccacccctcggtatcccctggctctcctccgccaccccttcccaatcacaagtacaacaccacttctacctcatactccccacttgcaagcctgcccctcaaagcagatactaaaggtttttgcaatatcagtttgtttgaggacttgcctctgcaagagcctcagtcacctcaaaagctcaacccaggttttgatctggctaagggaaatgctggtaaagtaaacctgcccaaggagctgcctgcagatgctgtgaacctaacaatacctgcctctctggacctgtcccccctgttgggcttctggcagctgccccctcctgctacccaaaatacctttgggaatagcactcttgccctggggcctggggaatctttgccccacaggttaagctgtctggggcagcagcagcaagaacccccacttgccatgggcactgtgagcctgggccagctccccctgccccccatccctcatgtgttctcagctggcactggctctgccatcctgcctcatttccatcatgcattcagataattgatttttaaagtgtatttttcgtattctggaagatgttttaagaagcattttaaatgtcagttacaatatgagaaagatttggaaaacgagactgggactatggcttattcagtgatgactggcttgagatgataagagaattctcgaactgcatgtattgtgccaatctgtcctgagtgttcatgctttgtaccaaatttaatgaacgcgtgttctgtaatcaaactgcaaatattgtcataaccaacatccaaaatgacggctgctatatataagtgtttgtcatatggaatttaatcgtaagccatgatcataatgttaactaaataactttatgtggcactgcctagtaagggaactatggaaaggtttggatttctccaaatctgggagaattttcaaaataagaaaataacctttatatgatatactatgactaggctgtgtatttcttttcagggatttttctaccttcagggttggatgtagtttagttactattaccatagccaacctgtagttttacatatacattttcttgtggagcaatagagttctccattttacagaagcattttaaatgtagtttgaatattttccacaagatgctgcaatgtgagttatcacttcatttatcttaaagaaagactaaactggttgtcagttacatctgacagaaaaaaaaaaaaaatcactgtgtaaccaggttaagtggtaaaataatccaggcgtcagtcaaaggcattttgctgactttaatattgattatatttttaacaggaatttaagaaaatattactggaattaaaaatatatatatattaaacaagaattttctttgctctgtctagcttaaactactactcaagctgcttaagttcttaagtattgtttgtaatcaccaataaataagtgcatttgtaattcatcagtcattattagcttttattaaaagaagattacgttttacaatgtaactataatctcttgaatttggtatcttattaatgagttttaaagatgtaaaacctaaccttttttaaagctccattgtcttatgtttttagaggcttttccgtaaacatatatcttacatataataaacttttcaaatcttgcaa

SEQ ID NO: 166728 - DNA, 2800 bp, Homo sapiens
  Payload ID: 12823
  Gene Symbol: PLAGL1
  Gene Name: pleiomorphic adenoma gene-like 1
  Uniprot ID: Q9UM63
  ENST ID: ENST00000367571
  CDS Start-End: 1269-2660
tgaataaatcacttaggcgagatataaattggctttgttccatagcagatttgcctttgtactagttaagaaaatcctgaaaagctttccctgtaagaggatcagttggttggaatagccttggtaggaagaagccaagtttgataattacttggtgaacggaaatgctggtttccaaatgctcatcagggttcagtggcacaaagctggctgtagacttggcttctgtagatttggtaaaaacgtaaattcctggggtcccagtgatgctgttttagtctgtactgatttgccctgtggccacccaggaatctgtatttttaaaagttttccatgctgattctaatgcatagccaggtttagtaaccatttaattcagtattcaacttagagacttcaaccttcttgcactgcaaatttgataaatctttgtttatatgaatctcctttgttgagtgccaactggttatttgctgactttctttcaattcagaatttgttttaggttctgttattgcatagatttgcatacctgttttatggtattttaatactgttggttttaaaaaataccatttcctctgagtgctgttctgaatatattatgtaagcaattttgtgtgttcttttttttccacttgcataaagcaggggaaaagttgagagtttttcttaatccagttgcaagtaggacaaaggatatgagtgtttaaagatcatctattaaaatgcatgaaaaaacactagaaaatctcctgtgcacatcgccagtcgtgtgtgtgctctagaagtgaagttcagggggtaacataatggaggaatgttttcctagcttcattccctgacgatgtacaaggtctcttctcacaggtttgaatcttcagacaaacttctgggaggactcggtccctgcctcgcagcagatgttccctgtcactcagtagccaatccgggggacccaggacatgccccagctatagtgatgcagattacctttctgctcctgaatcgcacctgtgcctcagactttctcccctcagcttgagactgcatgtaaactgggatgtgtgaaagcaggaagcaaagctagtgacagctgagaggtccatgtctgggtagaaccaggcccacgatgctgcctctcccgtggtctggagttcagctgcagggactctgctgatgtgcccagcaccatcgttctgtttgtgcttaaatggcacagcatttggtcagcacatctgaaaaggaaggtgtgagaagcaaagcccatggccacgttcccctgccagttatgtggcaagacgttcctcaccctggagaagttcacgattcacaattattcccactccagggagcggccgtacaagtgtgtgcagcctgactgtggcaaagcctttgtttccagatataaattgatgaggcatatggctacccattctccccagaaatctcaccagtgtgctcactgtgagaagacgttcaaccggaaagaccacctgaaaaaccacctccagacccacgaccccaacaaaatggcctttgggtgtgaggagtgtgggaagaagtacaacaccatgctgggctataagaggcacctggccctccatgcggccagcagtggggacctcacctgtggggtctgtgccctggagctagggagcaccgaggtgctactggaccacctcaaagcccatgcggaagagaagccccctagcggaaccaaggaaaagaagcaccagtgcgaccactgtgaaagatgcttctacacccggaaggatgtgcgacgccacctggtggtccacacaggatgcaaggacttcctgtgccagttctgtgcccagagatttgggcgcaaggatcacctcacccggcataccaagaagacccactcacaggagctgatgaaagagagcttgcagaccggagaccttctgagcaccttccacaccatctcgccttcattccaactgaaggctgctgccttgcctcctttccctttaggagcttctgcccagaacgggcttgcaagtagcttgccagctgaggtccatagcctcaccctcagtcccccagaacaagccgcccagcctatgcagccgctgccagagtccctggcctccctccacccctcggtatcccctggctctcctccgccaccccttcccaatcacaagtacaacaccacttctacctcatactccccacttgcaagcctgcccctcaaagcagatactaaaggtttttgcaatatcagtttgtttgaggacttgcctctgcaagagcctcagtcacctcaaaagctcaacccaggttttgatctggctaagggaaatgctggtaaagtaaacctgcccaaggagctgcctgcagatgctgtgaacctaacaatacctgcctctctggacctgtcccccctgttgggcttctggcagctgccccctcctgctacccaaaatacctttgggaatagcactcttgccctggggcctggggaatctttgccccacaggttaagctgtctggggcagcagcagcaagaacccccacttgccatgggcactgtgagcctgggccagctccccctgccccccatccctcatgtgttctcagctggcactggctctgccatcctgcctcatttccatcatgcattcagataattgatttttaaagtgtatttttcgtattctggaagatgttttaagaagcattttaaatgtcagttacaatatgagaaagatttggaaaacgagactgggactatggcttattcagtgatgactggcttgagatgataaga

SEQ ID NO: 166729 - DNA, 2496 bp, Homo sapiens
  Payload ID: 12823
  Gene Symbol: PLAGL1
  Gene Name: pleiomorphic adenoma gene-like 1
  Uniprot ID: Q9UM63
  ENST ID: ENST00000367572
  CDS Start-End: 175-1410
gctcaagataaagaccttaaagataactttgtgtgtctctccctttctaggtatttgcataggaatcagaggagttaatcttgtctcttctcacaggtttgaatcttcagacaaacttctgggaggactcggtccctgcctcgcagcagatgttccctgtcactcagtaggcatatggctacccattctccccagaaatctcaccagtgtgctcactgtgagaagacgttcaaccggaaagaccacctgaaaaaccacctccagacccacgaccccaacaaaatggcctttgggtgtgaggagtgtgggaagaagtacaacaccatgctgggctataagaggcacctggccctccatgcggccagcagtggggacctcacctgtggggtctgtgccctggagctagggagcaccgaggtgctactggaccacctcaaagcccatgcggaagagaagccccctagcggaaccaaggaaaagaagcaccagtgcgaccactgtgaaagatgcttctacacccggaaggatgtgcgacgccacctggtggtccacacaggatgcaaggacttcctgtgccagttctgtgcccagagatttgggcgcaaggatcacctcacccggcataccaagaagacccactcacaggagctgatgaaagagagcttgcagaccggagaccttctgagcaccttccacaccatctcgccttcattccaactgaaggctgctgccttgcctcctttccctttaggagcttctgcccagaacgggcttgcaagtagcttgccagctgaggtccatagcctcaccctcagtcccccagaacaagccgcccagcctatgcagccgctgccagagtccctggcctccctccacccctcggtatcccctggctctcctccgccaccccttcccaatcacaagtacaacaccacttctacctcatactccccacttgcaagcctgcccctcaaagcagatactaaaggtttttgcaatatcagtttgtttgaggacttgcctctgcaagagcctcagtcacctcaaaagctcaacccaggttttgatctggctaagggaaatgctggtaaagtaaacctgcccaaggagctgcctgcagatgctgtgaacctaacaatacctgcctctctggacctgtcccccctgttgggcttctggcagctgccccctcctgctacccaaaatacctttgggaatagcactcttgccctggggcctggggaatctttgccccacaggttaagctgtctggggcagcagcagcaagaacccccacttgccatgggcactgtgagcctgggccagctccccctgccccccatccctcatgtgttctcagctggcactggctctgccatcctgcctcatttccatcatgcattcagataattgatttttaaagtgtatttttcgtattctggaagatgttttaagaagcattttaaatgtcagttacaatatgagaaagatttggaaaacgagactgggactatggcttattcagtgatgactggcttgagatgataagagaattctcgaactgcatgtattgtgccaatctgtcctgagtgttcatgctttgtaccaaatttaatgaacgcgtgttctgtaatcaaactgcaaatattgtcataaccaacatccaaaatgacggctgctatatataagtgtttgtcatatggaatttaatcgtaagccatgatcataatgttaactaaataactttatgtggcactgcctagtaagggaactatggaaaggtttggatttctccaaatctgggagaattttcaaaataagaaaataacctttatatgatatactatgactaggctgtgtatttcttttcagggatttttctaccttcagggttggatgtagtttagttactattaccatagccaacctgtagttttacatatacattttcttgtggagcaatagagttctccattttacagaagcattttaaatgtagtttgaatattttccacaagatgctgcaatgtgagttatcacttcatttatcttaaagaaagactaaactggttgtcagttacatctgacagaaaaaaaaaaaaaatcactgtgtaaccaggttaagtggtaaaataatccaggcgtcagtcaaaggcattttgctgactttaatattgattatatttttaacaggaatttaagaaaatattactggaattaaaaatatatatatattaaacaagaattttctttgctctgtctagcttaaactactactcaagctgcttaagttcttaagtattgtttgtaatcaccaataaataagtgcatttgtaattcatcagtcattattagcttttattaaaagaagattacgttttacaatgtaactataatctcttgaatttggtatcttattaatgagttttaaagatgtaaaacctaaccttttttaaagctccattgtcttatgtttttagaggcttttccgtaaac

SEQ ID NO: 166730 - DNA, 6296 bp, Homo sapiens
  Payload ID: 12823
  Gene Symbol: PLAGL1
  Gene Name: pleiomorphic adenoma gene-like 1
  ENST ID: ENST00000392307
  CDS Start-End: 4416-5174
tattcttattctctcctcgcattacagcacaaaccagagccttcgcctcctccatggtagaggggcttatgtcccagaaaagactttgtgagagaatttacatttgaggaacttcaggccttgagggggaaaataaggttgggggattaagatgtggacttaatgaaagcctgtttttcactctaaaaattcaagaggacacgctaagaacgatcattgctatttatctgtcttaaattagaaatcatgggcattgtacagttgatttttacttatcatgacttgctcactagaaacttcgtgatctctttctgttatattttaaaaagatgtttttaaatggttttatcttaaagaaatattaggaaaaaaaaaactgaggtagggtccaccatttagaatcagatatctagaatgtaacgtatgttacaattcagagtctctaaaccactctcctaaaatcataatatgagatgattctcagcttgccaaattttctagagttgtgaaataggttatgtcactcaaccagtgtttatttgagggaattcatggttggcagggtccccattatacatcagaagtttttatttcttattttctatcactcatgtaaagattaggatttgtttgaactgcctatttcaagataatgattccaaatcccagccttaaatttcatatctaacatgtttgttgtttttccctgtcccatacattaattctaggttcaaggccatgtcaccctaaagcagccctcacttcttttgcagctgcagtgctgttgcttaaccataactcttggcctctctccagactgtttttttttttttttttttttgcaaaatgtccttgatggtcataatggtgtattttttaaaaattccagttgtttttgtaagttttcttatatcccatcttacattcaattccccctgcaaacctcccactagataaaccacttcccgctctattctttgtcttgagactgacttctaggaaggctgtccacagctgcctcaggccgaaggctaactaggagaatattaggtcgtgtgcttggattcctgttctccaaacgattctaattaaaactagtccactacccccaccaacacgttcagaaggaaaaaaatgtagcagaatccccaaatgccctcatcacttcattataccatttgggtagctttatggcacctgtaggactagttcatgccaggcccatttgtaactgttttctctagttaaacatgatattgccattaacagcacattaaataggattacactgcttaagaatctaggaatttctcaaatatatgagaaaatgtgaaagcacagggataatagaaatttattttataaacacatgctaggagatggaattgtgtcatgatgatccacattaaagaaacatgattgaagtgaatccattatttatactctgactttccattatatatatatattactccaaaagaagttattcatgtttcctaattgtgagcttacccatcgtgtaaaattggccctaacacttattcacaggccacatctacttcgtacatgtactttgcctctgtatgtacacgtgtaacgcataaccgtatatcagctctgcaagatacatagatatccccattttatggtgacggagactgaggcttagagaagttatgcaacttacctaaagttacacaccttccaagcagcagagccagcattcgaacttagacccatctgactccaaagccagtgccctctacactagaccacactgtctttcttaggttggatctaaaaaaatactaccagctggttggttttttaactaactgtaggaacacaacctagtattaagtagagtatgcatgctgcatagtggactgaggtagagtaaaacccattattgtaccacttttaggtaagaaaatgtattatctaaggaatatcattaaaatttccttacttccctccatgaacaaacaaaaaattaaaatgaaagcagtgggggatgaagggaggcggggatcataacataggagtgttaaatattaaaattagaaaagaaaataatttctctatcaatgtttaaaatgctagaaattatgcatgcttatactataacaaagaatactttatttggggaataacttaattgatccatgatgtggcatttaccaaggtaatttttccctttttgttccagcagtaggaattagaggtggttcataaaacacacaatcaccatgtaaattgaaaccgcattaagatcatagtcatcttatgttgtttccctaaaatggttctcatttgccccacatattcaaatcagagtgcacaaagatgttgtgctgagtcagggaagatttagaatgctctgtgaacagttttatactgaacttcagagttcagttattgtacttattttttggtgtgtgtgtgtgcacagttgggttttttgtttgttttgctatttgaattactgtttggccattttaatgtatataactgataaatccaggaggataatctgtatgtctgctctctcagtttctttctataacacaagcctgaacatattgctctcctgattaacaactttcagtggttctgattagacaagacttttcgttgcagtcgacagaaacctaatgggaccattgaagaattccaaacaggcaagtgacaggaacatatttgcatgttagaagaatcagcctggcagcagcattgtgattagaatgaaggggaaccgtccaaaaacagactggggaaccaatatggatctgcctctagcatgcggaaatatctctctacactgacctaactgactcactaagcttgtggtttgtttaaaggaagccacatgaaaattgagtttgggccaatagagtgaactcgttctccattctctagcatccctccccatgcaaccaccctatccctgccaagtttctgggcaccacagattggaaagtagcctcctgtaggtatttgcccatgttaagtggtggggtctctttctgtcttcccttcttggtctcacctgtctggtgtgacaagggaagcatgtgccaaccaaggctagacccttgtgagaccagagcagccccactttcggtaaagcaagcaacctctgcttacttgcccaacacaccctagcttccgtgttccttgccttgtgagttatcttcttgggtacaatttaacacagcgttcccacctccttataactaaaatagctagagggggctttgtgcctcaaaccccaaggagaccatcttggcaatctctgcctctgcaacagggcacttgctccctgggcaactcctttcccaggtcatcttctcccttgacatgcccatcagatttaatagtgtgcctatttggcagaaaaatggggtcccttggttgctgattcttaggaatgtgaggttctcccagccagagctctcagcactaaaagttctagtctctgcgtaatggccggcatatctttggcgtatctaaaatcctcttcagtttccagcagggtctttataagcttcttctgaaggtctcagacattcagccacggaactcaagtggaatttgtttggataacgtgactgatttcaaagcccggaccccttagacgtgcccatttggtgctgcaagtactgaccattactacaacatcttacagtcaacaaatttgacacattaaagatttatatcctttcttttgggttaggatcttctctcccctaaagcatctcagtttccagcatgcaatcatttccatcttatggaaatcagccatcccgctccgtgccagcatgctaccctgggaggcacatccaggcttgggaaacgggggtgtcctggatctcatgactccagcagcaccagctgctctctttcctcttccaagtagacttccgttccccccccacttgggtgtttttgtttgttttagcaattcagagctcaagataaagaccttaaagataactttgtgtgtctctccctttctaggtatttgcataggaatcagaggagttaatcttgcatatggctacccattctccccagaaatctcaccagtgtgctcactgtgagaagacgttcaaccggaaagaccacctgaaaaaccacctccagacccacgaccccaacaaaatggcctttgggtgtgaggagtgtgggaagaagtacaacaccatgcggaagagaagccccctagcggaaccaaggaaaagaagcaccagtgcgaccactgtgaaagatgcttctacacccggaaggatgtgcgacgccacctggtggtccacacaggatgcaaggacttcctgtgccagttctgtgcccagagatttgggcgcaaggatcacctcacccggcataccaagaagacccactcacaggagctgatgaaagagagcttgcagaccggagaccttctgagcaccttccacaccatctcgccttcattccaactgaaggctgctgccttgcctcctttccctttaggagcttctgcccagaacgggcttgcaagtagcttgccagctgaggtccatagcctcaccctcagtcccccagaacaagccgcccagcctatgcagccgctgccagagtccctggcctccctccacccctcggtatcccctggctctcctccgccaccccttcccaatcacaagtacaacaccacttctacctcatactccccacttgcaagcctgcccctcaaagcagatactaaaggtttttgcaatatcagtttgtttgaggacttgcctctgcaagagcctcagtcacctcaaaagctcaacccaggttttgatctggctaagggaaatgctggtaaagtaaacctgcccaaggagctgcctgcagatgctgtgaacctaacaatacctgcctctctggacctgtcccccctgttgggcttctggcagctgccccctcctgctacccaaaatacctttgggaatagcactcttgccctggggcctggggaatctttgccccacaggttaagctgtctggggcagcagcagcaagaacccccacttgccatgggcactgtgagcctgggccagctccccctgccccccatccctcatgtgttctcagctggcactggctctgccatcctgcctcatttccatcatgcattcagataattgatttttaaagtgtatttttcgtattctggaagatgttttaagaagcattttaaatgtcagttacaatatgagaaagatttggaaaacgagactgggactatggcttattcagtgatgactggcttgagatgataagagaattctcgaactgcatgtattgtgccaatctgtcctgagtgttcatgctttgtaccaaatttaatgaacgcgtgttctgtaatcaaactgcaaatattgtcataaccaacatccaaaatgacggctgctatatataagtgtttgtcatatggaatttaatcgtaagccatgatcataatgttaactaaataactttatgtggcactgcctagtaagggaactatggaaaggtttggatttctccaaatctgggagaattttcaaaataagaaaataacctttatatgatatactatgactaggctgtgtatttcttttcagggatttttctaccttcagggttggatgtagtttagttactattaccatagccaacctgtagttttacatatacattttcttgtggagcaatagagttctccattttacagaagcattttaaatgtagtttgaatattttccacaagatgctgcaatgtgagttatcacttcatttatcttaaagaaagactaaactggttgtcagttacatctgacagaaaaaaaaaaaaaatcactgtgtaaccaggttaagtggtaaaataatccaggcgtcagtcaaaggcattttgctgactttaatattgattatatttttaacaggaatttaagaaaatattactggaattaaaaatatatatatattaaacaagaattttctttgctctgtctagcttaaactactactcaagctgcttaagttcttaagtattgtttgtaatcaccaataaataagtgcatttgtaattcatcagtcattattagcttttattaaaagaagattacgttttacaatgtaactataatctcttgaatttggtatcttattaatgagttttaaagatgtaaaacctaaccttttttaaagctccattgtcttatgtttttagaggcttttccgtaaacatatatcttacatataataaacttttcaaatcttgc

SEQ ID NO: 166731 - DNA, 2640 bp, Homo sapiens
  Payload ID: 12823
  Gene Symbol: PLAGL1
  Gene Name: pleiomorphic adenoma gene-like 1
  Uniprot ID: Q9UM63
  ENST ID: ENST00000437412
  CDS Start-End: 283-1518
ccttttccgcgccgccgagtcggagctgcgccgcacgcccagcggccgcccggacccgccggccggagctgacccagtgggccacgggctccggactccagaactttccaagcgggggaaacttggcggcgggattgctgtcacgtctaatgtggctgctgcctcgtgtcacatctgaaactcatctgtacctcacttagaaaggtttgaatcttcagacaaacttctgggaggactcggtccctgcctcgcagcagatgttccctgtcactcagtaggcatatggctacccattctccccagaaatctcaccagtgtgctcactgtgagaagacgttcaaccggaaagaccacctgaaaaaccacctccagacccacgaccccaacaaaatggcctttgggtgtgaggagtgtgggaagaagtacaacaccatgctgggctataagaggcacctggccctccatgcggccagcagtggggacctcacctgtggggtctgtgccctggagctagggagcaccgaggtgctactggaccacctcaaagcccatgcggaagagaagccccctagcggaaccaaggaaaagaagcaccagtgcgaccactgtgaaagatgcttctacacccggaaggatgtgcgacgccacctggtggtccacacaggatgcaaggacttcctgtgccagttctgtgcccagagatttgggcgcaaggatcacctcacccggcataccaagaagacccactcacaggagctgatgaaagagagcttgcagaccggagaccttctgagcaccttccacaccatctcgccttcattccaactgaaggctgctgccttgcctcctttccctttaggagcttctgcccagaacgggcttgcaagtagcttgccagctgaggtccatagcctcaccctcagtcccccagaacaagccgcccagcctatgcagccgctgccagagtccctggcctccctccacccctcggtatcccctggctctcctccgccaccccttcccaatcacaagtacaacaccacttctacctcatactccccacttgcaagcctgcccctcaaagcagatactaaaggtttttgcaatatcagtttgtttgaggacttgcctctgcaagagcctcagtcacctcaaaagctcaacccaggttttgatctggctaagggaaatgctggtaaagtaaacctgcccaaggagctgcctgcagatgctgtgaacctaacaatacctgcctctctggacctgtcccccctgttgggcttctggcagctgccccctcctgctacccaaaatacctttgggaatagcactcttgccctggggcctggggaatctttgccccacaggttaagctgtctggggcagcagcagcaagaacccccacttgccatgggcactgtgagcctgggccagctccccctgccccccatccctcatgtgttctcagctggcactggctctgccatcctgcctcatttccatcatgcattcagataattgatttttaaagtgtatttttcgtattctggaagatgttttaagaagcattttaaatgtcagttacaatatgagaaagatttggaaaacgagactgggactatggcttattcagtgatgactggcttgagatgataagagaattctcgaactgcatgtattgtgccaatctgtcctgagtgttcatgctttgtaccaaatttaatgaacgcgtgttctgtaatcaaactgcaaatattgtcataaccaacatccaaaatgacggctgctatatataagtgtttgtcatatggaatttaatcgtaagccatgatcataatgttaactaaataactttatgtggcactgcctagtaagggaactatggaaaggtttggatttctccaaatctgggagaattttcaaaataagaaaataacctttatatgatatactatgactaggctgtgtatttcttttcagggatttttctaccttcagggttggatgtagtttagttactattaccatagccaacctgtagttttacatatacattttcttgtggagcaatagagttctccattttacagaagcattttaaatgtagtttgaatattttccacaagatgctgcaatgtgagttatcacttcatttatcttaaagaaagactaaactggttgtcagttacatctgacagaaaaaaaaaaaaaatcactgtgtaaccaggttaagtggtaaaataatccaggcgtcagtcaaaggcattttgctgactttaatattgattatatttttaacaggaatttaagaaaatattactggaattaaaaatatatatatattaaacaagaattttctttgctctgtctagcttaaactactactcaagctgcttaagttcttaagtattgtttgtaatcaccaataaataagtgcatttgtaattcatcagtcattattagcttttattaaaagaagattacgttttacaatgtaactataatctcttgaatttggtatcttattaatgagttttaaagatgtaaaacctaaccttttttaaagctccattgtcttatgtttttagaggcttttccgtaaacatatatcttacatataataaacttttcaaatcttgc

SEQ ID NO: 166732 - DNA, 1645 bp, Homo sapiens
  Payload ID: 12823
  Gene Symbol: PLAGL1
  Gene Name: pleiomorphic adenoma gene-like 1
  Uniprot ID: Q9UM63
  ENST ID: ENST00000417959
  CDS Start-End: 410-1645
gcctcactctccgggcgggtgctggacggacggacggacggggcagccgtgctcacagctcagcagcgcggggccttggcgcgcggggcgcttccccgggtcgccgtcatggccgcggaggtggcacgcccgagcggcctcgcctgagctccgggggtcgtcgccccgcagggattgctgtcacgtctaatgtggctgctgcctcgtgtcacatctgaaactcatctgtacctcacttagaaagacttttcgttgcagtcgacagaaacctaatgggaccattgaagaattccaaacaggtatttgcataggaatcagaggagttaatcttgtttgaatcttcagacaaacttctgggaggactcggtccctgcctcgcagcagatgttccctgtcactcagtaggcatatggctacccattctccccagaaatctcaccagtgtgctcactgtgagaagacgttcaaccggaaagaccacctgaaaaaccacctccagacccacgaccccaacaaaatggcctttgggtgtgaggagtgtgggaagaagtacaacaccatgctgggctataagaggcacctggccctccatgcggccagcagtggggacctcacctgtggggtctgtgccctggagctagggagcaccgaggtgctactggaccacctcaaagcccatgcggaagagaagccccctagcggaaccaaggaaaagaagcaccagtgcgaccactgtgaaagatgcttctacacccggaaggatgtgcgacgccacctggtggtccacacaggatgcaaggacttcctgtgccagttctgtgcccagagatttgggcgcaaggatcacctcacccggcataccaagaagacccactcacaggagctgatgaaagagagcttgcagaccggagaccttctgagcaccttccacaccatctcgccttcattccaactgaaggctgctgccttgcctcctttccctttaggagcttctgcccagaacgggcttgcaagtagcttgccagctgaggtccatagcctcaccctcagtcccccagaacaagccgcccagcctatgcagccgctgccagagtccctggcctccctccacccctcggtatcccctggctctcctccgccaccccttcccaatcacaagtacaacaccacttctacctcatactccccacttgcaagcctgcccctcaaagcagatactaaaggtttttgcaatatcagtttgtttgaggacttgcctctgcaagagcctcagtcacctcaaaagctcaacccaggttttgatctggctaagggaaatgctggtaaagtaaacctgcccaaggagctgcctgcagatgctgtgaacctaacaatacctgcctctctggacctgtcccccctgttgggcttctggcagctgccccctcctgctacccaaaatacctttgggaatagcactcttgccctggggcctggggaatctttgccccacaggttaagctgtctggggcagcagcagcaagaacccccacttgccatgggcactgtgagcctgggccagctccccctgccccccatccctcatgtgttctcagctggcactggctctgccatcctgcctcatttccatcatgcattcagataa

SEQ ID NO: 166733 - DNA, 3237 bp, Homo sapiens
  Payload ID: 12823
  Gene Symbol: PLAGL1
  Gene Name: pleiomorphic adenoma gene-like 1
  Uniprot ID: Q9UM63
  ENST ID: ENST00000416623
  CDS Start-End: 724-2115
gttccggctcccgagccccgcctgcgcgcggcctcctcggcgcagccatcctcttggctgccgcgggcggcaaagcccacggcatctgccatttgtcattcagcccgtcggtaccgccccgagccttgatttagacacggctggggcgtgctctggcctcactctccgggcgggtgctggacggacggacggacggggcagccgtgctcacagctcagcagcgcggggccttggcgcgcggggcgcttccccgggtcgccgtcatggccgcggaggtggcacgcccgagcggcctcgcctgagctccgggggtcgtcgccccgcagggattgctgtcacgtctaatgtggctgctgcctcgtgtcacatctgaaactcatctgtacctcacttagaaagccaatccgggggacccaggacatgccccagctatagtgatgcagattacctttctgctcctgaatcgcacctgtgcctcagactttctcccctcagcttgagactgcatgtaaactgggatgtgtgaaagcaggaagcaaagctagtgacagctgagaggtccatgtctgggtagaaccaggcccacgatgctgcctctcccgtggtctggagttcagctgcagggactctgctgatgtgcccagcaccatcgttctgtttgtgcttaaatggcacagcatttggtcagcacatctgaaaaggaaggtgtgagaagcaaagcccatggccacgttcccctgccagttatgtggcaagacgttcctcaccctggagaagttcacgattcacaattattcccactccagggagcggccgtacaagtgtgtgcagcctgactgtggcaaagcctttgtttccagatataaattgatgaggcatatggctacccattctccccagaaatctcaccagtgtgctcactgtgagaagacgttcaaccggaaagaccacctgaaaaaccacctccagacccacgaccccaacaaaatggcctttgggtgtgaggagtgtgggaagaagtacaacaccatgctgggctataagaggcacctggccctccatgcggccagcagtggggacctcacctgtggggtctgtgccctggagctagggagcaccgaggtgctactggaccacctcaaagcccatgcggaagagaagccccctagcggaaccaaggaaaagaagcaccagtgcgaccactgtgaaagatgcttctacacccggaaggatgtgcgacgccacctggtggtccacacaggatgcaaggacttcctgtgccagttctgtgcccagagatttgggcgcaaggatcacctcacccggcataccaagaagacccactcacaggagctgatgaaagagagcttgcagaccggagaccttctgagcaccttccacaccatctcgccttcattccaactgaaggctgctgccttgcctcctttccctttaggagcttctgcccagaacgggcttgcaagtagcttgccagctgaggtccatagcctcaccctcagtcccccagaacaagccgcccagcctatgcagccgctgccagagtccctggcctccctccacccctcggtatcccctggctctcctccgccaccccttcccaatcacaagtacaacaccacttctacctcatactccccacttgcaagcctgcccctcaaagcagatactaaaggtttttgcaatatcagtttgtttgaggacttgcctctgcaagagcctcagtcacctcaaaagctcaacccaggttttgatctggctaagggaaatgctggtaaagtaaacctgcccaaggagctgcctgcagatgctgtgaacctaacaatacctgcctctctggacctgtcccccctgttgggcttctggcagctgccccctcctgctacccaaaatacctttgggaatagcactcttgccctggggcctggggaatctttgccccacaggttaagctgtctggggcagcagcagcaagaacccccacttgccatgggcactgtgagcctgggccagctccccctgccccccatccctcatgtgttctcagctggcactggctctgccatcctgcctcatttccatcatgcattcagataattgatttttaaagtgtatttttcgtattctggaagatgttttaagaagcattttaaatgtcagttacaatatgagaaagatttggaaaacgagactgggactatggcttattcagtgatgactggcttgagatgataagagaattctcgaactgcatgtattgtgccaatctgtcctgagtgttcatgctttgtaccaaatttaatgaacgcgtgttctgtaatcaaactgcaaatattgtcataaccaacatccaaaatgacggctgctatatataagtgtttgtcatatggaatttaatcgtaagccatgatcataatgttaactaaataactttatgtggcactgcctagtaagggaactatggaaaggtttggatttctccaaatctgggagaattttcaaaataagaaaataacctttatatgatatactatgactaggctgtgtatttcttttcagggatttttctaccttcagggttggatgtagtttagttactattaccatagccaacctgtagttttacatatacattttcttgtggagcaatagagttctccattttacagaagcattttaaatgtagtttgaatattttccacaagatgctgcaatgtgagttatcacttcatttatcttaaagaaagactaaactggttgtcagttacatctgacagaaaaaaaaaaaaaatcactgtgtaaccaggttaagtggtaaaataatccaggcgtcagtcaaaggcattttgctgactttaatattgattatatttttaacaggaatttaagaaaatattactggaattaaaaatatatatatattaaacaagaattttctttgctctgtctagcttaaactactactcaagctgcttaagttcttaagtattgtttgtaatcaccaataaataagtgcatttgtaattcatcagtcattattagcttttattaaaagaagattacgttttacaatgtaactataatctcttgaatttggtatcttattaatgagttttaaagatgtaaaacctaaccttttttaaagctccattgtcttatgtttttagaggcttttccgtaaacatatatcttacatataataaacttttcaaatcttgc

SEQ ID NO: 166734 - DNA, 3197 bp, Homo sapiens
  Payload ID: 12823
  Gene Symbol: PLAGL1
  Gene Name: pleiomorphic adenoma gene-like 1
  Uniprot ID: Q9UM63
  ENST ID: ENST00000444202
  CDS Start-End: 684-2075
ccttttccgcgccgccgagtcggagctgcgccgcacgcccagcggccgcccggacccgccggccggagctgacccagtgggccacgggctccggactccagaactttccaagcgggggaaacttggcggcggattgttcctgcctgattcataaacatcgtgattggcttttgattgctgtcacgtctaatgtggctgctgcctcgtgtcacatctgaaactcatctgtacctcacttagaaagtcgacagaaacctaatgggaccattgaagaattccaaacaggtttgaatcttcagacaaacttctgggaggactcggtccctgcctcgcagcagatgttccctgtcactcagtagccaatccgggggacccaggacatgccccagctatagtgatgcagattacctttctgctcctgaatcgcacctgtgcctcagactttctcccctcagcttgagactgcatgtaaactgggatgtgtgaaagcaggaagcaaagctagtgacagctgagaggtccatgtctgggtagaaccaggcccacgatgctgcctctcccgtggtctggagttcagctgcagggactctgctgatgtgcccagcaccatcgttctgtttgtgcttaaatggcacagcatttggtcagcacatctgaaaaggaaggtgtgagaagcaaagcccatggccacgttcccctgccagttatgtggcaagacgttcctcaccctggagaagttcacgattcacaattattcccactccagggagcggccgtacaagtgtgtgcagcctgactgtggcaaagcctttgtttccagatataaattgatgaggcatatggctacccattctccccagaaatctcaccagtgtgctcactgtgagaagacgttcaaccggaaagaccacctgaaaaaccacctccagacccacgaccccaacaaaatggcctttgggtgtgaggagtgtgggaagaagtacaacaccatgctgggctataagaggcacctggccctccatgcggccagcagtggggacctcacctgtggggtctgtgccctggagctagggagcaccgaggtgctactggaccacctcaaagcccatgcggaagagaagccccctagcggaaccaaggaaaagaagcaccagtgcgaccactgtgaaagatgcttctacacccggaaggatgtgcgacgccacctggtggtccacacaggatgcaaggacttcctgtgccagttctgtgcccagagatttgggcgcaaggatcacctcacccggcataccaagaagacccactcacaggagctgatgaaagagagcttgcagaccggagaccttctgagcaccttccacaccatctcgccttcattccaactgaaggctgctgccttgcctcctttccctttaggagcttctgcccagaacgggcttgcaagtagcttgccagctgaggtccatagcctcaccctcagtcccccagaacaagccgcccagcctatgcagccgctgccagagtccctggcctccctccacccctcggtatcccctggctctcctccgccaccccttcccaatcacaagtacaacaccacttctacctcatactccccacttgcaagcctgcccctcaaagcagatactaaaggtttttgcaatatcagtttgtttgaggacttgcctctgcaagagcctcagtcacctcaaaagctcaacccaggttttgatctggctaagggaaatgctggtaaagtaaacctgcccaaggagctgcctgcagatgctgtgaacctaacaatacctgcctctctggacctgtcccccctgttgggcttctggcagctgccccctcctgctacccaaaatacctttgggaatagcactcttgccctggggcctggggaatctttgccccacaggttaagctgtctggggcagcagcagcaagaacccccacttgccatgggcactgtgagcctgggccagctccccctgccccccatccctcatgtgttctcagctggcactggctctgccatcctgcctcatttccatcatgcattcagataattgatttttaaagtgtatttttcgtattctggaagatgttttaagaagcattttaaatgtcagttacaatatgagaaagatttggaaaacgagactgggactatggcttattcagtgatgactggcttgagatgataagagaattctcgaactgcatgtattgtgccaatctgtcctgagtgttcatgctttgtaccaaatttaatgaacgcgtgttctgtaatcaaactgcaaatattgtcataaccaacatccaaaatgacggctgctatatataagtgtttgtcatatggaatttaatcgtaagccatgatcataatgttaactaaataactttatgtggcactgcctagtaagggaactatggaaaggtttggatttctccaaatctgggagaattttcaaaataagaaaataacctttatatgatatactatgactaggctgtgtatttcttttcagggatttttctaccttcagggttggatgtagtttagttactattaccatagccaacctgtagttttacatatacattttcttgtggagcaatagagttctccattttacagaagcattttaaatgtagtttgaatattttccacaagatgctgcaatgtgagttatcacttcatttatcttaaagaaagactaaactggttgtcagttacatctgacagaaaaaaaaaaaaaatcactgtgtaaccaggttaagtggtaaaataatccaggcgtcagtcaaaggcattttgctgactttaatattgattatatttttaacaggaatttaagaaaatattactggaattaaaaatatatatatattaaacaagaattttctttgctctgtctagcttaaactactactcaagctgcttaagttcttaagtattgtttgtaatcaccaataaataagtgcatttgtaattcatcagtcattattagcttttattaaaagaagattacgttttacaatgtaactataatctcttgaatttggtatcttattaatgagttttaaagatgtaaaacctaaccttttttaaagctccattgtcttatgtttttagaggcttttccgtaaacatatatcttacatataataaacttttcaaatcttgc

SEQ ID NO: 166735 - DNA, 588 bp, Homo sapiens
  Payload ID: 12823
  Gene Symbol: PLAGL1
  Gene Name: pleiomorphic adenoma gene-like 1
  ENST ID: ENST00000627449
  CDS Start-End: 369-588
ccttttccgcgccgccgagtcggagctgcgccgcacgcccagcggccgcccggacccgccggccggagctgacccagtgggccacgggctccggactccagaactttccaagcgggggaaacttggcggcggattgttcctgcctgattcataaacatcgtgattggcttttgattgctgtcacgtctaatgtggctgctgcctcgtgtcacatctgaaactcatctgtacctcacttagaaaggtatttgcataggaatcagaggagttaatcttgtctcttctcacaggtttgaatcttcagacaaacttctgggaggactcggtccctgcctcgcagcagatgttccctgtcactcagtaggcatatggctacccattctccccagaaatctcaccagtgtgctcactgtgagaagacgttcaaccggaaagaccacctgaaaaaccacctccagacccacgaccccaacaaaatggcctttgggtgtgaggagtgtgggaagaagtacaacaccatgctgggctataagaggcacctggccctccatgcggccagcagtggggacctcacctgtggggtctgtg

SEQ ID NO: 166736 - DNA, 3216 bp, Homo sapiens
  Payload ID: 12823
  Gene Symbol: PLAGL1
  Gene Name: pleiomorphic adenoma gene-like 1
  Uniprot ID: Q9UM63
  ENST ID: ENST00000625622
  CDS Start-End: 1147-2538
ctcctcggcgcagccatcctcttggctgccgcgggcggcaaagcccacggcatctgccatttgtcattcagcccgtcggtaccgccccgagccttgatttagacacggctggggcgtgctctggcctcactctccgggcgggtgctggacggacggacggacggggcagccgtgctcacagctcagcagcgcggggccttggcgcgcggggcgcttccccgggtcgccgtcatggccgcggaggtggcacgcccgagcggcctcgcctgagctccgggggtcgtcgccccgcagggattgctgtcacgtctaatgtggctgctgcctcgtgtcacatctgaaactcatctgtacctcacttagaaagtcgacagaaacctaatgggaccattgaagaattccaaacaggcaagtgacaggaacatatttgcatgttagaagaatcagcctggcagcagcattgtgattagaatgaaggggaaccgtccaaaaacagactggggaaccaatatggatctgcctctagcatgcggaaatatctctctacactgacctaactgactcactaagcttgtggtttgtttaaaggaagccacatgaaaattgagtttgggccaatagagtgaactcgttctccattctctagcatccctccccatgcaaccaccctatccctgccaagtttctgggcaccacagattggaaagtagcctcctgtatttgcataggaatcagaggagttaatcttgtttgaatcttcagacaaacttctgggaggactcggtccctgcctcgcagcagatgttccctgtcactcagtagccaatccgggggacccaggacatgccccagctatagtgatgcagattacctttctgctcctgaatcgcacctgtgcctcagactttctcccctcagcttgagactgcatgtaaactgggatgtgtgaaagcaggaagcaaagctagtgacagctgagaggtccatgtctgggtagaaccaggcccacgatgctgcctctcccgtggtctggagttcagctgcagggactctgctgatgtgcccagcaccatcgttctgtttgtgcttaaatggcacagcatttggtcagcacatctgaaaaggaaggtgtgagaagcaaagcccatggccacgttcccctgccagttatgtggcaagacgttcctcaccctggagaagttcacgattcacaattattcccactccagggagcggccgtacaagtgtgtgcagcctgactgtggcaaagcctttgtttccagatataaattgatgaggcatatggctacccattctccccagaaatctcaccagtgtgctcactgtgagaagacgttcaaccggaaagaccacctgaaaaaccacctccagacccacgaccccaacaaaatggcctttgggtgtgaggagtgtgggaagaagtacaacaccatgctgggctataagaggcacctggccctccatgcggccagcagtggggacctcacctgtggggtctgtgccctggagctagggagcaccgaggtgctactggaccacctcaaagcccatgcggaagagaagccccctagcggaaccaaggaaaagaagcaccagtgcgaccactgtgaaagatgcttctacacccggaaggatgtgcgacgccacctggtggtccacacaggatgcaaggacttcctgtgccagttctgtgcccagagatttgggcgcaaggatcacctcacccggcataccaagaagacccactcacaggagctgatgaaagagagcttgcagaccggagaccttctgagcaccttccacaccatctcgccttcattccaactgaaggctgctgccttgcctcctttccctttaggagcttctgcccagaacgggcttgcaagtagcttgccagctgaggtccatagcctcaccctcagtcccccagaacaagccgcccagcctatgcagccgctgccagagtccctggcctccctccacccctcggtatcccctggctctcctccgccaccccttcccaatcacaagtacaacaccacttctacctcatactccccacttgcaagcctgcccctcaaagcagatactaaaggtttttgcaatatcagtttgtttgaggacttgcctctgcaagagcctcagtcacctcaaaagctcaacccaggttttgatctggctaagggaaatgctggtaaagtaaacctgcccaaggagctgcctgcagatgctgtgaacctaacaatacctgcctctctggacctgtcccccctgttgggcttctggcagctgccccctcctgctacccaaaatacctttgggaatagcactcttgccctggggcctggggaatctttgccccacaggttaagctgtctggggcagcagcagcaagaacccccacttgccatgggcactgtgagcctgggccagctccccctgccccccatccctcatgtgttctcagctggcactggctctgccatcctgcctcatttccatcatgcattcagataattgatttttaaagtgtatttttcgtattctggaagatgttttaagaagcattttaaatgtcagttacaatatgagaaagatttggaaaacgagactgggactatggcttattcagtgatgactggcttgagatgataagagaattctcgaactgcatgtattgtgccaatctgtcctgagtgttcatgctttgtaccaaatttaatgaacgcgtgttctgtaatcaaactgcaaatattgtcataaccaacatccaaaatgacggctgctatatataagtgtttgtcatatggaatttaatcgtaagccatgatcataatgttaactaaataactttatgtggcactgcctagtaagggaactatggaaaggtttggatttctccaaatctgggagaattttcaaaataagaaaataacctttatatgatatactatgactaggctgtgtatttcttttcagggatttttctaccttcagggttggatgtagtttagttactattaccatagccaacctgtagttttacatatacattttcttgtggagcaatagagttctccattttacagaagcattttaaatgtagtttgaatattttccacaagatgctgcaatgtgagttatcacttcatttatcttaaagaaagactaaactggttgtcagttacatctgac

SEQ ID NO: 166737 - DNA, 563 bp, Homo sapiens
  Payload ID: 12823
  Gene Symbol: PLAGL1
  Gene Name: pleiomorphic adenoma gene-like 1
  ENST ID: ENST00000628651
  CDS Start-End: 257-563
cttttccgcgccgccgagtcggagctgcgccgcacgcccagcggccgcccggacccgccggccggagctgacccagtgggccacgggctccggactccagaactttccaagcgggggaaacttggcggcgggtaggtaggaaaggcaggattgctgtcacgtctaatgtggctgctgcctcgtgtcacatctgaaactcatctgtacctcacttagaaaggtatttgcataggaatcagaggagttaatcttgcatatggctacccattctccccagaaatctcaccagtgtgctcactgtgagaagacgttcaaccggaaagaccacctgaaaaaccacctccagacccacgaccccaacaaaatggcctttgggtgtgaggagtgtgggaagaagtacaacaccatgctgggctataagaggcacctggccctccatgcggccagcagtggggacctcacctgtggggtctgtgccctggagctagggagcaccgaggtgctactggaccacctcaaagcccatgcggaagagaagccccctagcggaaccaaggaaaaga

SEQ ID NO: 166738 - DNA, 333 bp, Homo sapiens
  Payload ID: 12823
  Gene Symbol: PLAGL1
  Gene Name: pleiomorphic adenoma gene-like 1
  ENST ID: ENST00000626373
  CDS Start-End: 298-333
ctccggactccagaactttccaagcgggggaaacttggcggcgggtaggtaggaaaggcaggattgctgtcacgtctaatgtggctgctgcctcgtgtcacatctgaaactcatctgtacctcacttagaaagtttctttctataacacaagcctgaacatattgctctcctgattaacaactttcagtggttctgattagacaagacttttcgttgcagtcgacagaaacctaatgggaccattgaagaattccaaacaggtatttgcataggaatcagaggagttaatcttgcatatggctacccattctccccagaaatctcaccagtgt

SEQ ID NO: 166739 - DNA, 587 bp, Homo sapiens
  Payload ID: 12823
  Gene Symbol: PLAGL1
  Gene Name: pleiomorphic adenoma gene-like 1
  ENST ID: ENST00000626462
  CDS Start-End: 364-587
ccttttccgcgccgccgagtcggagctgcgccgcacgcccagcggccgcccggacccgccggccggagctgacccagtgggccacgggctccggactccagaactttccaagcgggggaaacttggcggcggattgttcctgcctgattcataaacatcgtgattggcttttgattgctgtcacgtctaatgtggctgctgcctcgtgtcacatctgaaactcatctgtacctcacttagaaagtcgacagaaacctaatgggaccattgaagaattccaaacaggtttgaatcttcagacaaacttctgggaggactcggtccctgcctcgcagcagatgttccctgtcactcagtaggcatatggctacccattctccccagaaatctcaccagtgtgctcactgtgagaagacgttcaaccggaaagaccacctgaaaaaccacctccagacccacgaccccaacaaaatggcctttgggtgtgaggagtgtgggaagaagtacaacaccatgctgggctataagaggcacctggccctccatgcggccagcagtggggacctcacctgtggggtctgtgccct

SEQ ID NO: 166740 - DNA, 723 bp, Homo sapiens
  Payload ID: 12823
  Gene Symbol: PLAGL1
  Gene Name: pleiomorphic adenoma gene-like 1
  ENST ID: ENST00000629195
  CDS Start-End: 532-723
ctgagctccgggggtcgtcgccccgcagggattgctgtcacgtctaatgtggctgctgcctcgtgtcacatctgaaactcatctgtacctcacttagaaaggtatttgcataggaatcagaggagttaatcttgtttgaatcttcagacaaacttctgggaggactcggtccctgcctcgcagcagatgttccctgtcactcagtagccaatccgggggacccaggacatgccccagctatagtgatgcagattacctttctgctcctgaatcgcacctgtgcctcagactttctcccctcagcttgagactgcatgtaaactgggatgtgtgaaagcaggaagcaaagctagtgacagctgagaggtccatgtctgggtagaaccaggcccacgatgctgcctctcccgtggtctggagttcagctgcagggactctgctgatgtgcccagcaccatcgttctgtttgtgcttaaatggcacagcatttggtcagcacatctgaaaaggaaggtgtgagaagcaaagcccatggccacgttcccctgccagttatgtggcaagacgttcctcaccctggagaagttcacgattcacaattattcccactccagggagcggccgtacaagtgtgtgcagcctgactgtggcaaagcctttgtttccagatataaattgatgaggcatatggctacccattctccccagaaatctcaccagtgt

SEQ ID NO: 166741 - DNA, 593 bp, Homo sapiens
  Payload ID: 12823
  Gene Symbol: PLAGL1
  Gene Name: pleiomorphic adenoma gene-like 1
  ENST ID: ENST00000626294
  CDS Start-End: 354-593
cttttccgcgccgccgagtcggagctgcgccgcacgcccagcggccgcccggacccgccggccggagctgacccagtgggccacgggctccggactccagaactttccaagcgggggaaacttggcggcggattgttcctgcctgattcataaacatcgtgattggcttttgattgctgtcacgtctaatgtggctgctgcctcgtgtcacatctgaaactcatctgtacctcacttagaaaggtatttgcataggaatcagaggagttaatcttgtttgaatcttcagacaaacttctgggaggactcggtccctgcctcgcagcagatgttccctgtcactcagtaggcatatggctacccattctccccagaaatctcaccagtgtgctcactgtgagaagacgttcaaccggaaagaccacctgaaaaaccacctccagacccacgaccccaacaaaatggcctttgggtgtgaggagtgtgggaagaagtacaacaccatgctgggctataagaggcacctggccctccatgcggccagcagtggggacctcacctgtggggtctgtgccctggagctagggagcacc

SEQ ID NO: 166742 - DNA, 5705 bp, Homo sapiens
  Payload ID: 12824
  Gene Symbol: PLAGL2
  Gene Name: pleiomorphic adenoma gene-like 2
  Uniprot ID: Q9UPG8
  ENST ID: ENST00000246229
  CDS Start-End: 266-1756
cgcggcaccgccccctccacgacccgagcgcccgctcgcgcggctcccacaatgcaccgcacaatggcccgaccgccgccactaccggggcctgagggggcctggcggagcccgagcgcggcccggcccgcagcgtggggccccgagcgcggtgaagagattgttttctgaaagctgcgttggaggctgtgacagagctgagagcctgtgtggagcggatggggaggctttctcaataacatggccctttgccattagccttgccatgaccacatttttcaccagcgtccccccctggattcaagatgcaaagcaggaggaggaagtgggctggaaactagttcccaggcctcggggccgggaggcggagagtcaagtgaagtgccaatgtgaaatttcgggaacacctttctcaaatggggagaagctgaggcctcacagcctcccgcaaccagagcagagaccatatagctgccctcagctgcactgtggcaaggcttttgcttccaaatacaagctgtataggcacatggccacccactcagcccagaaaccccaccagtgtatgtactgtgataagatgtttcaccgcaaggaccatctgcggaaccatctgcagacccatgatcctaacaaagaggccctccactgctctgagtgcggtaagaattacaatacgaagctgggctaccggcgccacctggccatgcatgctgccagcagcggtgacctcagctgcaaggtgtgcctgcagacctttgagagtacccaggccctgctagagcacctgaaggcccactcacgccgggtagcaggcggtgccaaggagaagaagcacccctgtgaccactgcgaccggcggttctatactcgtaaggatgtacggcggcacctagtggtgcacacaggccgtaaggacttcctgtgccagtactgtgcccagcggtttggccgtaaggaccacctgacgcgtcatgtcaagaagagccactcgcaggagctgctcaagatcaagacagagcccgtggacatgttaggcctactcagctgcagctccacagtcagtgtgaaggaagagctgagccctgtgctgtgcatggcctctcgggacgtaatggggaccaaggccttccctggcatgttgcccatgggcatgtatggtgcccacatccctaccatgcccagcacgggcgtgccacactccctggtgcacaacacgctgcccatgggtatgagctaccctctggaatcctcacctatctcttccccagctcagctccctccaaaataccagcttggatctacctcatacttgcccgacaaattgcccaaagtggaggtggatagttttctggcggagcttcctggaagcctgtctctctcatccgctgaaccccagcccgcctcacctcagccggcggcagctgcggccctcctagatgaagcactgcttgccaagagccccgccaacctctctgaggccctctgcgctgctaatgtggacttctcccacctactgggctttcttccactcaacctgcccccgtgtaacccacctggggccacaggaggcctggtcatgggctactcccaggctgaggcacagcccctgcttaccactttgcaagctcagcctcaagattccccaggagctgggggaccactgaactttgggcctctgcactccttgcctcctgtcttcacgtctggcctgagtagcaccaccctgcctcgtttccatcaagcattccagtagcccccacagaggccctcagctcagtttttggctctgttatggagccttagtacccaccccgtctgtgtcccccatgaaggcagctgagctttcagagctgggttcaaaaaaaaaaattccagtgtctgtatacaggagcacttggtttgggggttcaggctctaggatcgattccagaaggagccttgagccccaaccccgtgaaaagatctcataccgtaggacttcaggtattatttacttttatttttttgacctgaatcgggagccacacttggccctcttcctctccaaagcgccagaacctccttctctttggagaatggggaggcctcttggagacacagagggtttcaccttggatgacctctagagaaattgcccaagaagcccaccttctggtcccaacctgcagaccccacagcagtcagttggtcaggccctgctgtagaaggtcacttggctccattgcctgcttccaaccaatgggcaggagagaaggcctttatttctcgcccacccattcctcctgtaccagcacctccgttttcagtcagtgttgtccagcaacggtaccgtttacacagtcacctcagacacaccatttcacctcccttgccaagctgttagccttagagtgattgcagtgaacactgtttacacaccgtgaatccattcccatcagtccattccagttggcaccagcctgaaccatttggtacctggtgttaactggagtcctgtttacaaggtggagtcggggcttgctgacttctcttcatttgaggtcacatttttcccccgtggggaaataaactgactttggactgcttcagtctctgccatcttccatgactgcatttgttcctgcctgcctcggcggtatccacagaagacaggcaagaggattggagcagttttctcacaggtctgcaattctgtttttctccaagtacattatgaccccctcatccttctcttgaactggagaggggaagaaatgaaaggcatgcccacgtccgtcacctccccatcccctagtccccaccttgaacatcatgagctgttgttattagtcttggaagcagagtctgggttggtgtggatagcaaaggaggaagtctgagcccctcattggtcttcctcccacctgtcccttttccgggaagttgtggaattgttggaagaagagtttgcagaaggttaggaatgggtagatagctaagtcctaatctatgggtacattgttgtgtcccaaaccaaaattttccttatccacaatgtcccttctgtctcttccactttacagtggactcggccactgtgcataggcttctctgctctccatcaaatcacttccactttcctgtgcccccacccccgcctccagttttccgctagtatccggcaaggtttcttgcaacaaatgattagttcttttcttctgactcgtggggctccctgctgcagagagcacagcccttgcctggagcccaggaaccccatccttgcttcatctcagttcttcatgggcttcactcttcccactcacggaagggaggtagctcagggacctccactgtgggacccttgagacgcttccactctgattcagaaacacacttctacctctttactgttaactcttaacagatgcagtcagcagtttctgggcacttctctcagtaggtgcctcatgctgacttctccagtagggtttcaggacaaactaccaaggaattgcctcagcctcctaccagtcctccctcacccaccttctgtctaggttcacttggtttgtcatcaggaactgagcaggtccaggactcagctttctgcttcagcctaagccagtactccttgtttgaggtaaaagccttaaaatttagctccctagctcttgattagaagcaatttggagtaagtgtgttttgatttaggcagggtagcttgggatacctttttaaaaacaccagatattaaaatgtctggcaaggttagaatcagactagatgatttgcttctaaaaattagtttcagtgagtcccagggactaattaaggtttattttaaaaagtgtctaccttggtacgcagccacctcctgcatgctgtgcatgttattgggacttgtattataggtgatggtatgtgagaatccagttgggactcgctgttgccatcctctttgttgtatctggttttcatcactagactcagcaacccttctcaccttaactgccaccttccctacactctcagtttacagaggccactgggcctctggctgcagaatacaaagtcccgggctgttagaggagtcctttcctctctgcctgccctttcctgtccctccctcgaattctctctccccgtaagtgatgctggaaaagtcataggactggcaaagcaactgtttaaaccctttgtaaccggggccttgcccccacctcctgtcttttctccttgccttccccactcctgtgtcctcccatctatcctgtctttcctttcctcctctcagtgtcctcagcacccacaaggaattttcctatcactgtgaactttgctggtacagaggaataatatctgccttcacctttttttttttggaccatagctagccagtcatttcttaaacctcccttcctaaaatctggggggtcggggggaaagaaaaaaaaagccttagtggcctggttgttcaaaggataagaatagctttatcctgcactcagtacccgaactcacttcagtatgcttactgaggccatgagaacctgaggggcatctgcccaggacaggagccatggcatatgacaaagaccaatgagggaccaggaaaaaaagtgatgtcccctttccctgccacctccagcctctgccagcaatgagctgtccccctcccaccctacacagtagctggtcagggctgagtacagtcctgggggtaaggggatgacatgcccaggtgtcagctcaaaggatctctgcatcatcttgaggtgggaggcagggaaaggagcgccaatgaggttccctgcaacccccgccctccagcccaccgcccaaccttttacaaatggcattttcttaattgaaaatccgggaagcaggtgtgattacttttttgctcgtagatattgtcctaagttggaattctcccactgccctaaaactttccctagtagtcctttaaactcccccctccctttttggtagctgttttctccgtcctctctccacctgccctcttatctaggagctgtttgtaagcacgatttttttaacaggttatattgtacaggatcaatattttgctttttaacaaggatatttatgtaataagaaactttgccttaggcaggtgttggccagaaaagtccagattcctctgggatcccaccctggcctctcctggaactctgaacctgctgtggaaggaattggccatgaccttcacctctggagagtagggtctatggcgagggaaaagggtgttcaccatgataacctagtgcctccatagaggggtttggaaaaattccagtccgatttctttgtgtgtcagctgacttccttagctgattgttcccacttgcacctctccacctttggcactagaactcctgagacaccacttctcatgcttctccctccctaccagcggtcaaggctttggagccactcttttgtaactccagattatttaaagagaaaagtacaagacagaaatcttctagcactttgtaaacacagtgaataacctcttggagtatttttggctttatataaaacaaggtttttaattgtaaagtataagtgccattagaaaatgcacagggcatatctttgttaaagtagatttttcaatgttttacagaattacattttcaaaaaaaggtttttataatgaagttgtttattaaaaacttctgaatgatgtgttt

SEQ ID NO: 166743 - DNA, 1614 bp, Homo sapiens
  Payload ID: 12825
  Gene Symbol: PTN
  Gene Name: pleiotrophin
  Uniprot ID: P21246
  ENST ID: ENST00000348225
  CDS Start-End: 429-935
ttgctccgcagggagagactgcccctggagtattctgcttttaataagcttcccaatcagctctcgagtgcaaagcgctctccctccctcgcccagccttcgtcctcctggcccgctcctctcatccctcccattctccatttcccttccgttccctccctgtcagggcgtaattgagtcaaaggcaggatcaggttccccgccttccagtccaaaaatcccgccaagagagccccagagcagaggaaaatccaaagtggagagaggggaagaaagagaccagtgagtcatccgtccagaaggcggggagagcagcagcggcccaagcaggagctgcagcgagccgggtacctggactcagcggtagcaacctcgccccttgcaacaaaggcagactgagcgccagagaggacgtttccaactcaaaaatgcaggctcaacagtaccagcagcagcgtcgaaaatttgcagctgccttcttggcattcattttcatactggcagctgtggatactgctgaagcagggaagaaagagaaaccagaaaaaaaagtgaagaagtctgactgtggagaatggcagtggagtgtgtgtgtgcccaccagtggagactgtgggctgggcacacgggagggcactcggactggagctgagtgcaagcaaaccatgaagacccagagatgtaagatcccctgcaactggaagaagcaatttggcgcggagtgcaaataccagttccaggcctggggagaatgtgacctgaacacagccctgaagaccagaactggaagtctgaagcgagccctgcacaatgccgaatgccagaagactgtcaccatctccaagccctgtggcaaactgaccaagcccaaacctcaagcagaatctaagaagaagaaaaaggaaggcaagaaacaggagaagatgctggattaaaagatgtcacctgtggaacataaaaaggacatcagcaaacaggatcagttaactattgcatttatatgtaccgtaggctttgtattcaaaaattatctatagctaagtacacaataagcaaaaacaaaaagaaaagaaaatttttgtagtagcgttttttaaatgtatactatagtaccagtaggggcttataataaaggactgtaatcttatttaggaagttgacttatagtacatgataaatgatagacaattgaggtaagttttttgaaattatgtgacattttacattaaattttttttacattttttgggcagcaatttaaatgttatgactatgtaaactacttctcttgttaggtaatttttttcacctagatttttttcccaattgagaaaaatatatactaaacaaaatagcaataaaacataatcactctatttgaagaaaatatcttgttttctgccaatagattttttaaaatgtagtcagcaaaatgggggtggggaagcagagcatgtcctagttcaatgttgactttttttttttttaaagaaaagcattaagacataaaattctttcactttggcagaagcatttgttttcttgatgaaattatttttccatctgaggaaaaaaatactaggaaaataaatcaaggtgatgctgaaaaaaaaa

SEQ ID NO: 166744 - DNA, 1599 bp, Homo sapiens
  Payload ID: 12825
  Gene Symbol: PTN
  Gene Name: pleiotrophin
  ENST ID: ENST00000393083
  CDS Start-End: 338-838
cccagccttcgtcctcctggcccgctcctctcatccctcccattctccatttcccttccgttccctccctgtcagggcgtaattgagtcaaaggcaggatcaggttccccgccttccagtccaaaaatcccgccaagagagccccagagcagaggaaaatccaaagtggagagaggggaagaaagagaccagtgagtcatccgtccagaaggcggggagagcagcagcggcccaagcaggagctgcagcgagccgggtacctggactcagcggtagcaacctcgccccttgcaacaaaggcagactgagcgccagagaggacgtttccaactcaaaaatgcaggctcaacagtaccagcagcagcgtcgaaaatttgcagctgccttcttggcattcattttcatactggcagctgtggatactgctgaagcagggaagaaagagaaaccagaaaaaaaagtgaagaagtctgactgtggagaatggcagtggagtgtgtgtgtgcccaccagtggagactgtgggctgggcacacgggagggcactcggactggagctgagtgcaagcaaaccatgaagacccagagatgtaagatcccctgcaactggaagaagcaatttggcgcggagtgcaaataccagttccaggcctggggagaatgtgacctgaacacagccctgaagaccagaactggaagtctgaagcgagccctgcacaatgccgaatgccagaagactgtcaccatctccaagccctgtggcaaactgaccaagcccaaacctcaagagaagggaaaatggagacacaggagtggggagagtttgagaagatggtagagaggagtgtttgggtgaagggagatggattcgtctactgatgcaactgcagaatctaagaagaagaaaaaggaaggcaagaaacaggagaagatgctggattaaaagatgtcacctgtggaacataaaaaggacatcagcaaacaggatcagttaactattgcatttatatgtaccgtaggctttgtattcaaaaattatctatagctaagtacacaataagcaaaaacaaaaagaaaagaaaatttttgtagtagcgttttttaaatgtatactatagtaccagtaggggcttataataaaggactgtaatcttatttaggaagttgacttatagtacatgataaatgatagacaattgaggtaagttttttgaaattatgtgacattttacattaaattttttttacattttttgggcagcaatttaaatgttatgactatgtaaactacttctcttgttaggtaatttttttcacctagatttttttcccaattgagaaaaatatatactaaacaaaatagcaataaaacataatcactctatttgaagaaaatatcttgttttctgccaatagattttttaaaatgtagtcagcaaaatgggggtggggaagcagagcatgtcctagttcaatgttgactttttttttttttaaagaaaagcattaagacataaaattctttcactttggcagaagcatttgttttcttgatgaaattatttttccatctgaggaaaaaaatactaggaaaataaa

SEQ ID NO: 166745 - DNA, 1673 bp, Homo sapiens
  Payload ID: 12826
  Gene Symbol: PLRG1
  Gene Name: pleiotropic regulator 1
  Uniprot ID: O43660
  ENST ID: ENST00000302078
  CDS Start-End: 90-1607
tccggaaggtgctgcacagctgtggcggcgggtactgcgttagtgattagagtttcttccctgccggaggtgggatacacggtagcatcatggtcgaggaggtacagaaacattctgtacacacccttgtgttcaggtcgttgaagaggacccatgacatgtttgtagctgataatggaaaacctgtgcctttagatgaagagagtcacaaacgaaaaatggcaatcaagcttcgtaatgagtatggtcctgtgttgcatatgcctacttcaaaagaaaatcttaaagagaagggtcctcagaatgcaacggattcatatgttcataaacagtaccctgccaatcaaggacaagaagttgaatactttgtggcaggggttgctttgacagcagatactaagatccagagaatgccaagtgaatcagctgcacagtccttagcggtggcattacctttgcagaccaaggctgatgcaaatcgtactgcccctagtggaagtgaataccgacatcctggggcttctgaccgtccacagcctacagcgatgaattcaattgtcatggagactggcaataccaagaactctgcactgatggctaaaaaagcccctacaatgccaaaaccccagtggcacccaccgtggaaactctacagggttatcagtgggcatcttggctgggttcgatgtattgctgtggaacctggaaatcagtggtttgttactggatctgctgacagaactataaagatctgggacttggctagtggcaaattaaaactgtcattgactgggcatattagtactgtgcggggcgtgatagtaagcacaaggagcccatatctgttctcttgtggagaagacaaacaagtgaaatgctgggatctcgaatacaataaggttatacggcattatcatggacatttaagtgcagtgtatggtttggatttgcacccgacaatcgatgtgttggtaacctgtagtcgagattcaactgcacggatttgggatgtgagaactaaagccagtgtacacacattatctggacatacaaatgcagttgctacagtgagatgtcaggctgcagaaccacaaattattacaggaagccatgatactacaattcgattatgggatctggtggctggaaaaacaagagtgacattaacaaatcacaaaaaatcagttagggctgtggttttacatccaagacattacacatttgcatctggttctccagataacataaagcagtggaaattccctgatggaagtttcattcaaaatctttccggtcataatgctattattaacacattgacggtaaattctgatggagtgcttgtatctggagctgacaatggcaccatgcatctttgggactggagaactggctacaattttcagagagttcacgcagctgtgcaacctgggtctttggacagtgaatcaggaatatttgcttgtgcttttgatcagtctgaaagtcgattactaacagctgaagctgataaaaccattaaagtatacagagaggatgacacagccacagaagaaactcatccagtcagctggaaaccagaaattatcaagagaaagagattttaatgaatgtggaattttttctctctctttttttttctttttaattaaaaaaaaaaaagcttggcgttc

SEQ ID NO: 166746 - DNA, 723 bp, Homo sapiens
  Payload ID: 12826
  Gene Symbol: PLRG1
  Gene Name: pleiotropic regulator 1
  ENST ID: ENST00000504341
  CDS Start-End: 87-723
ctcagttgctaaacctgaggttctagccaaagaggagcttcctcctcttctctgaacttgactcctgtagcttgcaacaagtagctatggaggtacagaaacattctgtacacacccttgtgttcaggtcgttgaagaggacccatgacatgtttgtagctgataatggaaaacctgtgcctttagatgaagagagtcacaaacgaaaaatggcaatcaagcttcgtaatgagtatggtcctgtgttgcatatgcctacttcaaaagaaaatcttaaagagaagggtcctcagaatgcaacggattcatatgttcataaacagtaccctgccaatcaaggacaagaagttgaatactttgtggcaggtacacatccatacccaccaggacctggggttgctttgacagcagatactaagatccagagaatgccaagtgaatcagctgcacagtccttagcggtggcattacctttgcagaccaaggctgatgcaaatcgtactgcccctagtggaagtgaataccgacatcctggggcttctgaccgtccacagcctacagcgatgaattcaattgtcatggagactggcaataccaagaactctgcactgatggctaaaaaagcccctacaatgccaaaaccccagtggcacccaccgtggaaactctacagggttatcagtgggcatcttggctgggttcgatgtattgctgtggaacctg

SEQ ID NO: 166747 - DNA, 3351 bp, Homo sapiens
  Payload ID: 12826
  Gene Symbol: PLRG1
  Gene Name: pleiotropic regulator 1
  Uniprot ID: O43660
  ENST ID: ENST00000499023
  CDS Start-End: 128-1672
gcagagcttgcatcacatccgccgcctgggcgcccaattccggaaggtgctgcacagctgtggcggcgggtactgcgttagtgattagagtttcttccctgccggaggtgggatacacggtagcatcatggtcgaggaggtacagaaacattctgtacacacccttgtgttcaggtcgttgaagaggacccatgacatgtttgtagctgataatggaaaacctgtgcctttagatgaagagagtcacaaacgaaaaatggcaatcaagcttcgtaatgagtatggtcctgtgttgcatatgcctacttcaaaagaaaatcttaaagagaagggtcctcagaatgcaacggattcatatgttcataaacagtaccctgccaatcaaggacaagaagttgaatactttgtggcaggtacacatccatacccaccaggacctggggttgctttgacagcagatactaagatccagagaatgccaagtgaatcagctgcacagtccttagcggtggcattacctttgcagaccaaggctgatgcaaatcgtactgcccctagtggaagtgaataccgacatcctggggcttctgaccgtccacagcctacagcgatgaattcaattgtcatggagactggcaataccaagaactctgcactgatggctaaaaaagcccctacaatgccaaaaccccagtggcacccaccgtggaaactctacagggttatcagtgggcatcttggctgggttcgatgtattgctgtggaacctggaaatcagtggtttgttactggatctgctgacagaactataaagatctgggacttggctagtggcaaattaaaactgtcattgactgggcatattagtactgtgcggggcgtgatagtaagcacaaggagcccatatctgttctcttgtggagaagacaaacaagtgaaatgctgggatctcgaatacaataaggttatacggcattatcatggacatttaagtgcagtgtatggtttggatttgcacccgacaatcgatgtgttggtaacctgtagtcgagattcaactgcacggatttgggatgtgagaactaaagccagtgtacacacattatctggacatacaaatgcagttgctacagtgagatgtcaggctgcagaaccacaaattattacaggaagccatgatactacaattcgattatgggatctggtggctggaaaaacaagagtgacattaacaaatcacaaaaaatcagttagggctgtggttttacatccaagacattacacatttgcatctggttctccagataacataaagcagtggaaattccctgatggaagtttcattcaaaatctttccggtcataatgctattattaacacattgacggtaaattctgatggagtgcttgtatctggagctgacaatggcaccatgcatctttgggactggagaactggctacaattttcagagagttcacgcagctgtgcaacctgggtctttggacagtgaatcaggaatatttgcttgtgcttttgatcagtctgaaagtcgattactaacagctgaagctgataaaaccattaaagtatacagagaggatgacacagccacagaagaaactcatccagtcagctggaaaccagaaattatcaagagaaagagattttaatgaatgtggaattttttctctctctttttttttctttttaattaaaaaaaaaaaagcttggcgttcatgaggatatccagtcattttgtgctctggctgggaatataaaggagaaattcacttgcttcaatcattgctgcttcatattttacaataaactgtcccctgtcccctacccctgtgtttttatttctaaaacaatttgtgatactaggaagatgcagatatcaagtaaatgcaggtttattgaacataactattctagatgtaatattttgacagtcttattagaaaacccccttttttaaaaaaaatgtatgaaaccgataattaggacatttgaaggagcagtagtttttttttagtcctttaaaaaataacatctgtgactaataatttgagattaaaagatttgaagtcttaatttatgtatgtttattccaaaaacagtttttgagtgtatgttctacaaagttctgcactagatactgttcaggaaatagacaagtaagatgtgtctatcctctaagacttccagtttggtagcttagtatagaaattctgtaacagaggtgcaggtgaaatgctgggggaacagaagggataagaccatttatttttctcaggaaggattgtggaagacttcatagagtaagtggcattggagattaccttgaagtgaaggaagacaaagaaggaaaagagatgaggcataaagtgatgaaaccaggcacaagaaagtgtgcggtgtgttctgggacaaagaatgttctgctactgtcgaataatgggactaaagctggcttgttctggggaaagctcatataagtatggattttattcctcaactagtaggataccaatactggtattgaaacttggggaaaataactggagataccagtgcagctatttaaagctgtagcaagggctgcaatcttgcggagattttaaagagaagttttaaagtttctaatactgatgcctctttttggtaaatacaagttttataaatcctgccctgggatcctgattccccattaatcaagatttgtcagacttcaccttctataattagaaaacacagttataagaacagtcaattttttaaattttccaaattaaaaaattgcaccatgattttgaacaagcacttccaattacattacccatcttgtatgccataggtgggagtataattgtcacagcctttaggaatgtagttttctgggatttattgaaactttgaaccttttggcctactaagttcattcctaggaaactgcctaatgggaatgatctgacaagtgtacacaagcaaagtcattgcacctttgttctttaatacttaaaactagcccaaatgccctgtcagtaagggactggtttaatagatggtacctttatgcaatttgtttctaagtattcgttaagagagtgaggaatgtctggattattagggcaagatttctaaacttgggtaaaaaaaaaagttgtgcaagcatttttgtggacaacttgatgctctaaaatataagtaacaccacattactaacagtggctttgttaggaagcagaattatggaagaactttcatgggtggctttacatatttctataatgttttaattttctataagcatgtatttcgtaaacttaaataaagaaaaaagaacact

SEQ ID NO: 166748 - DNA, 855 bp, Homo sapiens
  Payload ID: 12826
  Gene Symbol: PLRG1
  Gene Name: pleiotropic regulator 1
  ENST ID: ENST00000506192
  CDS Start-End: 85-480
aaggtgctgcacagctgtggcggcgggtactgcgttagtgattagagtttcttccctgccggaggtgggatacacggtagcatcatggtcgaggaggtacagaaacattctgtacacacccttgtgttcaggtcgttgaagaggacccatgacatgtttgtagctgataatggaaaacctgtgcctttagatgaagagagtcacaaacgaaaaatggcaatcaagcttcgtaatgagtatggtcctgtgttgcatatgcctacttcaaaagaaaatcttaaagagaagggtcctcagaatgcaacggattcatatgttcataaacagtaccctgccaatcaaggacaagaagttgaatactttgtggcaggtacacatccatacccaccaggacctgggctgatgcaaatcgtactgcccctagtggaagtgaataccgacatcctggggcttctgaccgtccacagcctacagcgatgaattcaattgtcatggagactggcaataccaagaactctgcactgatggctaaaaaagcccctacaatgccaaaaccccagtggcacccaccgtggaaactctacagggttatcagtgggcatcttggctgggttcgatgtattgctgtggaacctggaaatcagtggtttgttactggatctgctgacagaactataaagatctgggacttggctagtggcaaattaaaactgtcattgactgggcatattagtactgtgcggggcgtgatagtaagcacaaggagcccatatctgttctcttgtggagaagacaaacaagtgaaatgctgggatctcgaatacaataaggttatacggcattatcatggacatt

SEQ ID NO: 166749 - DNA, 572 bp, Homo sapiens
  Payload ID: 12826
  Gene Symbol: PLRG1
  Gene Name: pleiotropic regulator 1
  ENST ID: ENST00000509975
  CDS Start-End: 87-263
ggaaggtgctgcacagctgtggcggcgggtactgcgttagtgattagagtttcttccctgccggaggtgggatacacggtagcatcatggtcgagtccaccttaattgagaccaacatcatctttcacctggactggtgcattagctccccgttggttggtttccttgcttccattttgttctataagttgttctgtttaaaacgaggtacagaaacattctgtacacacccttgtgttcaggtcgttgaagaggacccatgacatgtttgtagctgataatggaaaacctgtgcctttagatgaagagagtcacaaacgaaaaatggcaatcaagcttcgtaatgagtatggtcctgtgttgcatatgcctacttcaaaagaaaatcttaaagagaagggtcctcagaatgcaacggattcatatgttcataaacagtaccctgccaatcaaggacaagaagttgaatactttgtggcaggtacacatccatacccaccaggacctggggttgctttgacagcagatactaagatccagagaatgccaagtgaatcagctgcacagtcctt

SEQ ID NO: 166750 - DNA, 998 bp, Homo sapiens
  Payload ID: 12826
  Gene Symbol: PLRG1
  Gene Name: pleiotropic regulator 1
  ENST ID: ENST00000506627
  CDS Start-End: 1-470
agatctgggacttggctagtggcaaattaaaactgtcattgactgggcatattagtactgtgcggggcgtgatagtaagcacaaggagcccatatctgttctcttgtggagaagacaaacaagtgaaatgctgggatctcgaatacaataaggttatacggcattatcatggacatttaagtgcagtgtatggtttggatttgcacccgacaatcgatgtgttggtaacctgtagtcgagattcaactgcacggatttgggatgtgagaactaaagccagtgtacacacattatctggacatacaaatgcagttgctacagtgagatgtcaggctgcagaaccacaaattattacaggaagccatgatactacaattcgattatgggatctggtggctggaaaaacaagagtgacattaacaaatcacaaaaaatcagttagggctgtggttttacatccaagacaataacataaagcagtggaaattccctgatggaagtttcattcaaaatctttccggtcataatgctattattaacacattgacggtaaattctgatggagtgcttgtatctggagctgacaatggcaccatgcatctttgggactggagaactggctacaattttcagagagttcacgcagctgtgcaacctgggtctttggacagtgaatcaggaatatttgcttgtgcttttgatcagtctgaaagtcgattactaacagctgaagctgataaaaccattaaagtatacagagaggatgacacagccacagaagaaactcatccagtcagctggaaaccagaaattatcaagagaaagagattttaatgaatgtggaattttttctctctctttttttttctttttaattaaaaaaaaaaaagcttggcgttcatgaggatatccagtcattttgtgctctggctgggaatataaaggagaaattcacttgcttcaatcattgctgcttcatattttacaataaactgtcc

SEQ ID NO: 166751 - DNA, 365 bp, Homo sapiens
  Payload ID: 12826
  Gene Symbol: PLRG1
  Gene Name: pleiotropic regulator 1
  ENST ID: ENST00000503251
  CDS Start-End: 1-321
gatctggtggctggaaaaacaagagtgacattaacaaatcacaaaaaatcagttagggctgtggttttacatccaagacattacacatttgcatctggttctccagataacataaagcagtggaaattccctgatggaagtttcattcaaaatctttccggtcataatgctattattaacacattgacggtaaattctgatggagtgcttgtatctggagacagaagaaactcatccagtcagctggaaaccagaaattatcaagagaaagagattttaatgaatgtggaattttttctctctctttttttttctttttaattaaaaaaaaaaaagcttggcgttcatgaggatatccagtcatt

SEQ ID NO: 166752 - DNA, 9066 bp, Homo sapiens
  Payload ID: 12827
  Gene Symbol: PLXNA1
  Gene Name: plexin A1
  Uniprot ID: Q9UIW2
  ENST ID: ENST00000393409
  CDS Start-End: 1-5691
atgccgctgccaccgcggagcctgcaggtgctcctgctgctgctgctgttgctgctgctgctgccgggcatgtgggctgaggcaggcttgcccagggcaggcgggggttcacagccccccttccgcaccttctcggccagcgactggggcctcacccacctagtggtgcatgagcagacaggcgaggtgtatgtgggcgcagtgaaccgcatctataagctgtcggggaacctgacactgctgcgggcccacgtcacgggccctgtggaggacaacgagaagtgctacccgccgcccagcgtgcagtcctgcccccacggcctgggcagtactgacaacgtcaacaagctgctgctgctggactatgccgctaaccgcctgctggcctgtggcagcgcctcccagggcatctgccagttcctgcgtctggacgatctcttcaaactgggtgagccacaccaccgtaaggagcactacctgtccagcgtgcaggaggcaggcagcatggcgggcgtgctcattgccgggccaccgggccagggccaggccaagctcttcgtgggcacacccatcgatggcaagtccgagtacttccccacactgtccagccgtcggctcatggccaacgaggaggatgccgacatgttcggcttcgtgtaccaggatgagtttgtgtcatcacagctcaagatcccttcggacacgctgtccaagttcccggcctttgacatctactatgtgtacagcttccgcagcgagcagtttgtctactacctcacgctgcagctagacacacagctgacctcgcctgatgccgccggcgagcacttcttcacgtccaagatcgtgcggctctgtgtggacgaccccaaattctactcgtacgttgagttccccattggctgcgagcaggcgggtgtggagtaccgcctggtgcaggatgcctacctgagccggcccggccgtgccctggcccaccagctgggcctggctgaggacgaggacgtgctgttcactgtgttcgcccagggccagaagaaccgcgtgaagccaccaaaggagtcagcactgtgcctgttcacgctcagggccatcaaggagaagattaaggagcgcatccagtcctgctaccgtggtgagggcaagctctccctgccgtggctgctcaacaaggagctgggctgcatcaactcgcccctgcagatcgatgacgacttctgcgggcaggacttcaaccagcccctggggggcacagtcaccattgaggggacgcccctgttcgtggacaaggatgatggcctgaccgccgtggctgcctatgactatcggggccgcactgtggtattcgccggcacgcgaagtggccgcatccgcaagatcctggtggacctctcaaaccccggtggccggcctgccctggcctacgagagcgtcgtggcccaggagggcagccccatcctgcgagacctcgtcctcagccccaaccaccagtacctctacgccatgaccgagaagcaggtgacgcgggtgcctgtggagagctgtgtgcagtacacgtcctgtgagctgtgtctggggtcacgggacccccactgtggctggtgtgtcctgcacagcatctgctcgcggcgggacgcctgtgagcgagcagacgagccccagcgctttgctgcggacctgctgcagtgtgtgcagctgactgtgcagccccgcaatgtgtctgtcaccatgtcccaggtcccacttgtgctgcaggcctggaacgtgcctgacctctcagctggcgtcaactgctccttcgaggacttcacggaatctgagagcgtcctggaggatggccggatccactgccgctcaccctccgcccgggaggtggcgcccatcacgcggggccagggagaccagcgggtggtgaaactctacctaaagtccaaggagacagggaagaagtttgcgtctgtggacttcgtcttctacaactgcagcgtccaccagtcctgcctgtcctgtgtcaacggctcctttccctgccactggtgcaaataccgccacgtgtgcacacacaacgtggctgactgcgccttcctggagggccgtgtcaacgtgtctgaggactgcccacagatcctgccctccacgcagatctacgtgccagtgggagtggtaaaacccatcaccctggccgcacggaacctgccacagccacagtcaggccagcgtggatatgagtgcctcttccacatcccgggcagcccggcccgtgtcaccgccctgcgcttcaacagctccagcctgcagtgccagaattcctcgtactcctacgaggggaacgatgtcagcgacctgccagtgaacctgtcagtcgtgtggaacggcaactttgtcattgacaacccacagaacatccaggcgcacctctacaagtgcccggccctgcgcgagagctgcggcctctgcctcaaggccgacccgcgcttcgagtgcggatggtgcgtggccgagcgccgctgctccctgcgacaccactgcgctgccgacacacctgcatcgtggatgcacgcgcgtcacggcagcagtcgctgcaccgaccccaagatcctcaagctgtcccccgagacgggcccgaggcagggcggcacgcggctcactatcacaggcgagaacctgggcctgcgattcgaagacgtgcgtctgggcgtgcgcgtgggcaaggtgctgtgcagccctgtggagagcgagtacatcagtgcggagcagatcgtctgtgagatcggggacgccagctccgtgcgtgcccatgacgccctggtggaggtgtgtgtgcgggactgctcaccacactaccgcgccctgtcacccaagcgcttcaccttcgtgacaccaaccttctaccgtgtgagcccctcccgtgggcctctgtcagggggcacctggattggcatcgagggaagccacctgaacgcaggcagtgatgtggctgtgtcggtcggtggccggccctgctccttctcctggaggaactcccgtgagatccggtgcctgacaccccccgggcagagccctggcagcgctcccatcatcatcaacatcaaccgcgcccagctcaccaaccctgaggtgaagtacaactacaccgaggaccccaccatcctgaggatcgaccccgagtggagcatcaacagcggtgggaccctcctgacggtcacaggcaccaacctggccactgtccgtgaaccccgaatccgggccaagtatggaggcattgagagggagaacggctgcctggtgtacaatgacaccaccatggtatgccgcgccccgtctgtggccaaccctgtgcgcagcccaccagagctgggggagcggccggatgagctgggcttcgtcatggacaacgtgcgctccctgcttgtgctcaactccacctccttcctctactaccctgaccccgtactggagccactcagccccactggcctgctggagctgaagcccagctccccactcatcctcaagggccggaacctcttgccacctgcacccggcaactcccgactcaactacacggtgctcatcggctccacaccctgtaccctcaccgtgtcggagacgcaactgctgtgcgaggcgcccaacctcactgggcagcacaaggtcacggtgcgggcaggtggcttcgagttctcgccagggacactgcaggtgtactcggacagcctgctgacgctgcctgccattgtgggcattggcggaggcgggggtctcctgctgctggtcatcgtggctgtgctcatcgcctacaagcgcaagtcacgagatgctgaccgcacactcaagcggctgcagctccagatggacaacctggagtcccgcgtggccctcgaatgcaaggaagcctttgcagagctgcagacagacatccacgagctgaccaatgacctggacggtgccggcatccccttccttgactaccggacatatgccatgcgggtgctctttcctgggatcgaggaccaccctgtgctcaaggagatggaggtgcaggccaatgtggagaagtcgctgacactgttcgggcagctgctgaccaagaagcacttcctgctgaccttcatccgcacgctggaggcacagcgcagcttctccatgcgcgaccgcgggaatgtggcctcgctcatcatgacggccctgcagggcgagatggaatacgccacaggcgtgctcaagcagctgctttccgacctcatcgagaagaacctggagagcaagaaccaccccaagctgctactgcgccggactgagtcggtggcagagaagatgctaactaactggttcaccttcctcttgtataagttcctcaaggagtgcgctggggagccgctgttcatgctgtactgcgccatcaagcagcagatggagaagggccccattgacgccatcacgggtgaggcacgctactccctgagtgaggacaagctcatccggcagcagattgactacaagacactgaccctgaactgtgtgaaccctgagaatgagaatgcacctgaggtgccggtgaaggggctggactgtgacacggtcacccaggccaaggagaagctgctggacgctgcctacaagggcgtgccctactcccagcggcccaaggccgcggacatggacctggagtggcgccagggccgcatggcgcgcatcatcctgcaggacgaggacgtcaccaccaagattgacaacgattggaagaggctgaacacactggctcactaccaggtgacagacgggtcctcggtggcactggtgcccaagcagacgtccgcctacaacatctccaactcctccaccttcaccaagtccctcagcagatacgagagcatgctgcgcacggccagcagccccgacagcctgcgctcgcgcacgcccatgatcacgcccgacctggagagcggcaccaagctgtggcacctggtgaagaaccacgaccacctggaccagcgtgagggtgaccgcggcagcaagatggtctcggagatctacttgacacggctactggccaccaagggcacactgcagaagtttgtggacgacctgtttgagaccatcttcagcacggcacaccggggctcagccctgccgctggccatcaagtacatgttcgacttcctggatgagcaggccgacaagcaccagatccacgatgctgacgtgcgccacacctggaagagcaactgcctgcccctgcgcttctgggtgaacgtgatcaagaacccacagtttgtgttcgacattcacaagaacagcatcacggacgcctgcttgtcggtggtggcccagaccttcatggactcctgctccacctctgagcacaagctgggcaaggactcaccctccaacaagctgctctacgccaaggacatccccaactacaagagctgggtggagaggtactatgcagacatcgccaagatgccagccatcagcgaccaggacatgagtgcgtatctggctgagcagtcccgcctgcacctgagccagttcaacagcatgagcgccttgcacgagatctactcctacatcaccaagtacaaggatgagatcctggcagccctggagaaggatgagcaggcgcggcggcagcggctgcggagcaagctggagcaggtggtggacacgatggccctgagcagctgagccccagctgtgatcatccagcatgatgcagcgtgaggacagctgagcagggaccgggacagccctcaccgcatgcgtgtggagtgtccggtggtgctcgggccgccgcagtgcagcgactgcccggccctccctcccctgcctcacccggtcgggtcccggctcttcctgtgtggaggtgatggtacctgccacaccacagctgcgcacacagctgcttgctcaggggccgggacagcactgggtgctcaggctggccaaggaccttcattgcctggcaagagctgcccagtggccttcatgggagaagggctgacctctgaggggctgaggggtgaggccagggccctccagggggaggggtagccagcttgggctgtccccttgagaccaggacaagaggctgggggtgtcagcattcccagctttccaagctgcccccaggcggcagagtctgagggtcccggggcccggttggcagctggagaaagaggcaaaaagcccgtagccgggcaagaggagctcaagtcggtctgggcccgttgccaccgactcccacctccagcacccatgcccgctgcaccgctgccatcctcagattcaccgcgtgctctgcgcggccgaggccggagcaccacatccacctcgccccagagaggctctgctccctcctatggaggggctgtgggccaggctgctcagactcctgggtggcttccagacggaccgggcagcccctctccgtcctcagggctgtgcctctgggagccactgggccaggggccccgggtcgcagagagcacgttcccgttatttattcccctccgcgtcctacacaggctgccctggcagctgtcttcaagggtaggctgagctccccaccctggagcccctgagggcggcccctgagcactcctctctctccactctctctgtccctgccccagcggcttccagtgtggcatctcagcagtgtcctggcccctccagagcagtgggacatctggggactgtttttgtgtttaggggaaaaaattctgctgcactctgcttgggccttgaggtctgtggcagggctcctctggcccgcagtggcctggatctatctgggccatgagtgacgggcagtgaccagagggactggaggccagcggtgtccacccttgccctcagcaagagagaatgcattcttaaaagaaagctgtacatgtatatatatgcatatatatatatgtggctctagcctcaggctccagccccagtggggtactgtacagttaactgaagaagaattttaaagacgatttgaacaagaaaatgaaggcagtgggaaagcaatgccaaatggttgtggagaaagtggccggagcctccctggagtggagcagccctgaagcctgtgccccccgacctgcgggccgctgttttggtttgacatgacaaggaaaggacttcctgctgaccctgagagcctctggggtgccgcggcaccacggggcatgcatgattgtgctagcgtttagtctgagttgatctttttaaaactgcaagtgttgaatactagaggttgttagacccttttttatgttttttaattaatcagtcacttgtaaaagcaaacaagcggtccatccccttttcaaggtcacttttttgatggtaccgaagatcccatggacattaagggacagctaactgtggccagactcagccccatgtccttggccaggcccaaggagaggactcggccccatggggtgtgccagtcttgcagtccgccccagctgagtagcgtgagccagatgacgccacagagacccgcctcttccctgaacgcgggtcggtgtggagtcagtgactgctgactcagggagctccttggccccgtgggcactgtgccagggctggggccttctgctgctgccacacccagctcaggcctgggccagcccctgcccccagcccactgagggggtgggcttactccctgggcagtcttgggggccagagctgaggccagtccatattacagtggctgggctgtttttttcagtagcccctagcattggctgggattcctgttcctgggtgcgcctccacctcccttctgatgtttcctggctatggtggggtgggaacctcagtttcccccaaagtcttccctggatgctggcttcaggttgaagtccctggttcttccagttcctcacgggttaggtaggggctcctgcatcaccttcagaatccagttccaacccccactctccttaggccttgtgctctgctctgccctgccaggctgcccttgtccatgtgagtagcatgggcgggtggtggggacggcagtggtgatgaagggggtgcaccacaggcctcatgaagcagttcccacatgggcgtgtggctggggcgtggccaccacagagcacatggctgtgtctaggcgcaagcactttagcagtatctgtttacatgcgcaaggatcaagccgactacctgtgctgtctactgggacagcagtctccgagctactccgtacctccctctgccaggtcgtggagttaggccccagtccctacttgtcactggttcccactgtgctcctaactgtgcagcacctgggagctctggcctggggctggaggccctggtaggagctgcagttggaggccgttctgtgcccagcagcggtgagcggctcccatgggccctgtgtctgcagggagccagggctgcggcacatgtgctgtgaaactggcacccacctggcgtgctgctgccgccacttgcttcctgcagcacctcctaccctgctccgtgtcctccctctccccgcgcctggctcaggagtgctggaaaagctcacgcctcggcctgggagcctggcctcttgatatacctcgagcttcccctgtgctccccagccccaggaccactggccccttggcctgaggggctgggggccccacgacctgcagcgtcgagtccgggagagagcccggagcggcgtgccatctcggctcggccttgctgagagcctccgccctggctttctccctgtctggattcagtggctcacgttggtgctacacagctagaatagatatatttagagagagagatatttttaagacaaagcccacaattagctgtcctttaacaccgcagaaccccctcccagaagaagagcgatccctcggacggtccgggcgggcaccctcagccgggctctttgcagaagcagcaccgctgactgtgggcccggccctcagatgtgtacatatacggctatttcctattttactgttcttcagatttagtacttgtaaataaacacacacattaaggagagattaaacatttttgctaaaagct

SEQ ID NO: 166753 - DNA, 11444 bp, Homo sapiens
  Payload ID: 12828
  Gene Symbol: PLXNA2
  Gene Name: plexin A2
  Uniprot ID: O75051
  ENST ID: ENST00000367033
  CDS Start-End: 759-6443
cgccgccgccgccgccaccgcgggagccagagctgccgggaggagcggcatccgcgccagactggagcgggagggcggcggagggcagttgctgggaatttttcagccgagagggcgagcgatccggagagagaccccgagagcttgggagcggtagggcgtgcgagcgccgcagccagcggagcaaacctcgaaatagatctggaaagccaggctcccggaggaaatgggactgtgaacgaaccggagagcaagaagggaaggaagcgccgggattgctgatgtcagaggagcccggaaagtcgcgctggaaaaatctgaagacagccggggctctgcttcttcctcaggagagacaccgccggccgcccccacacgccccctcggcgcctccgggtgccccctgagagccggcgacagcgcccagccgggctgctgcggggcgacggaggactgaggggcgcgcggagcggagaccgaggagcgacttcaggaatacagataagtgtctggtggcttgacgtggattttaatgaatttggactccatgtggatttggtcgtctccctgattccgagctgcgggcagggagaggggcctcgcgccgccctcagcagccggcggcggccgaggtagaccgagcggggacggaaggacagaccgacgtcgccgagctggaatcatgtgagggccaaccggggaaggtggagcagatgagcacacacaggagccgtctcctcaccgccgcccctctcagcatggaacagaggcggccctggccccgggccctggaggtggacagccgctctgtggtcctgctctcagtggtctgggtgctgctggcccccccagcagccggcatgcctcagttcagcaccttccactctgagaatcgtgactggaccttcaaccacttgaccgtccaccaagggacgggggccgtctatgtgggggccatcaaccgggtctataagctgacaggcaacctgaccatccaggtggctcataagacagggccagaagaggacaacaagtcttgttacccgcccctcatcgtgcagccctgcagcgaagtgctcaccctcaccaacaatgtcaacaagctgctcatcattgactactctgagaaccgcctgctggcctgtgggagcctctaccagggggtctgcaagctgctgcggctggatgacctcttcatcctggtggagccatcccacaagaaggagcactacctgtccagtgtcaacaagacgggcaccatgtacggggtgattgtgcgctctgagggtgaggatggcaagctcttcatcggcacggctgtggatgggaagcaggattacttcccgaccctgtccagccggaagctgccccgagaccctgagtcctcagccatgctcgactatgagctacacagcgattttgtctcctctctcatcaagatcccttcagacaccctggccctggtctcccactttgacatcttctacatctacggctttgctagtgggggctttgtctactttctcactgtccagcccgagacccctgagggtgtggccatcaactccgctggagacctcttctacacctcacgcatcgtgcggctctgcaaggatgaccccaagttccactcatacgtgtccctgcccttcggctgcacccgggccggggtggaataccgcctcctgcaggctgcttacctggccaagcctggggactcactggcccaggccttcaatatcaccagccaggacgatgtactctttgccatcttctccaaagggcagaagcagtatcaccacccgcccgatgactctgccctgtgtgccttccctatccgggccatcaacttgcagatcaaggagcgcctgcagtcctgctaccagggcgagggcaacctggagctcaactggctgctggggaaggacgtccagtgcaccaaggcgcctgtccccatcgatgataacttctgtggactggacatcaaccagcccctgggaggctcaactccagtggagggcctgaccctgtacaccaccagcagggaccgcatgacctctgtggcctcctacgtttacaacggctacagcgtggtttttgtggggactaagagtggcaagctgaaaaagattcgggccgacggtcccccccatggtggggtccagtacgagatggtctctgtgctcaaggacggaagccccatcctccgggacatggccttctccattgatcagcgctacctgtacgtcatgtctgagagacaggtcaccagggtccccgtggagtcatgtgagcagtatacgacttgtggggagtgcctgagctctggggaccctcactgtggctggtgtgccctgcacaacatgtgctcccgcagggacaaatgccaacaggcctgggaacctaatcgatttgctgccagcatcagccagtgtgtgagccttgcagtgcatcccagcagcatctcagtatctgagcacagccggttgcttagcctggtagtgagtgatgctcctgatctatctgcgggtatcgcctgtgcctttgggaacctgacagaggtggaggggcaggtgtccgggagccaggtcatctgcatctcacctgggcccaaggatgtccctgtcatcccgctggatcaagactggtttgggctggagctacagctgaggtccaaggagacagggaagatatttgtcagcaccgagttcaagttttacaactgcagtgcccaccaactgtgcctgtcctgtgtcaacagcgccttccgctgccattggtgcaagtaccgcaacctctgcactcatgaccccaccacctgctccttccaggagggccggatcaatatttcagaggactgtccccagctggtgcccacagaggagatcttgattccagtcggggaggtaaagccaatcacccttaaggcgcgaaatctgccccagccgcagtccggccagcgaggctatgagtgtgtcctcaacatacaaggagccatccaccgggtccccgctctgcgcttcaacagctccagcgttcagtgtcagaacagctcgtaccagtatgatggcatggacatcagcaatctggccgtggatttcgctgtggtgtggaacggcaatttcatcattgacaaccctcaggacctgaaagtccatctctacaagtgtgcagcccagcgggagagctgcggcctctgcctcaaggccgaccggaagtttgagtgtggctggtgcagcggcgagcgcaggtgcaccctccaccagcactgtaccagcccttccagcccctggctcgactggtccagccacaatgtcaagtgctccaaccctcaaatcaccgagattttgacggtgtctggaccgccggaaggagggacgcgagtgaccatccatggcgtgaacctgggtctggacttctccgagatcgcccaccatgtgcaggtggctggggtgccctgcacgcccctcccaggggaatacatcatcgctgagcagattgtctgtgagatgggccatgccctcgtgggaaccacctccgggccagtacgcctgtgtattggcgagtgtaagccagagttcatgacgaagtcccatcagcagtacaccttcgtgaacccttctgtgctgtcactcaacccaatccgaggtcccgagtcaggaggcactatggtgaccattaccggccattaccttggggctgggagcagcgtggcagtctacctgggcaaccagacctgcgagttctacgggaggtcaatgagtgagatcgtgtgtgtctcacccccatcatccaatggccttggcccggtccctgtttctgtgagtgtcgaccgagcccatgtggatagcaacctgcagtttgagtacatagatgaccctcgggtccagcgcatcgagccagagtggagcattgccagtggccacacacccctgaccatcacaggcttcaacctggatgtcattcaggagccaaggatccgagtcaaattcaatggcaaagaatctgtcaatgtgtgtaaagttgtgaacacaaccaccctcacctgcctggcaccctctctgaccacggactaccgccctggcctggacactgtggaacgcccagatgagtttggatttgtctttaacaatgtccaatccttgctaatttacaacgacaccaagtttatctactaccccaacccgacctttgaactgcttagccctactggagtcttggatcaaaagccaggatcgcccatcattctgaagggcaaaaacctctgccctcctgcctctggaggggccaaactcaactacactgtgctcatcggagagaccccttgtgctgtcaccgtatctgagacccagcttctctgcgagcctcccaacctcaccgggcagcacaaggtcatggttcacgtgggcgggatggtgttctcgcctggctcggtgagtgtcatctcagacagcttgctgaccctgccagccatcgtcagcatcgcggccggcggcagcctcctcctcatcatcgtcatcatcgtcctcattgcctacaagcgcaagtctcgagaaaatgacctcactctcaagcggctgcaaatgcagatggacaatctggagtcccgtgtggccttggagtgcaaggaagcttttgctgagctccagacggatatcaatgagttgaccagtgacctggaccgctcaggaatcccttacctggactatcgtacctacgctatgcgagtcctgttcccgggcatcgaggaccaccccgtcctgcgggagctggaggtacaaggaaacgggcagcagcacgtggagaaggccctgaagctctttgcccagctcatcaacaacaaggtgttcctgctgaccttcatccgcaccctggagctgcagcgcagtttctccatgcgcgaccggggcaacgtggcttcgctcatcatgaccggcctgcagggccgcctggaatatgccactgatgtcctcaagcagctgctctctgacctcatcgataagaacctggagaacaagaaccaccccaagctgctactccggaggacagagtctgtggctgaaaagatgctgaccaattggttcgccttcctcctgcacaagttcctaaaggagtgcgcaggggagccactcttcatgctatactgtgccatcaagcagcagatggagaagggccccattgatgccatcacgggcgaggcccgctactccctgagcgaggacaagctcatccggcagcagatcgagtacaagaccctgatcctgaactgcgtcaaccctgacaacgagaacagtccagagatcccagtgaaggtgttaaactgtgacaccatcacacaggtcaaggagaagattcttgatgccgtgtataagaatgtgccctattcccagcggccgagggcagtggacatggacttggagtggcgccaaggccggatcgcccgggtcgtgctgcaagatgaggacatcaccaccaagattgagggtgactggaagcggctcaacacactgatgcattatcaggtgtcagacaggtcggtggtggctctggtccccaaacagacctcctcctacaacatccctgcctctgccagcatctcccggacgtccatcagcagatacgactcctccttcaggtatacgggcagccccgacagcctgcggtcccgggccccgatgatcaccccagacctggaaagtggggtcaaggtgtggcatctggtgaagaaccatgaccacggtgaccagaaggagggtgaccggggcagcaagatggtgtccgagatctacctgacccggctactggccaccaagggcaccctgcagaagtttgtggacgacttgtttgagaccttgttcagcactgtgcaccggggcagcgctctccccctggccatcaagtacatgtttgatttcctagatgagcaggcagacaggcacagcatccatgacacagatgtgcggcacacctggaaaagcaactgcctccctctgcgcttctgggtgaacgtgattaagaacccccagttcgtgtttgacatccacaagggcagcatcacggacgcctgcctctctgtggtggcccagaccttcatggactcttgttcaacgtcagagcaccggctgggcaaggactccccctccaacaagctgctctatgccaaggacatccccagctacaagagctgggtggagagatactacgcagacatcgccaagctcccagccatcagtgaccaggacatgaatgcctacctcgccgagcagtcccgcctgcacgccgtggagttcaacatgctgagtgccctcaatgagatctactcctatgtcagcaagtatagtgaggagctcatcggggccctagagcaggatgagcaggcacggcggcagcggctggcttataaggtggagcagctcattaatgccatgtccattgagagctgagaggaggagcctcgcattcctgggaagagggacctgtccaagctgtcacactgggagtctcagatggaaggacaagtgatggggatcaggccccagagcttgctgtcccctgagaccccatcctggggagaggggaggactcctctccctacgccagccaagtttcgtcatagccagttccagctgggagagacagtgggcgtcgtccatcctcagtgagaacaccagagaacccggggccgggagaaggtggttcttcaagccgagaggcacgagctggggacagttctgcctctgtgactgctgctttgcatgaaaactcatttgatgtatattggggaaataatgagaactttatttaatttttttaagaaaaagggaaaaaaacagaaataaaacaaaaagccgccctgttaatcccgtccaacttttgtttaattctgatttctgtctcccttccatcttttctcccattcctccttctttatataatgcctatttccaaatgccagagaaagcagagatgctgagagacattggagagaaaatgactgtctccttttccttgaaattaaaaaaaaaaaaaaaaagagaaagaggagaagaagaatgatgagcacaagtatgcaccaaacacttcgcaaaaacagaggccagtaaaacctggaattatcccggcagccagaggagtatggaacttccagaactttgcacaaattgcaaagccatcaagagctcaccctggctgactggaaactgagctttatctaccacacacctgtatattctcatcttttgagaggagatgtgtacctagatagtaccaatgctttttgctactgttttttgttttgttttatttaatcctaaacctcaacaaatgaggagctggtctttgatatgtttcctttcaatttccctaaagttactatgagaagtggggtgaggtgggcctctcccagaccagacacctggcagccctgcctcatatcaatccctgtcataaaccaggcaccctggggaaacggcctggaggtgtgtgggccaggcctccacgaggttccatttgaaagttgatttggagacataggtgtttgactttggagttcactccaatcatccagtggtccctggcaattaaaaagaaaacaaaaatcaaacactgtttacagcaagcaatacttgaagagcataggttacagaagctgcagtatttattattatgctttctttctttcattctctcgtgcctggagaggggagaccacccttcgctcatatacggaagctcctgaccatctgggcctacagcacttcctcagtagaaatgactgtggcatgcccacgttactaccttctgcctctctttctgcctctcacggacttgtgagtgtgaaggacaagtggatgacttctcactggactttccttctctgtctcttctgatgatgcctaaaactatggataaccaattctcctgagtgtagattccaaacaaagagaccaaagctccatgcccaggtccaaaggccccatagaagccagtgggagtcatcgagaggaaaggcgctctgtgagtgtcaggaccttggtggccaggatagccatcagagtgtccaggcctcccacattaccttggatccgagcagccagctccaactgttctgcaagcagcactggagtcagggggtaggaggacaagtggaagcaaaggtgtgggactggggaagacaaagaggaacaagctgcccttcctcacttttcaaagggtcaggaatcctaggctatgatgctgggaagctagaccagctcctccaagagagactagaccagggtcattttctctgttattaactctgggctccagcttctccgtgccctgctttacctccaagtggttccaatttccaaaggccctgctgaccacatgtgattcccaggagagggctgggggaggggagcgcagaggtctggcttccatccttggcgtgtagctttggatcgctgtctaaccacacagcagacgttgcccggtctccccagctctagtttcttgcctgaatgcggctgacaaatgggaagagaaaagcattcagcaaaatactcaggaaacttgctgttttcattataattcacaaccagccatgccaaggccactttcttttgaaaatccacttctttaaagtttctcaggccctattagtagcctgaaggaaatactaatgactggccttccgcactaagccaaagtgtttgctcttcatagcactcaaagcttatcagcgcagagcccataatttatggagataaaaggaaaggagatataggtaagaagagtgtgaccaggagaccttatgctacctgtaaaaaagttcagcccaccccatctaacttctgagctctgtttgggtgaagattttctggccgcatggctgctcagactggcatccaggctttgctccaccaagaagttaaaggcagtcggacatctcagtagcatctctaccagcccttaactcaatgcatctacctggcatctcccagcagttacttttggagacgattcactgcccctggggcgtttccttgaaggtttgtggagagcgtggagaatgatggggcaatggccaattggagggtggagagtgaagagccggagctggctgtgagtggtttggccacatttctcaggattccatgagagacttggggaacttgggctgacaaaggaagtagcctggggcatccttaaggaaggaattaagaaaagggaaaaagctggactcaagccacgccatgagggtgaaaggttataaggccctgccccctttccagctgcccacctgttcctcctccacacctcttcgctttgggccaccaagaaccaatgaagtccacaccctttggatgagaaaaagagggagttggttggcctctcttctccctgttatccaatttgaggatattttgaccttgggtaaggatgaagtgttaaagccacagctcctctccacaagaagccattcatcttgggggaggcagagagggaagtctctctccaaagtctatccagcttcgcttcgtttcattgatctgcacaagagacaatgctctggaaaaggaagaggaccccagaagggtgcttggcaagacagaggatgctaatgggcaatggagagcactccctccagctggcccctgctgctgcctcccgtcctctgcatggggtcaggtgcttctgtgcttgctgtcctacctctctccacagcagggctctcaaaaccattttgatcccccattggcagagggttcccctctttacagagttcagtcattaaaagcatggatcagctgttaatctcattggaggagggaactgtttcctgcattcattcatctgggaaccttcttgagtagccactgtctgccagccactgctctagagatgggaaaacagcacggaacaaaaccaaggtctttcttccagcgaatttatatccttcaggaagctggttcctgccaccaacttagcaggcaacagttctcctcccctagtggcacagggtaccagttttgtaggaaaagtggtccagcaaaggaagaaagcagaccaacccagctgccttaccttattctggggccattcccccagcgatgagagctgctcttgtttctactgccaccatctcttctggctgcacttcacctgctgcttgagcttctgaccttccttcagttccaccaaatgaggacaggaaatagcagtcaagacccctggccctgctgagcgtgaaacagaagcaatggatgagtgctggacgaagaatggcctgggcagaacaaatagggagcatttgaaagcttctggctgataaatctccaggtgcatcccggttgccacgcctgcccccattaacctgctcctggtaaatactgatccagcagctgctccaggagaggccgtctttttttcccagccacgctgtgtcttgcatgagactcctggggcctgggcacagagagaaaagaattgagactcaggaggctcagtgggtgagaaaatgcaaagtggcttcacagacacagggctgtgggagcagatcgacggggaacttgggagatgaacttcagggccttccgacgccttgtctcaggaacatgctttgagaaaaatggtagcatcctttccataactcagtctctcttccctagtttccctgaagtgtgacgttttagtatctggagctcagtgatccccatgaatgagggataaagtttcactcttggtattttctaactagtgctagggaaagtcctgagacacgatcacagccactgcttggcatacagggcctccacccaataagcaaactggagattcctcagcctctcgtggacacccacatctcattcttctcacagcagagaagctctcccttcagcctgagctgtcttctttctgctgcagtgcagcctgctccctcctaccctggcctcaaggaaggtaggaaacatcttctgcatttcaaagtcctcactttgacttatttggccttcatcttggcatggaaggtggcaggcagaatggaaatactccccccaaacagaacagatattcttgcgtgtgtaagggcagaagggacaagctctctatcccatgagactaggggccggagcccacctgcctttccccacaacttttcctgctcaaacccactcctcttgacacactggaatctgtattatatatatttttaagaaaatacaatgatggttgtctggttttgttgtttttacaggtgttgtggaataaaaactgtaagaaaattaagtatttaaaatgttccaataaagtggggttttttgttattctaatatattattgtgtacctattgtaaatatgaaacactcctattttgcaagctgaggacacaatttgtactgttgttatatataaataaagtttactgaattaaaaaaaccttaaatctttaaataaa

SEQ ID NO: 166754 - DNA, 10885 bp, Homo sapiens
  Payload ID: 12829
  Gene Symbol: PLXNA3
  Gene Name: plexin A3
  Uniprot ID: P51805
  ENST ID: ENST00000369682
  CDS Start-End: 176-5791
agtgtgtgggcggcggcggcggcggctgcgcgcttggggcccggggcgcggggcgaggccgtggggacgtgcgagcggggccgcggtggggctcgggggcgcgtccacgtggccagagggcggccacccggagccagcggagggacaggcctgtccccaggcgcggctgccggccatgccctctgtctgcctcctcctgctgctcttccttgccgtggggggggccctgggcaacaggcccttccgtgccttcgtggtgacagacaccacgcttacccacctggctgtgcaccgggtgactggggaggtgttcgtgggcgcagtgaaccgagtctttaagctggcccccaacctgactgagctgcgggcccatgtcacggggcccgtcgaggacaacgctcgctgctacccgccccccagcatgcgcgtgtgtgcccaccgcctggcccccgtggacaacatcaacaagctgctgctcatagactatgcggcccgccgcctggtggcctgcggcagcatctggcagggcatctgccagttcctgcgtctggacgacctcttcaagctgggtgagccgcaccaccgcaaggagcactacctgtcgggggcccaggagcccgactccatggctggtgtcattgtggagcagggccaggggcccagcaagctgtttgtgggcactgctgtcgacggcaagtcggagtacttccccaccttgagctcccgcaagctcatcagtgatgaagacagcgcggacatgttcagtctcgtgtaccaggatgagtttgtgtcctcccagatcaagatcccctcagacacgctgtccttgtaccctgcctttgacatctactacatctacggcttcgtcagcgcctccttcgtgtacttcctgacgctgcagctggacacccagcagacgctgttggacacagcgggcgagaaatttttcacgtccaagatcgtgcgcatgtgcgcgggagactcagagttctactcatacgtggaattccccatcggctgctcctggcgcggcgtggagtaccgcttggtgcagagcgcccacctggccaagcctggcctgctgctggcccaggccctgggcgtgccggctgatgaggacgtcctcttcaccatcttctctcagggccagaagaaccgggccagcccaccccggcagaccatcctctgcctcttcaccctcagcaacatcaatgcccacatccggcgccgcatccagtcctgctatcgtggggagggcactctggctctgccctggctgctgaacaaggagctgccctgcatcaacacccccatgcagatcaacggcaacttctgtgggctggtgttgaaccagcctctgggaggcctgcatgtgatcgaggggctgcccctgctggccgacagcaccgacggcatggccagcgtggccgcctacacctaccgccagcactctgtggtcttcattggcacgcgcagcggcagcttgaagaaggtgcgggtcgatggcttccaggatgcccacctgtatgagacagtccccgtggtggatggcagccccatcctccgagacctgctcttcagcccggaccaccggcacatctatctcctgagtgagaagcaggtgagccagctcccggtggagacctgtgagcagtaccagagctgcgcagcctgcctgggctccggggacccgcactgtggttggtgtgtgctgcgacacaggtgctgccgcgaaggggcctgtctgggcgcctctgccccacacggctttgctgaggagctgagcaagtgtgtccaggtgcgggtccggcccaacaatgtgtcagtgacgtcacctggggtgcagctgaccgtcaccctgcacaacgtgccagacctcagtgcgggcgtgagctgcgccttcgaggcggcggcggagaacgaggcggtcctgctgccctccggtgaactgctctgcccctcaccctccctccaggagctccgagctcttaccagggggcatggggccacccgcactgtgcggctgcagcttctctccaaggagacaggcgtgaggtttgccggtgctgactttgtcttctacaactgcagcgtcctccagtcgtgcatgtcctgtgttggcagcccttacccctgccactggtgtaagtaccgccacacgtgtaccagccgcccccacgagtgctccttccaggagggcagggtccacagccctgagggctgccctgagatcctgcccagtggggacctcctgatccccgttggggtcatgcagcctcttaccttgcgggctaagaacctacctcagccgcagtcgggccagaagaactatgagtgcgtggtgcgggtgcaggggcggcagcagcgggtgcctgccgtgcgcttcaacagcagcagtgtgcagtgccagaacgcctcgtactcctatgaaggtgatgagcatggtgacaccgagctggacttttccgtggtctgggatggagacttccccatagacaagcctcccagcttccgagccctcctgtacaagtgctgggcgcagcggcccagctgtggcctctgcctcaaggctgatccccgcttcaactgtggctggtgcatctcagagcacaggtgccagctgcggacccactgcccggccccgaagaccaactggatgcacctgagccagaagggcacccggtgcagccacccccgcatcacgcagatccaccctctcgtggggcccaaggaaggaggcacccgggtcaccatcgtgggtgagaacctgggcctcttgtcccgagaggtgggcctgcgggtggctggcgtgcgttgcaactccattccggccgagtacatcagtgctgagaggatcgtgtgtgagatggaggagtcgctggtgcccagcccgccgccggggcccgtggagctgtgtgtgggtgactgttcagccgacttccgcacgcagtcggagcaggtctacagctttgtgaccccaacgtttgaccaagtgagtcccagccgtggcccggcgtccgggggcacacggcttaccatctcaggcagctctctggatgctggcagcagggtcacagtgactgtgagggacagcgagtgccagtttgtaaggagagatgccaaggcgatcgtgtgcatctcacctctctccaccctgggccccagccaggcccccatcacacttgccattgaccgggctaacatctccagccccgggctcatctacacctacactcaggaccccaccgtcacccgccttgagcccacctggagcatcatcaatggaagcactgccatcactgtgagtgggacccacctgctgacggtccaggagccccgggtccgtgccaagtaccgcggcattgagaccaccaatacatgccaagtgatcaacgacactgccatgctgtgtaaggcccccggcatctttcttgggcggccccagcctcgggcgcaaggcgagcaccctgatgagtttggcttcctgctggaccacgtgcaaacggcccgctccctcaaccgctcctcctttacctactaccctgatcccagctttgagccgctggggccctctggcgtgctggacgtcaaaccgggctcccacgtggtgctgaagggcaagaacctgattcccgctgcagccggcagctcccgcctcaactacactgtgctgataggaggccagccgtgttcgctcactgtctcggacacacaactcctgtgcgactcacccagccagactggccggcagcctgtcatggtgctggtgggtggcctggagttctggctgggcaccctgcacatctcggcagagcgggcgctgaccctaccggccatgatggggctggcggcggggggtgggctcctgctgctggccatcacagccgtgctggtggcctacaagcgcaagactcaggacgcggaccgtaccctcaagcgtctgcagctgcagatggacaacctggagtcccgtgtggccctggagtgcaaggaagcttttgcagagctgcagacggacatcaatgagctgactaaccacatggacgaggtgcagatccccttcctggactaccggacttacgccgtgcgcgtgctcttcccgggcatcgaggcccacccggtgctcaaggagctggatacgccacccaacgtggagaaggccctgcgcctcttcgggcagctgctgcacagccgcgcgttcgtgcttaccttcatccacacgctggaggcccagagcagcttctccatgcgcgaccgcggcaccgtggcctcgctcaccatggtggccctgcagagccggctcgactatgccacggggctgctcaagcaactgctggccgacctcatcgagaagaacctcgagagcaagaaccaccccaagctgctgctacgcaggacagagtcagtggctgagaagatgcttaccaactggttcacgttcctgctgcataagtttctgaaggagtgtgctggggagcctctcttcctgctttactgtgccatcaagcagcagatggagaagggccccattgatgccatcacgggcgaggcacgatactccctgagcgaggacaagctcatccgtcagcagatcgactacaagacactgacccttcactgcgtgtgtccggagaacgagggcagcgcccaggtcccagtgaaggttctcaactgtgacagcatcacccaggccaaagataagctgctggacactgtgtacaagggcattccgtactcccagcgtcccaaagctgaggacatggacctggagtggcgccagggccgcatgactcgcatcatcctccaggatgaggatgtcaccaccaagatcgagtgtgactggaagaggctcaactcactggcccactaccaggtgacagacggttccttggtggcattggtgcccaaacaagtgtctgcctataacatggccaactccttcaccttcacccgctccctcagccgctacgagagcttgctccgcacggccagcagccctgatagcctccgctcacgggcacccatgattacgcctgaccaggagacaggcaccaaattgtggcacctggtgaaaaaccacgaccatgccgaccatcgcgagggggaccgtggcagcaagatggtctccgagatctacctgacacggctgctggccaccaagggcacactgcagaagttcgtggatgacctctttgagacagtgttcagcacagcccaccggggctcggccctgcccctggccatcaagtacatgttcgacttcctggatgagcaggcggaccagcgccagatcagcgaccccgatgtgcgccacacctggaagagcaactgcctgccgctgcgcttctgggtgaatgtgatcaagaacccgcagttcgtgttcgacatccacaagaacagcatcacggatgcctgcctgtcggtggtagcccagaccttcatggactcctgctctacatccgagcaccgcctggggaaggactcgccctccaacaaactgctctacgccaaggacatccccaactacaagagctgggtggagaggtattatcgagacattgcaaagatggcatccatcagcgaccaggacatggatgcctacctggtggagcagtcccgcctccacgccagcgacttcagcgtcctgagtgcgctcaacgagctgtatttctatgtcaccaagtaccgccaggagattctcacggctctggaccgagatgcctcttgtcggaagcataagttgcggcagaaactggaacagatcatcagcctcgtgtccagcgacagctaaggtggtggaatcggtgaggagggggcttctcagtcctgtgccgtcctcccatccaggggagtggctggctcaagcctgggtccccgggctgagccctggattgggtatcgtggggcaggtcaccctggccacgatgcccccggcacacccaggcccccttcattagtgccttgctttgggccctgcagggggaggggtgacagggcgagcccccaccccagcagcagcaatacccccaccctcctgccctgtgcccaggtgttgggacagtcccaccctccctgctatttatatccctctgcctatttattgaatcgaacttcgcctctgtctccatctgtaaatatgtgtccccccaccggatgtcgccaccctcactcacctgcctcttcttgagctgtcctgggccctgccacccgtctgggctcctttgtgtagcattatcagcctcggtctggcctctggcacctcacccttgccatggctgaccccacccattccaaggcggggtcacggtaccagcagcacttggggtgaggcctccaaagcttcctcagaattgtggctgtgccacgctggaccacagggtccccctcaagcatctcggggccctattctctctgagcacctggagggctggactcaggcttgtgccagggcctgacttgggcctgggggccctagaacgctcctcctcctgagcctactgccaaacgtcctcagtgttgtctgcacctgctccgactccttcagccgccccattcagcgcccgctccgtccagtgcccgccctgtggggccaaggcggccgtgccttactactctgtgtcttctgcctcctctgaggaatctggccctgtctgacagtcccagaccccccgttctctcctctttagttgcatgagtttttctttgttcatggaatgttttttcctgattaaatgttggggaaatgccatccatgtggggctctgtccttggggcaggtcagtagacctgtggatgctgcatgagctggagccccattgtgggagaaaggaccactccttgcagggtcccagagggtttggggaggttcagggccatacccgacccatcagcaaaccccggtggctctaccttcaagacagattcaaggtagatagattctcctcccttccaccacccccacccagctctcctgtgccatcgtctatctctgcctggatgccagtctccctgcttctgccctggctctcttcagcctgttctcagcgtgggaggcagagagatcctgttatgatataaggtggatcatgttgcctcactgtttagaaccctccggcggtttcagctgcagccagctccttcaaaacctgacaattgcatactgtcgaggttgtggcacccatcatggtgcacctaccaaagtcttactcccaggcctgttaagtaatgcaggtggggagaaggtgacatgcaatttatttatttatttattttgagacagagtgtagctgtgttgcccaggctggagtgcagtggcaagatcacagctcagtgcagtctcaaactcctgggctcaagtgatcctcccacctcagcctcctgaatagctgggtgtattagtgcactctactatgccaggctttttttttttttttttttgagataggttgccgctatgttgttcaggctggtcttgaattcctggtctcaagtgatcctcacccctcagcctcccaaagtattgggattacaggcatgagccactgtgcccggccaggtgagatggaatcttatttttactttttatgtttttttttttttctttgacggagtgtcgctctgtcgcccaggctggagtgcagtggcatgatctcggctcactgcaagctccgcctcccaggttcacgccattctcctgcctcagcctcccgaatagctggaactacaggtgcccaccaccacgcccggctaattttttgtatttttagtagagacggggttttactgtgttagccaggatggtctcgatctcctgacctcgtgatccacctgcctcagcctcccaaagtgctgggattacaggcgtgagccaccatgcctgaccttttttttttttttttttttttttttttttggagacgggatcttgccctgttgcccacgctggagtgcagtggcaaaatcaactcactgcagccttgatgtcctgggctcaagtgatcttcctgcctcagccttctgagtagctaggattacaagtgcttgccaccatacccagctgttttttgttttttttttttttctttagtagagatggagtcttgctggttttgaacctcctgggctcaagtgatcctcctgttttggcctcccaaaattctgggattacagttgtgagccactgtgcccagccaagtgagatgcaattttttttttttttttttttgagacagagtttcactcttgttgcccaggctggagtgcaatggtatgatcttggctcaccgcaacctccgcctcccgggttcaagtgattctcctgcctcagcctcctgagtagctgagattacaggcatgtgccaccacgcccagctaattttgtatttttagtagacacagggtttctccatgttggtcaggctggtctcgagctcccgacctcaggtgatccgcccgcctcagcctcccaaagtgctgggattacaggcatgagccactgttcctggcctttcttctttttttgtttttgtttttttttgagatgcaattttaaatagggtggcttggacagccacctgagttgggtttaaaagctgccagctccagccgtccagctgtggggccacggtgccagacagtggtggtggttataggaccgtaggtgtttaccaaaactagacaagtccacataacaaccaactgcacaaataaggagtaaaataataaagagaaggacgtgtgaggcaggactggattgtagcccaggataaagagaagttgcgggatgacagctgtgccgtcggcccagacagaaccatctggacagaggacagaggataagggagatggttgaaaatactaccatcatatgataatgacaactaagccacaggaaaacaaggcagttttaacctcaggggaaatccctcagaaatggatggaatctaccagaagcatcatgagaggaagaggaagggaaacagagctaaattggggccaggtgtggtggctcgcacttgtcatcccagcacttttggaggcccaggcgggaagatcactggagcccaggagttcaggaccagcctgggcaacaaagcgagatcccctctctacaaaaaataaaaaactagccaggcatggtggtgcatgcctgtggtcccagttactcaggaggctgaggtgctggggaacaaggctgcagtgagctgtgattgtgccagcctaggtgacagagccagaccctgtatcaaaaaaaataataataattaaaaaacaaaagatcggctgggcgcggtggctcatgcctgtaatcccagcactttgggaggctgaggtgggtggaccacctgaggtcgggagttcgagaccagcctcaccaacatggagaaaccctgtgtctactaaaaatacaaaattagctgggcgtggtggtgcatgcctgtaattctagctacttgggaggctgaggcaggagaattcacttgaacccgggaagtggaggttgcggtgagccaagatcgcaccattgcactccagcctgggcaacaagagtgaaacactgtctcaaaaaaaaaaaaaaaaagtgaaagatctaaattgtcaactattcgtcaataattaatgtctaaaaaatattaagaaaggaagaaaggaatgagagcaaaagagagggagagaggaaagtgtcatcttcataagctgaaggccagtgccaccgtcaccactggcagagctccccagattctacaaagggaaactgttcctccatatggagtaatagggactggatatgtcatgccaaatgaaagaacacgccaaaccagacaaaatatatggaatgcagagtattaaaaaactggctgtgggccagtgagggacagcgacgtgtgggagctgggaaacaaggtaagccatgcgactggcccagtgtcctgtgtggagtttcctggtggagcctggcagacacccggactttaggagttgaaactgattcagagcgtcccagcagctggagtttgcagggcggagaaccagagagaagagagctgcacagggaaagaaccctggatatccacagaggctcccgttccagtgtgcagcggactacgactactggtgagcacaggcgtgtgaggaagctacccaagaccagggaaggccatcaccccagcaggagaggatgaacggtaactccagtgtgcaagcaggacagggactagcagctgtccccacccaccaggatagagaagctcatgttcacctaggcagcactggccagggtgcccagaatggtgtttgttgcctccatagagggaaacaagcctacagttaagagctgctctggtcccacacagcacatcttcaaagcaagactcaaaaggatcaaaccatttccttgttttctgagaataaaagcagttgtacctcttccttttcactctcagaaaatctgatagaatctataaaagagccctaaggctggagacactgtattttccagggagccaactccttgccccagacactagtcaattgccccagcactttcttcactgatcgttagaggaaaaaagctcatgttagatttaaaaatcaggaaaaaaatttaacactaaacttgcaaatattatgtggtgtatattacagttacacatttactatgtaagtgcaactgtaaaactgaggaagtattccaaaatgttgacagtagttaatcctgaatgacagaacccaattgattttcattttcttccatttcctaaattgtcttcaatttccttgtactccttgaatatctgaattctagaaccccccccccagcaacccaagcacaacaagaatattgggaggtgccccagctgcaaataaactcagacttggaatagta

SEQ ID NO: 166755 - DNA, 13061 bp, Homo sapiens
  Payload ID: 12830
  Gene Symbol: PLXNA4
  Gene Name: plexin A4
  Uniprot ID: Q9HCM2
  ENST ID: ENST00000321063
  CDS Start-End: 230-5914
tgcgttcggggctggggctggaggaggcagccacacgcgcgcacacgcacacgttcagaggagggcgagaggcagcggcataggctccatctgcagtgtcaatgcggcgctcccgctgaaggagggaaacgcggcgcgtccagtaggggagactgcattgctgagtcctggccctctgaggggacgactgtgcctgagtgctgctgtgccactgggacccgcctctgccatgaaagccatgccctggaactggacctgccttctctcccacctcctcatggtgggcatgggctcctccactttgctcacccggcagccagccccgctgtcccagaagcagcggtcatttgtcacattccgaggagagcccgccgagggtttcaatcacctggtggtggatgagaggacaggacacatttacttgggggccgtcaatcggatttacaagctctccagcgacctgaaggtcttggtgacgcatgagacagggccggacgaggacaaccccaagtgttacccaccccgcatcgtccagacctgcaatgagcccctgaccaccaccaacaatgtcaacaagatgctcctcatagactacaaggagaacaggctgattgcctgtgggagcctgtaccaaggcatctgcaagctgctgaggctggaggacctcttcaagctgggggagccttatcataagaaggagcactatctgtcaggtgtcaacgagagcggctcagtctttggagtgatcgtctcctacagcaacctggatgacaagctgttcattgccacggcagtggatgggaagcccgagtattttcccaccatctccagccggaaactgaccaagaactctgaggcggatggcatgttcgcgtacgtcttccatgatgagttcgtggcctcgatgattaagatcccttcggacaccttcaccatcatccctgactttgatatctactatgtctatggttttagcagtggcaactttgtctactttttgaccctccaacctgagatggtgtctccaccaggctccaccaccaaggagcaggtgtatacatccaagctcgtgaggctttgcaaggaggacacagccttcaactcctatgtagaggtgcccattggctgtgagcgcagtggggtggagtaccgcctgctgcaggctgcctacctgtccaaagcgggggccgtgcttggcaggacccttggagtccatccagatgatgacctgctcttcaccgtcttctccaagggccagaagcggaaaatgaaatccctggatgagtcggccctgtgcatcttcatcttgaagcagataaatgaccgcattaaggagcggctgcagtcttgttaccggggcgagggcacgctggacctggcctggctcaaggtgaaggacatcccctgcagcagtgcgctcttaaccattgacgataacttctgtggcctggacatgaatgctcccctgggagtgtccgacatggtgcgtggaattcccgtcttcacggaggacagggaccgcatgacgtctgtcatcgcatatgtctacaagaaccactctctggcctttgtgggcaccaaaagtggcaagctgaagaagatccgggtggatggacccaggggcaacgccctccagtatgagacggtgcaggtggtggaccccggcccagtcctccgggatatggccttctccaaggaccacgagcaactctacatcatgtcagagaggcagctcaccagagtccctgtggagtcctgtggtcagtatcagagctgcggcgagtgccttggctcaggcgacccccactgtggctggtgtgtgctgcacaacacttgcacccggaaggagcggtgtgagcggtccaaggagccccgcaggtttgcctcggagatgaagcagtgtgtccggctgacggtccatcccaacaatatctccgtctctcagtacaacgtgctgctggtcctggagacgtacaatgtcccggagctgtcagctggcgtcaactgcacctttgaggacctgtcagagatggatgggctggtcgtgggcaatcagatccagtgctactcccctgcagccaaggaggtgccccggatcatcacagagaatggggaccaccatgtcgtacagcttcagctcaaatcaaaggagaccggcatgaccttcgccagcaccagctttgtcttctacaattgcagcgtccacaattcgtgcctgtcctgcgtggagagtccataccgctgccactggtgtaaataccggcatgtctgcacccatgaccccaagacctgctccttccaggaaggccgagtgaagctgcccgaggactgcccccagctgctgcgagtggacaagatcctggtgcccgtggaggtgatcaagcctatcacgctgaaggccaagaacctcccccagccccagtctgggcagcgtggctacgaatgcatcctcaacattcagggcagcgagcagcgagtgcccgccctgcgcttcaacagctccagcgtacagtgccagaacacctcttattcctatgaagggatggagatcaacaacctgcccgtggagttgacagtcgtgtggaatgggcacttcaacattgacaacccagctcagaataaagttcacctctacaagtgtggagccatgcgtgagagctgcgggctgtgcctcaaggctgacccagacttcgcatgtggctggtgccagggcccaggccagtgcaccctgcgccagcactgccctgcccaggagagccagtggctggagctgtctggtgccaaaagcaagtgcacaaacccccgcatcacagagataatcccggtgacaggcccccgggaagggggcaccaaggtcactatccgaggggagaacctgggcctggaatttcgcgacatcgcctcccatgtcaaggttgctggcgtggagtgcagccctttagtggatggttacatccctgcagaacagatcgtgtgtgagatgggggaggccaagcccagccagcatgcaggcttcgtggagatctgcgtggctgtgtgtcggcctgaattcatggcccggtcctcacagctctattacttcatgacactgactctctcagatctgaagcccagccgggggcccatgtccggagggacccaagtgaccatcacaggcaccaacctgaatgccggaagcaacgtggtggtgatgtttggaaagcagccctgtctcttccacaggcgatctccatcctacattgtctgcaacaccacatcctcagatgaggtgctagagatgaaggtgtcggtgcaggtggacagggccaagatccaccaggacctggtctttcagtatgtggaagaccccaccatcgtgcggattgagccagaatggagcattgtcagtggaaacacacccatcgccgtatgggggacccacctggacctcatacagaacccccagatccgtgccaagcatggagggaaggagcacatcaatatctgtgaggttctgaacgctactgagatgacctgtcaggcgcccgccctcgctctgggtcctgaccaccagtcagacctgaccgagaggcccgaggagtttggcttcatcctggacaacgtccagtccctgctcatcctcaacaagaccaacttcacctactatcccaacccggtgtttgaggcctttggtccctcaggaatcctggagctcaagcctggcacgcccatcatcctaaagggcaagaacctgatcccgcctgtggctgggggcaacgtgaagctgaactacactgtgctggttggggagaagccgtgcaccgtgaccgtgtcagatgtccagctgctctgcgagtcccccaacctcatcggcaggcacaaagtgatggcccgtgtcggtggcatggagtactccccggggatggtgtacattgccccggacagcccgctcagcctgcccgccatcgtcagcatcgcagtggctggcggcctcctcatcattttcatcgtggccgtgctcattgcctataaacgcaagtcccgcgaaagtgacctcacgctgaagcggctgcagatgcagatggacaacctggagtcccgtgtggccctggagtgcaaggaagcctttgccgagctgcagacggacatccatgagctgaccagtgacctggatggagccgggattccgttcctggactatagaacttacaccatgcgggtgctgttcccaggaattgaagaccaccctgtcctccgggaccttgaggtcccgggctaccggcaggagcgtgtggagaaaggcctgaagctcttcgcccagctcatcaacaacaaggtgttcctgctgtccttcatccgcacgcttgagtcccagcgtagcttctccatgcgcgaccgtggcaacgtggcctcactcatcatgaccgtgctgcagagcaagctggagtacgccactgatgtgctgaagcagctgctggccgacctcattgacaagaacctggagagcaagaaccaccctaagctgctgctcaggaggactgagtcagtggctgagaagatgctgaccaattggtttactttcctcctctacaagttcctcaaggagtgtgctggggagcccctcttctccctgttctgtgccatcaagcagcagatggagaagggccccattgacgccatcacgggcgaggcccgctactccttgagcgaggacaagctcatccgccagcagattgactacaaaaccctggtcctgagctgtgtcagcccagacaatgccaacagccccgaggtcccagtaaagatcctcaactgtgacaccatcactcaggtcaaggagaagattctggatgccatcttcaagaatgtgccttgctcccaccggcccaaagctgcagatatggatctggagtggcgacaaggaagtggggcaaggatgatcttgcaggatgaagacatcaccaccaagattgagaatgattggaagcgactgaacacactggcccactaccaggtgccagatggttccgtggtggcattagtgtccaagcaggtgacagcctataacgcagtgaacaactccaccgtctccaggacctcagcaagtaaatatgaaaacatgatccggtacacgggcagccccgacagcctccgctcacggacacctatgatcactcctgacctggagagtggagtcaagatgtggcacctagtgaagaaccacgagcacggagaccagaaggagggggaccgggggagcaagatggtgtctgaaatctacctgacccgactcctggccactaagggcacactgcagaagtttgtggatgacctctttgagaccatcttcagcacggcacaccgtggctctgccctgcccctggccatcaagtacatgtttgacttcctggatgagcaggctgataaacatggcattcatgacccgcacgtccgccatacctggaagagcaattgcctgcccctgaggttttgggtcaacatgatcaagaacccgcagtttgtgtttgacatccataagaacagcatcacagacgcctgcctctctgtggtggctcagaccttcatggactcttgctccacgtcagagcaccggctgggcaaggactcgccctccaacaagctgctgtatgccaaggacatccccagctacaagaattgggtggagaggtattactcagacatagggaagatgccagccatcagcgaccaagacatgaacgcatacctggctgagcagtcccggatgcacatgaatgagttcaacaccatgagtgcactctcagagatcttctcctatgtgggcaaatacagcgaggagatccttggacctctggaccacgatgaccagtgtgggaagcagaaactggcctacaaactagaacaagtcataaccctcatgagcttagacagctgagaaccgtccttccagggccgccctggagggggacacaccaagccgtgcctcagtctagattatcatctttaccaagtgcaagttccgactggcatcagcagcatcccctgagcagcgctgtttctctctctttctctctgcctctttccgtttctccctccttcctggatctcttctcttccagttgctctgccaacacgattggaccaagccactgaccctcagttagtccaagaatggccaggcccatggcaagggagctgaccagaagatgtcagagaggcctctgtctcccaggtgctcctgaccctgtgcatgtcagcagcagggtgcaaataacgaatgaggagccagggacaggggacatttctgtgctgctacttcaccttccactttggcagcccctgctttggtctgagccttggcctagggaagaggcaaggaaggacttcagtattatctttactgggaagacatcacctggctctcccttcccacagttccatctccagtggttcagccagtggtctgatcgctttgcagctgtgagaagaaaggctacacctcctgcatgtggctggagcagggcatgtgtgggcagctgggaggtgctccttgaggctccttctcccccactgggctggtgtccagaggcttcctgtccttttccaggtctccagagggacctgcctgccctgcctgctcccccgccagtagaaagccaggcaggagaaagaatagcaattacattccaccatggagatgctcctgaccttttcatctgaatcctagtagcagaaatgtaacacagggggagaaaaggaaagagagttgcatctaccctggaagcagaatttgttttccatttaccctcaaattcaaatgagtcacaatcatagtcataggtctagtccactaccagagccctgagtgctgtcaagagaaagcatctatctccaccctcctttgtcaaccttcatcaagggtcaacgtgaaatgcagagtgcatctaggagattctacctccagccatctccatggctccatccccatcatccttcctgagaactccatagacggctggggccaacagcctagtccctgttccctctgcagaatccggtgccattgctatgcagatgactttgtcactgggctgtccagacctctttgggaatgatttcatcaacatctcagctgtctctcatcattctccttcctcatctcttcagcagtcatccttgaaagaaacagacttaagcaaagcctcacggagacagcccaaaatgccagccaacctcagcctccagcttgtcagatctgggagggacaaagagtcgagctgatgggcctggctggaattaagaagagggacatacaaatgaccttggccttggcatccatctccccatctgttcttacatctacagatgcacgattttagccaggcaggcaaatgtgtgcctagaaattgatactaggtaagcagaggctatggggagagatggtctaatggagggttctaggaacctttcatcctaaggagaccttaggtgctgtctggtgcagtctcccatcctaagcaggagtctctgttggcacctctgctctggagttgttcaccactatgggagacaaggagaaacatcttaggtgaggttgaggagaaggattcacagtcttgccttcactccccaaacatcagacatcattccttgtcacccactcagaatgagccccccttggggaagaaaccacaccatttccagcaaagtccatggagcatccggtacttttaagaacacttgcccctttggatatgaatatgtgcacatgtgtgtgagcacatgtatgtgtgtgtgtgtgtctgccccaggtgtaggcggaaagctcaaaaggatttcttgtcctttgtaggaggatttttgaagtgttccccttctctttccccttgctcatccattcatcctgcagcttcaggacatttcaacacttacttgctttctatgctgagagctggtgggtggaaggagagggcgcttgtccataggaaatcagggtggtcgcctgccgaggcctggaccttggaacagggcatcatgtgacatcgcagaggacagatggtggaaaagacatgagcaacctaatgggaagaggaaaatgggaaacaatgcattggaagaggaagaaaaaaaataaataaccaaaggttttggcaagtgcagtaccaggtggagaagcttgacttttctatccttgatcattttattccctcccaagaagtcagtcacaggacctggaaggccagaaagggtacatgtgggagacggtctgaggaagtacctcggtcactacaatatttttgcacatataaagggttggggaggaaagagacacaaacgtatttaacacagatttgctggatggaagctgcgtgtgtgaacgtgtgtatgagtgagtgcattttgattttttttttttttttttgcacagttaagagaaaaaatcaaacaagcagaaaaaaaaaagaaaaaagacttatcacggttctgctgaagcttttattttttactggatgatgattattgttattgttactttggcggtacaggactttattttattccatgtttttgttataagaaaaatttcaaacacctcagagaaatagaaaggttaggaagaaagaggagacaaggacagacaaattttctggctgtccccatttctcctgggggaggggtttggggctggtttgactttaattggtgggtgggttgtttctgccgctctgtttgctgcagtccccgtggcctgcttggggactgagaaatttgagccaggtatccagagccacagcccatcttgcttataaaaattatcttctgctgtttgttttccatttcttccgtttggattcttggtgcacgtgtgatatggtatttaaaagcaaagacaagcaacattgtcaaaaagctgtccttgccccccatcccccacccaaatcttttttccaaactcccccagggatcttccttaccccactggcagagcaaacatccaggggctgtccatgtggcttgcgggctcccagagaaaggaattgggccaactttgtcctgtgggatggaggccccttcacggcctccctcgaggcaaagttaatttgtagggtcaccattatgttgagtcatgagcagacagaaggagagaaaaggccatcttccttaccttcccctccaacttatcccgtaccctcccagggaaaatggtaccagactgagccatcaaaatcactgacaaagtttaggtgggaattttttttgcatgttggagagagaagggcttaaggtagcagggaagaagggggctttgtggggtcctaaattttaaggaataagtagaggaagacaagaaacagagtggtaggctggtcatttctcctggccacaagtccccccagatgcagcttttacccattctttgtccttccccataaggagagaccctgacatttcttggtagctgcaaatagtgccactaagtgaaggtggccatcatgccagttacttcctcaggaaaatattttcttgccttcttctttcagtatggttttaaatttgggaacagtggataacccaagtgtcccacaggccaaggtacattccaatggcagcatgatccctgcacccaaagccagcccctaaagcctaccccttgtgcacccgcagcctggtaagtgagcttggctgcttgtgaggagctacaagtgaaagagaagttattttaaataaatcccaaagtttgaggcagactgtccaggactgttcccaggaagaagcaggagttacccacaggaaaagtctctgacctggtcccctcaggcccagctacctgcgcccaccagcagtgaaggttgatgtactggcccagcatctccacctcccccatgcaaccaggtccctggtaccgtgtctcccgttgcatgtctggcttctgcctgtgctcctcctgccacgagcatcctccctgtccctcctcattccaccgtgtctctcctgcacacatagcctctgtcccagggcgatttatccacttgagtacaggagctgctcagacctctcagcccagccctctgtgactgccccagccccatcctaccccacccaaagctgccttcctggctgtaggagctccctcgtctagccaaggccctatgggtccccatccgaggatccacaagcaatgacttcccaaatgacctccactgcaagaagaatccttaccactgtttccagagccgtgaacgatgctgtgatgggcccaggtctcagcaccaccctctgtgacctaaaaagaaaagctcaatttccatctgtcttctttcccaggaccaaggggacacagtaatgtgaagtcaaatacttaaccgagcaaagggccagtattgttatcagtcaaggacaaacctcccacctcacagacagccaagcagtgagggaaagacagacagacataggtaggaaggtgctctgcaggcacaaggcccagagaagcccctctccgggaacttcccctgctccttccaggaacagtgagcccagtgagcagccccagccagctcttcaaggccttcaaggggtctttccatgactgagtcacctccaggagctcacctgacccccagagaagacctaccccaggcagctccgtgccctggcttctccccatgccccaaatccccccccgccatccctcctggtcctcgtctacatcaagggcctcttcccctcttcctgccagctctcaggacaggtgactgggaggccttgaaccctcagcctcttcctttaaaaaaaacaaaacaaaacaaaactgtgggccatttatttgggattttggagttgtttggtttttgtttgtatatcttaatagttcgaaagtaagaagggagccctgctatggatgttaagtccaaattactcggttagtgggagcaaaacctatgacttccaaggggatgaggagaggttcagaggacaggaggagcctcccccattgaaaaaaaaaaatgggtcaggacattccctggatgaggacaatgctaggggtggcatctcacatggctgctgctattcctggtgcttccccacacttttgacagatggagtccttctcctaccgcctcctgccacctcaccctacaggcattctctatgtaggaaacaagagccttattttatagagtggggagctgagacacagcctcaggtaacactgacacagctcccgaatgaggctgggacactctgcaaacctctcctcatggtgctaagggtggcatgctcttgacaggaaacctaaatgaccactcctctcatttggaaagtaatccactgcagtaaaagtttcagacatgcaagagagagtttttttttttttactacaaatttttgctcccccataaaattattttattagagggagtatccaagttttaaaagtatatagaattttttggttgtaagagaaatacatactcattaggatcccgattaaattccttgagtagactggtgcctaccagaaagcaaagcaaagttaaacaaaacgaaacaaaatccttcatatacaaaaagaactttctgtttgtattggcagaggtagtgaggtgattcaggtaggctgaaaatcctgggttgcgggagcctcactttattccattcccacccgctttgatgtctatgcttggctctctgggctgcccctggtactgccgaatcctacacatctcttatcagctttcctcaaactttaaggaggctctgtgagggatgggtcatgggaagacccaagctttccctccgccaggattgcaaaagcaagtagacttggtctatgcagctcttcttccagcaatttctttatttggaattagaacttcctttgttagtatctttgatcttttgactcaagcacattttggaagggctcccttacaaaagtagaatttaaaacagaggatacagttaaagagcaacccaaaggacgcttaagaaaccgagaccacttcaccaaacaggactaaggaacactttcgtgcacagaagtcagccgcaatccaggcacaggacgaagatgggatacacgtgctcatctgtctgtcctcctttcctctccctccccgacgttctagttagcttgttgacttgttaaaccttctgttcttaaaatgaaaagctagcttacctcaaagaatcttgtttccattcggaaaccaacgattttgtgttttagaatggacagccctcccctcaccactccctaccttggcctggtgtccttgagacatacggtctttgcttagtcgtgtgttggctgctttgagcaggaacaaggcctccaggccctgaggtgggaaggaaggattggatgccactgccctcctccccactttagcatgtaggggccagcccatctcttccagcagggtcctgctgagttaccatagcaaccagcaactccagggtaccacaacagacaatggctcagcgagccgacgtgtggggatgatgcaggggttttggcccagccagaggacccagagttgagcttcaaatgctagagaaggggagaaacaggatggaagggtggtttaaggaaccggcaggggtctttgagtcacatagagaagccgttgaaggaggtagggcaggttatctctgttccagtcacccccttccagccccatcccacttctgtttcaaactaaagctcccacctcgaacattgaccctttgttagaacaaagcaaagcatatctttagacaacagtgttaaaatgagcctcaaatgtatgtggatgagatctctaagaagagggtcttctggttttgatttttaaagaagagtatcctagtaaaatattaaaaaaaaattaaaaagtttttaaaaaggaaacctgtgctatttaaattggagcccagttgtaacttggtaaaggcaagcttctgtacctttgttataattaattgtatacctgtgtatgtaaatataaggcattcctattttgcagttcagaacaaaaaaaacttatttgtaatatagaataaagtttattaaaaaataataaaaatgcagtttggga

SEQ ID NO: 166756 - DNA, 13786 bp, Homo sapiens
  Payload ID: 12830
  Gene Symbol: PLXNA4
  Gene Name: plexin A4
  Uniprot ID: Q9HCM2
  ENST ID: ENST00000359827
  CDS Start-End: 964-6648
gcgagccgcggcggcagcaggcagcccgggagctccggcggcggccgagccagcggcggccccgctccctgccccctgcaaactttgcgagcagcccgcccggggggccgggggcgcgcccgggaggcccggctcggcccgcggccgagctctccgccgccgcagcgccagccgccgcagccaccaccgccgcagccccgcgcctccccggggagcagccggcggctcccgcggccccccagccccggccccagggcactgcccggcgagtgtctcggcaagggtgggggctgccgcggcgcggccggccgcgggctgccggggggcggccgccgctacccagagaggcgcgcagaggcgccgagagcgctccccggcgggtcccccgcgcactcgccgcgcccgggcagcggcccgaccgggcgagcatgggcggcgcggagtgacgccgctgtgcccgcttggcatcaaggacattcagcccgcgggggtggggacgaaggggggcagcccggcgtcgccaccgcagcccccgagagccgccgccgctgctcgggctccggggctgggtggaggaaaggggtgttcggaatcgatccccattttccgacctttttgttggacattacgcccaccttggacgccgcaagagaagctgtcaagccccgcaggctctgattcggcgccctccgcgttcctcggctgctcccggcttccctgtgcctcggtggagtatttgcgttcggggctggggctggaggaggcagccacacgcgcgcacacgcacacgttcagaggagggcgagaggcagcggcataggctccatctgcagtgtcaatgcggcgctcccgctgaaggagggaaacgcggcgcgtccaggggagactgcattgctgagtcctggccctctgaggggacgactgtgcctgagtgctgctgtgccactgggacccgcctctgccatgaaagccatgccctggaactggacctgccttctctcccacctcctcatggtgggcatgggctcctccactttgctcacccggcagccagccccgctgtcccagaagcagcggtcatttgtcacattccgaggagagcccgccgagggtttcaatcacctggtggtggatgagaggacaggacacatttacttgggggccgtcaatcggatttacaagctctccagcgacctgaaggtcttggtgacgcatgagacagggccggacgaggacaaccccaagtgttacccaccccgcatcgtccagacctgcaatgagcccctgaccaccaccaacaatgtcaacaagatgctcctcatagactacaaggagaacaggctgattgcctgtgggagcctgtaccaaggcatctgcaagctgctgaggctggaggacctcttcaagctgggggagccttatcataagaaggagcactatctgtcaggtgtcaacgagagcggctcagtctttggagtgatcgtctcctacagcaacctggatgacaagctgttcattgccacggcagtggatgggaagcccgagtattttcccaccatctccagccggaaactgaccaagaactctgaggcggatggcatgttcgcgtacgtcttccatgatgagttcgtggcctcgatgattaagatcccttcggacaccttcaccatcatccctgactttgatatctactatgtctatggttttagcagtggcaactttgtctactttttgaccctccaacctgagatggtgtctccaccaggctccaccaccaaggagcaggtgtatacatccaagctcgtgaggctttgcaaggaggacacagccttcaactcctatgtagaggtgcccattggctgtgagcgcagtggggtggagtaccgcctgctgcaggctgcctacctgtccaaagcgggggccgtgcttggcaggacccttggagtccatccagatgatgacctgctcttcaccgtcttctccaagggccagaagcggaaaatgaaatccctggatgagtcggccctgtgcatcttcatcttgaagcagataaatgaccgcattaaggagcggctgcagtcttgttaccggggcgagggcacgctggacctggcctggctcaaggtgaaggacatcccctgcagcagtgcgctcttaaccattgacgataacttctgtggcctggacatgaatgctcccctgggagtgtccgacatggtgcgtggaattcccgtcttcacggaggacagggaccgcatgacgtctgtcatcgcatatgtctacaagaaccactctctggcctttgtgggcaccaaaagtggcaagctgaagaagatccgggtggatggacccaggggcaacgccctccagtatgagacggtgcaggtggtggaccccggcccagtcctccgggatatggccttctccaaggaccacgagcaactctacatcatgtcagagaggcagctcaccagagtccctgtggagtcctgtggtcagtatcagagctgcggcgagtgccttggctcaggcgacccccactgtggctggtgtgtgctgcacaacacttgcacccggaaggagcggtgtgagcggtccaaggagccccgcaggtttgcctcggagatgaagcagtgtgtccggctgacggtccatcccaacaatatctccgtctctcagtacaacgtgctgctggtcctggagacgtacaatgtcccggagctgtcagctggcgtcaactgcacctttgaggacctgtcagagatggatgggctggtcgtgggcaatcagatccagtgctactcccctgcagccaaggaggtgccccggatcatcacagagaatggggaccaccatgtcgtacagcttcagctcaaatcaaaggagaccggcatgaccttcgccagcaccagctttgtcttctacaattgcagcgtccacaattcgtgcctgtcctgcgtggagagtccataccgctgccactggtgtaaataccggcatgtctgcacccatgaccccaagacctgctccttccaggaaggccgagtgaagctgcccgaggactgcccccagctgctgcgagtggacaagatcctggtgcccgtggaggtgatcaagcctatcacgctgaaggccaagaacctcccccagccccagtctgggcagcgtggctacgaatgcatcctcaacattcagggcagcgagcagcgagtgcccgccctgcgcttcaacagctccagcgtacagtgccagaacacctcttattcctatgaagggatggagatcaacaacctgcccgtggagttgacagtcgtgtggaatgggcacttcaacattgacaacccagctcagaataaagttcacctctacaagtgtggagccatgcgtgagagctgcgggctgtgcctcaaggctgacccagacttcgcatgtggctggtgccagggcccaggccagtgcaccctgcgccagcactgccctgcccaggagagccagtggctggagctgtctggtgccaaaagcaagtgcacaaacccccgcatcacagagataatcccggtgacaggcccccgggaagggggcaccaaggtcactatccgaggggagaacctgggcctggaatttcgcgacatcgcctcccatgtcaaggttgctggcgtggagtgcagccctttagtggatggttacatccctgcagaacagatcgtgtgtgagatgggggaggccaagcccagccagcatgcaggcttcgtggagatctgcgtggctgtgtgtcggcctgaattcatggcccggtcctcacagctctattacttcatgacactgactctctcagatctgaagcccagccgggggcccatgtccggagggacccaagtgaccatcacaggcaccaacctgaatgccggaagcaacgtggtggtgatgtttggaaagcagccctgtctcttccacaggcgatctccatcctacattgtctgcaacaccacatcctcagatgaggtgctagagatgaaggtgtcggtgcaggtggacagggccaagatccaccaggacctggtctttcagtatgtggaagaccccaccatcgtgcggattgagccagaatggagcattgtcagtggaaacacacccatcgccgtatgggggacccacctggacctcatacagaacccccagatccgtgccaagcatggagggaaggagcacatcaatatctgtgaggttctgaacgctactgagatgacctgtcaggcgcccgccctcgctctgggtcctgaccaccagtcagacctgaccgagaggcccgaggagtttggcttcatcctggacaacgtccagtccctgctcatcctcaacaagaccaacttcacctactatcccaacccggtgtttgaggcctttggtccctcaggaatcctggagctcaagcctggcacgcccatcatcctaaagggcaagaacctgatcccgcctgtggctgggggcaacgtgaagctgaactacactgtgctggttggggagaagccgtgcaccgtgaccgtgtcagatgtccagctgctctgcgagtcccccaacctcatcggcaggcacaaagtgatggcccgtgtcggtggcatggagtactccccggggatggtgtacattgccccggacagcccgctcagcctgcccgccatcgtcagcatcgcagtggctggcggcctcctcatcattttcatcgtggccgtgctcattgcctataaacgcaagtcccgcgaaagtgacctcacgctgaagcggctgcagatgcagatggacaacctggagtcccgtgtggccctggagtgcaaggaagcctttgccgagctgcagacggacatccatgagctgaccagtgacctggatggagccgggattccgttcctggactatagaacttacaccatgcgggtgctgttcccaggaattgaagaccaccctgtcctccgggaccttgaggtcccgggctaccggcaggagcgtgtggagaaaggcctgaagctcttcgcccagctcatcaacaacaaggtgttcctgctgtccttcatccgcacgcttgagtcccagcgtagcttctccatgcgcgaccgtggcaacgtggcctcactcatcatgaccgtgctgcagagcaagctggagtacgccactgatgtgctgaagcagctgctggccgacctcattgacaagaacctggagagcaagaaccaccctaagctgctgctcaggaggactgagtcagtggctgagaagatgctgaccaattggtttactttcctcctctacaagttcctcaaggagtgtgctggggagcccctcttctccctgttctgtgccatcaagcagcagatggagaagggccccattgacgccatcacgggcgaggcccgctactccttgagcgaggacaagctcatccgccagcagattgactacaaaaccctggtcctgagctgtgtcagcccagacaatgccaacagccccgaggtcccagtaaagatcctcaactgtgacaccatcactcaggtcaaggagaagattctggatgccatcttcaagaatgtgccttgctcccaccggcccaaagctgcagatatggatctggagtggcgacaaggaagtggggcaaggatgatcttgcaggatgaagacatcaccaccaagattgagaatgattggaagcgactgaacacactggcccactaccaggtgccagatggttccgtggtggcattagtgtccaagcaggtgacagcctataacgcagtgaacaactccaccgtctccaggacctcagcaagtaaatatgaaaacatgatccggtacacgggcagccccgacagcctccgctcacggacacctatgatcactcctgacctggagagtggagtcaagatgtggcacctagtgaagaaccacgagcacggagaccagaaggagggggaccgggggagcaagatggtgtctgaaatctacctgacccgactcctggccactaagggcacactgcagaagtttgtggatgacctctttgagaccatcttcagcacggcacaccgtggctctgccctgcccctggccatcaagtacatgtttgacttcctggatgagcaggctgataaacatggcattcatgacccgcacgtccgccatacctggaagagcaattgcctgcccctgaggttttgggtcaacatgatcaagaacccgcagtttgtgtttgacatccataagaacagcatcacagacgcctgcctctctgtggtggctcagaccttcatggactcttgctccacgtcagagcaccggctgggcaaggactcgccctccaacaagctgctgtatgccaaggacatccccagctacaagaattgggtggagaggtattactcagacatagggaagatgccagccatcagcgaccaagacatgaacgcatacctggctgagcagtcccggatgcacatgaatgagttcaacaccatgagtgcactctcagagatcttctcctatgtgggcaaatacagcgaggagatccttggacctctggaccacgatgaccagtgtgggaagcagaaactggcctacaaactagaacaagtcataaccctcatgagcttagacagctgagaaccgtccttccagggccgccctggagggggacacaccaagccgtgcctcagtctagattatcatctttaccaagtgcaagttccgactggcatcagcagcatcccctgagcagcgctgtttctctctctttctctctgcctctttccgtttctccctccttcctggatctcttctcttccagttgctctgccaacacgattggaccaagccactgaccctcagttagtccaagaatggccaggcccatggcaagggagctgaccagaagatgtcagagaggcctctgtctcccaggtgctcctgaccctgtgcatgtcagcagcagggtgcaaataacgaatgaggagccagggacaggggacatttctgtgctgctacttcaccttccactttggcagcccctgctttggtctgagccttggcctagggaagaggcaaggaaggacttcagtattatctttactgggaagacatcacctggctctcccttcccacagttccatctccagtggttcagccagtggtctgatcgctttgcagctgtgagaagaaaggctacacctcctgcatgtggctggagcagggcatgtgtgggcagctgggaggtgctccttgaggctccttctcccccactgggctggtgtccagaggcttcctgtccttttccaggtctccagagggacctgcctgccctgcctgctcccccgccagtagaaagccaggcaggagaaagaatagcaattacattccaccatggagatgctcctgaccttttcatctgaatcctagtagcagaaatgtaacacagggggagaaaaggaaagagagttgcatctaccctggaagcagaatttgttttccatttaccctcaaattcaaatgagtcacaatcatagtcataggtctagtccactaccagagccctgagtgctgtcaagagaaagcatctatctccaccctcctttgtcaaccttcatcaagggtcaacgtgaaatgcagagtgcatctaggagattctacctccagccatctccatggctccatccccatcatccttcctgagaactccatagacggctggggccaacagcctagtccctgttccctctgcagaatccggtgccattgctatgcagatgactttgtcactgggctgtccagacctctttgggaatgatttcatcaacatctcagctgtctctcatcattctccttcctcatctcttcagcagtcatccttgaaagaaacagacttaagcaaagcctcacggagacagcccaaaatgccagccaacctcagcctccagcttgtcagatctgggagggacaaagagtcgagctgatgggcctggctggaattaagaagagggacatacaaatgaccttggccttggcatccatctccccatctgttcttacatctacagatgcacgattttagccaggcaggcaaatgtgtgcctagaaattgatactaggtaagcagaggctatggggagagatggtctaatggagggttctaggaacctttcatcctaaggagaccttaggtgctgtctggtgcagtctcccatcctaagcaggagtctctgttggcacctctgctctggagttgttcaccactatgggagacaaggagaaacatcttaggtgaggttgaggagaaggattcacagtcttgccttcactccccaaacatcagacatcattccttgtcacccactcagaatgagccccccttggggaagaaaccacaccatttccagcaaagtccatggagcatccggtacttttaagaacacttgcccctttggatatgaatatgtgcacatgtgtgtgagcacatgtatgtgtgtgtgtgtgtctgccccaggtgtaggcggaaagctcaaaaggatttcttgtcctttgtaggaggatttttgaagtgttccccttctctttccccttgctcatccattcatcctgcagcttcaggacatttcaacacttacttgctttctatgctgagagctggtgggtggaaggagagggcgcttgtccataggaaatcagggtggtcgcctgccgaggcctggaccttggaacagggcatcatgtgacatcgcagaggacagatggtggaaaagacatgagcaacctaatgggaagaggaaaatgggaaacaatgcattggaagaggaagaaaaaaaataaataaccaaaggttttggcaagtgcagtaccaggtggagaagcttgacttttctatccttgatcattttattccctcccaagaagtcagtcacaggacctggaaggccagaaagggtacatgtgggagacggtctgaggaagtacctcggtcactacaatatttttgcacatataaagggttggggaggaaagagacacaaacgtatttaacacagatttgctggatggaagctgcgtgtgtgaacgtgtgtatgagtgagtgcattttgattttttttttttttttttgcacagttaagagaaaaaatcaaacaagcagaaaaaaaaaagaaaaaagacttatcacggttctgctgaagcttttattttttactggatgatgattattgttattgttactttggcggtacaggactttattttattccatgtttttgttataagaaaaatttcaaacacctcagagaaatagaaaggttaggaagaaagaggagacaaggacagacaaattttctggctgtccccatttctcctgggggaggggtttggggctggtttgactttaattggtgggtgggttgtttctgccgctctgtttgctgcagtccccgtggcctgcttggggactgagaaatttgagccaggtatccagagccacagcccatcttgcttataaaaattatcttctgctgtttgttttccatttcttccgtttggattcttggtgcacgtgtgatatggtatttaaaagcaaagacaagcaacattgtcaaaaagctgtccttgccccccatcccccacccaaatcttttttccaaactcccccagggatcttccttaccccactggcagagcaaacatccaggggctgtccatgtggcttgcgggctcccagagaaaggaattgggccaactttgtcctgtgggatggaggccccttcacggcctccctcgaggcaaagttaatttgtagggtcaccattatgttgagtcatgagcagacagaaggagagaaaaggccatcttccttaccttcccctccaacttatcccgtaccctcccagggaaaatggtaccagactgagccatcaaaatcactgacaaagtttaggtgggaattttttttgcatgttggagagagaagggcttaaggtagcagggaagaagggggctttgtggggtcctaaattttaaggaataagtagaggaagacaagaaacagagtggtaggctggtcatttctcctggccacaagtccccccagatgcagcttttacccattctttgtccttccccataaggagagaccctgacatttcttggtagctgcaaatagtgccactaagtgaaggtggccatcatgccagttacttcctcaggaaaatattttcttgccttcttctttcagtatggttttaaatttgggaacagtggataacccaagtgtcccacaggccaaggtacattccaatggcagcatgatccctgcacccaaagccagcccctaaagcctaccccttgtgcacccgcagcctggtaagtgagcttggctgcttgtgaggagctacaagtgaaagagaagttattttaaataaatcccaaagtttgaggcagactgtccaggactgttcccaggaagaagcaggagttacccacaggaaaagtctctgacctggtcccctcaggcccagctacctgcgcccaccagcagtgaaggttgatgtactggcccagcatctccacctcccccatgcaaccaggtccctggtaccgtgtctcccgttgcatgtctggcttctgcctgtgctcctcctgccacgagcatcctccctgtccctcctcattccaccgtgtctctcctgcacacatagcctctgtcccagggcgatttatccacttgagtacaggagctgctcagacctctcagcccagccctctgtgactgccccagccccatcctaccccacccaaagctgccttcctggctgtaggagctccctcgtctagccaaggccctatgggtccccatccgaggatccacaagcaatgacttcccaaatgacctccactgcaagaagaatccttaccactgtttccagagccgtgaacgatgctgtgatgggcccaggtctcagcaccaccctctgtgacctaaaaagaaaagctcaatttccatctgtcttctttcccaggaccaaggggacacagtaatgtgaagtcaaatacttaaccgagcaaagggccagtattgttatcagtcaaggacaaacctcccacctcacagacagccaagcagtgagggaaagacagacagacataggtaggaaggtgctctgcaggcacaaggcccagagaagcccctctccgggaacttcccctgctccttccaggaacagtgagcccagtgagcagccccagccagctcttcaaggccttcaaggggtctttccatgactgagtcacctccaggagctcacctgacccccagagaagacctaccccaggcagctccgtgccctggcttctccccatgccccaaatccccccccgccatccctcctggtcctcgtctacatcaagggcctcttcccctcttcctgccagctctcaggacaggtgactgggaggccttgaaccctcagcctcttcctttaaaaaaaacaaaacaaaacaaaactgtgggccatttatttgggattttggagttgtttggtttttgtttgtatatcttaatagttcgaaagtaagaagggagccctgctatggatgttaagtccaaattactcggttagtgggagcaaaacctatgacttccaaggggatgaggagaggttcagaggacaggaggagcctcccccattgaaaaaaaaaaatgggtcaggacattccctggatgaggacaatgctaggggtggcatctcacatggctgctgctattcctggtgcttccccacacttttgacagatggagtccttctcctaccgcctcctgccacctcaccctacaggcattctctatgtaggaaacaagagccttattttatagagtggggagctgagacacagcctcaggtaacactgacacagctcccgaatgaggctgggacactctgcaaacctctcctcatggtgctaagggtggcatgctcttgacaggaaacctaaatgaccactcctctcatttggaaagtaatccactgcagtaaaagtttcagacatgcaagagagagtttttttttttttactacaaatttttgctcccccataaaattattttattagagggagtatccaagttttaaaagtatatagaattttttggttgtaagagaaatacatactcattaggatcccgattaaattccttgagtagactggtgcctaccagaaagcaaagcaaagttaaacaaaacgaaacaaaatccttcatatacaaaaagaactttctgtttgtattggcagaggtagtgaggtgattcaggtaggctgaaaatcctgggttgcgggagcctcactttattccattcccacccgctttgatgtctatgcttggctctctgggctgcccctggtactgccgaatcctacacatctcttatcagctttcctcaaactttaaggaggctctgtgagggatgggtcatgggaagacccaagctttccctccgccaggattgcaaaagcaagtagacttggtctatgcagctcttcttccagcaatttctttatttggaattagaacttcctttgttagtatctttgatcttttgactcaagcacattttggaagggctcccttacaaaagtagaatttaaaacagaggatacagttaaagagcaacccaaaggacgcttaagaaaccgagaccacttcaccaaacaggactaaggaacactttcgtgcacagaagtcagccgcaatccaggcacaggacgaagatgggatacacgtgctcatctgtctgtcctcctttcctctccctccccgacgttctagttagcttgttgacttgttaaaccttctgttcttaaaatgaaaagctagcttacctcaaagaatcttgtttccattcggaaaccaacgattttgtgttttagaatggacagccctcccctcaccactccctaccttggcctggtgtccttgagacatacggtctttgcttagtcgtgtgttggctgctttgagcaggaacaaggcctccaggccctgaggtgggaaggaaggattggatgccactgccctcctccccactttagcatgtaggggccagcccatctcttccagcagggtcctgctgagttaccatagcaaccagcaactccagggtaccacaacagacaatggctcagcgagccgacgtgtggggatgatgcaggggttttggcccagccagaggacccagagttgagcttcaaatgctagagaaggggagaaacaggatggaagggtggtttaaggaaccggcaggggtctttgagtcacatagagaagccgttgaaggaggtagggcaggttatctctgttccagtcacccccttccagccccatcccacttctgtttcaaactaaagctcccacctcgaacattgaccctttgttagaacaaagcaaagcatatctttagacaacagtgttaaaatgagcctcaaatgtatgtggatgagatctctaagaagagggtcttctggttttgatttttaaagaagagtatcctagtaaaatattaaaaaaaaattaaaaagtttttaaaaaggaaacctgtgctatttaaattggagcccagttgtaacttggtaaaggcaagcttctgtacctttgttataattaattgtatacctgtgtatgtaaatataaggcattcctattttgcagttcagaacaaaaaaaacttatttgtaatatagaataaagtttattaaaaaataataaaaatgc

SEQ ID NO: 166757 - DNA, 2004 bp, Homo sapiens
  Payload ID: 12830
  Gene Symbol: PLXNA4
  Gene Name: plexin A4
  Uniprot ID: Q9HCM2
  ENST ID: ENST00000378539
  CDS Start-End: 378-1946
atgagatgcagaccacatggagaccttaatgcatggagatcttgcccactagtagcgtggcccagcgttttgggacacagcccaatcagaccagtatttcccctctggagctggattgaggagggaacatggggactgaaaccttgaatgcttctgctttaattaccccgaaaagcaagtgccactgttagaaatggaaatcaggccagctgctggggcggcaagcagcaggaatgcaaatgtccatgacccctcagatccacacaaagccttctgaccttggaatttaagtaggggagactgcattgctgagtcctggccctctgaggggacgactgtgcctgagtgctgctgtgccactgggacccgcctctgccatgaaagccatgccctggaactggacctgccttctctcccacctcctcatggtgggcatgggctcctccactttgctcacccggcagccagccccgctgtcccagaagcagcggtcatttgtcacattccgaggagagcccgccgagggtttcaatcacctggtggtggatgagaggacaggacacatttacttgggggccgtcaatcggatttacaagctctccagcgacctgaaggtcttggtgacgcatgagacagggccggacgaggacaaccccaagtgttacccaccccgcatcgtccagacctgcaatgagcccctgaccaccaccaacaatgtcaacaagatgctcctcatagactacaaggagaacaggctgattgcctgtgggagcctgtaccaaggcatctgcaagctgctgaggctggaggacctcttcaagctgggggagccttatcataagaaggagcactatctgtcaggtgtcaacgagagcggctcagtctttggagtgatcgtctcctacagcaacctggatgacaagctgttcattgccacggcagtggatgggaagcccgagtattttcccaccatctccagccggaaactgaccaagaactctgaggcggatggcatgttcgcgtacgtcttccatgatgagttcgtggcctcgatgattaagatcccttcggacaccttcaccatcatccctgactttgatatctactatgtctatggttttagcagtggcaactttgtctactttttgaccctccaacctgagatggtgtctccaccaggctccaccaccaaggagcaggtgtatacatccaagctcgtgaggctttgcaaggaggacacagccttcaactcctatgtagaggtgcccattggctgtgagcgcagtggggtggagtaccgcctgctgcaggctgcctacctgtccaaagcgggggccgtgcttggcaggacccttggagtccatccagatgatgacctgctcttcaccgtcttctccaagggccagaagcggaaaatgaaatccctggatgagtcggccctgtgcatcttcatcttgaagcagataaatgaccgcattaaggagcggctgcagtcttgttaccggggcgagggcacgctggacctggcctggctcaaggtgaaggacatcccctgcagcagtgcgctcttaaccattgacgataacttctgtggcctggacatgaatgctcccctgggagtgtccgacatggtgcgtggaattcccgtcttcacggaggacagggaccgcatgacgtctgtcatcgcatatgtctacaagaaccactctctggcctttgtgggcaccaaaagtggcaagctgaagaagtccttcggcacaggtccacaagggggaatcacccaggagtggattggagtggagggagacccacctggggcgaacattgcttctcaggaacagatgctgtgtgtgtatcttcagtgctcaagtcacaaagcaatatcagatcagagagtccagcctctgctttgttgcttcctaaatgtacctgggaattcttcctaaaattactctggaaatttgaatccactttaactaaaaataaatattcatagcacagaaa

SEQ ID NO: 166758 - DNA, 3314 bp, Homo sapiens
  Payload ID: 12830
  Gene Symbol: PLXNA4
  Gene Name: plexin A4
  Uniprot ID: Q9HCM2
  ENST ID: ENST00000423507
  CDS Start-End: 136-1614
agtgtcaatgcggcgctcccgctgaaggagggaaacgcggcgcgtccagtaggggagactgcattgctgagtcctggccctctgaggggacgactgtgcctgagtgctgctgtgccactgggacccgcctctgccatgaaagccatgccctggaactggacctgccttctctcccacctcctcatggtgggcatgggctcctccactttgctcacccggcagccagccccgctgtcccagaagcagcggtcatttgtcacattccgaggagagcccgccgagggtttcaatcacctggtggtggatgagaggacaggacacatttacttgggggccgtcaatcggatttacaagctctccagcgacctgaaggtcttggtgacgcatgagacagggccggacgaggacaaccccaagtgttacccaccccgcatcgtccagacctgcaatgagcccctgaccaccaccaacaatgtcaacaagatgctcctcatagactacaaggagaacaggctgattgcctgtgggagcctgtaccaaggcatctgcaagctgctgaggctggaggacctcttcaagctgggggagccttatcataagaaggagcactatctgtcaggtgtcaacgagagcggctcagtctttggagtgatcgtctcctacagcaacctggatgacaagctgttcattgccacggcagtggatgggaagcccgagtattttcccaccatctccagccggaaactgaccaagaactctgaggcggatggcatgttcgcgtacgtcttccatgatgagttcgtggcctcgatgattaagatcccttcggacaccttcaccatcatccctgactttgatatctactatgtctatggttttagcagtggcaactttgtctactttttgaccctccaacctgagatggtgtctccaccaggctccaccaccaaggagcaggtgtatacatccaagctcgtgaggctttgcaaggaggacacagccttcaactcctatgtagaggtgcccattggctgtgagcgcagtggggtggagtaccgcctgctgcaggctgcctacctgtccaaagcgggggccgtgcttggcaggacccttggagtccatccagatgatgacctgctcttcaccgtcttctccaagggccagaagcggaaaatgaaatccctggatgagtcggccctgtgcatcttcatcttgaagcagataaatgaccgcattaaggagcggctgcagtcttgttaccggggcgagggcacgctggacctggcctggctcaaggtgaaggacatcccctgcagcagtgcgctcttaaccattgacgataacttctgtggcctggacatgaatgctcccctgggagtgtccgacatggtgcgtggaattcccgtcttcacggaggacagggaccgcatgacgtctgtcatcgcatatgtctacaagaaccactctctggcctttgtgggcaccaaaagtggcaagctgaagaagatgcctggtaccagcctctgccctacccttgagctacagacgggaccccgatcccacagagcaacagtgactctggaactcctgttctccagctgttcatcaaactgagaaaaacttcagagctgtgtaggcttatttagtgtgttgtcagccttggatattggaaaatggaaacagatgagacacatctacctccctgtgaccccagccatacatcatagctcatgtcctgccaccccaagtccttagggaaaaaagactttggagaatgtgtctctgcttagcttggctaggtagttggtctcttttctctgccccaagcgtcccatgggtaattttggacaatggagtgtaggcatgtttgactcttgtggtgttatcacttgtatatgtcagtgaaactaactgattctcccatcggaatatagttatctcttgggcctgatatatggtaggataaccttatgctcatctgtccacttctgcagccaagtcgcctggccagtgtgtgtgtgtgtgtgtgtgtgtgtgtgtgtgtgtgtgtgtgtgtatgcttatctgtgtttaaaggtgtgtgtgcatacacagggcagagaggatggagcccaccgtactgcagcatcatgtaattaactcagtgctcagaaccatcccagcctctgcgggaaagagaaaaggaagccaacagtgcctgatgagctgatcatatgtgcaaaagctctgttggcatctggtccaggagagcacccaaaaaaagttaattggtgttgtccagtctcctttccttaagactatggttacaacaaagcgtgagcagtgtctcctgcatggccactatccagcacaattccataattcccccatagagccggtggggaggaggaggtgagtggcgaaggaagtggaaacacttggtgtcatgtgctcctatcatttctactagcttactgggaaataaagtgtagtcaagagtgtatgaaggcaagatgtaaaattagcgactggtgctaatctggttacttgaaaacaagtgaaagtgctgtagatttgttctgttgctaagaaccaccacactaaacctcgtatagttcctggaggatacacaacagtgtaattctctttagggtgtgccacaggttcctggcctgtgggagggaatgaatcaggagggctcttgagaaccttcatctgtgtgcttgcactgaaagtgagtcccaaagctggagatttagtgagagcaggcaacccctctgtgtctcactgtccatattctggaggcagaggtttgtaacaggccatgtgcacctgcatagggatgggtaaagcaaggactttgaaagagttgaaaagcattataaacagttgttcagaaatacgtcccaggagttccatgtgaaactggctctgtgtgcattgaagcatggctgttgggaattctaactggtccaacactcctgcaaaacaatgtgtaaatatttaggaagaaacttgaaaatagtcaaatcctttgaactggtgacaattttttaaagaatcaattctaatttgtttcaagggtaataatcaccaagatacacatttcagcatttatttagtctatcaaaaattggaattgatatatacactcatttataggagaatggttaggtagatttggtatatttatgtagtcattgaaaacttagtttataaaggccaatcttgtaactgattcttgtgtgataacattcagtgaaaaagcatgagacaattagaaagcatgatacaatgaataaaataaaaactggaaagagaaccatcaaaatgct

SEQ ID NO: 166759 - DNA, 7143 bp, Homo sapiens
  Payload ID: 12831
  Gene Symbol: PLXNB1
  Gene Name: plexin B1
  Uniprot ID: O43157
  ENST ID: ENST00000296440
  CDS Start-End: 104-6511
agggccaggtgcgcaggggagaaacaaggcgccttggagttcaggtgactcccacacgggtcatgctgttgtctcctgatccagccggccctgccaggtgaccatgcctgctctgggcccagctcttctccaggctctctgggccgggtgggtcctcaccctccagccccttccaccaactgcattcactcccaatggcacgtatctgcagcacctggcaagggaccccacctcaggcaccctctacctgggggctaccaacttcctgttccagctgagccctgggctgcagctggaggccacagtgtccaccggccctgtgctagacagcagggactgcctgccacctgtgatgcctgatgagtgcccccaggcccagcctaccaacaacccgaatcagctgctcctggtgagcccaggggccctggtggtatgcgggagcgtgcaccagggggtctgtgaacagcggcgcctggggcagctcgagcagctgctgctgcggccagagcggcctggggacacacaatatgtggctgccaatgatcctgcggtcagcacggtggggctggtagcccagggcttggcaggggagcccctcctgtttgtggggcgaggatacaccagcaggggtgtggggggtggcattccacccatcacaacccgggccctgtggccgcccgacccccaagctgccttctcctatgaggagacagccaagctggcagtgggccgcctctccgagtacagccaccacttcgtgagtgcctttgcacgtggggccagcgcctacttcctgttcctgcggcgggacctgcaggctcagtctagagcttttcgtgcctatgtatctcgagtgtgtctccgggaccagcactactactcctatgtggagttgcctctggcctgcgaaggtggccgctacgggctgatccaggctgcagctgtggccacgtccagggaggtggcgcatggggaggtgctctttgcagctttctcctcggctgcaccccccactgtgggccggcccccatcggcggctgctggggcatctggagcctctgccctctgtgccttccccctggatgaggtggaccggcttgctaatcgcacgcgagatgcctgctacacccgggagggtcgtgctgaggatgggaccgaggtggcctacatcgagtatgatgtcaattctgactgtgcacagctgccagtggacaccctggatgcttatccctgtggctcagaccacacgcccagccccatggccagccgggtcccgctggaagccacaccaattctggagtggccagggattcagctaacagctgtggcagtcaccatggaagatggacacaccatcgctttcctgggtgatagtcaagggcagctgcacagggtctacttgggcccagggagcgatggccacccatactccacacagagcatccagcaggggtctgcagtgagcagagacctcacctttgatgggacctttgagcacctgtatgtcatgacccagagcacacttctgaaggttcctgtggcttcctgtgctcagcacctggactgtgcatcttgccttgctcacagggacccatactgtgggtggtgcgtgctccttggcaggtgcagtcgccgttctgagtgctcgaggggccagggcccagagcagtggctatggagcttccagcctgagctgggctgtctgcaagtggcagccatgagtcctgccaacatcagccgagaggagacgagggaggttttcctatcagtgccagacctgccacccctgtggccaggggagtcatattcctgccactttggggaacatcagagtcctgccctgctgactggttctggtgtgatgtgcccctccccagaccctagtgaggccccagtgctgccgagaggagccgactacgtatccgtgagcgtggagctcagatttggcgctgttgtgatcgccaaaacttccctctctttctatgactgtgtggcggtcactgaactccgcccatctgcgcagtgccaggcctgtgtgagcagccgctgggggtgtaactggtgtgtctggcagcacctgtgcacccacaaggcctcgtgtgatgctgggcccatggttgcaagccatcagagcccgcttgtctccccagaccctcctgcaagaggtggacccagcccctccccacccacagcccccaaagccctggccacccctgctcctgacacccttcccgtggagcctggggctccctccacagccacagcttcggacatctcacctggggctagtccttccctgctcagcccctgggggccatgggcaggttctggctccatatcttcccctggctccacagggtcgcctctccatgaggagccctcccctcccagcccccaaaatggacctggaaccgctgtccctgcccccactgacttcagaccctcagccacacctgaggacctcttggcctccccgctgtcaccctcagaggtagcagcagtgccccctgcagaccctggccccgaggctcttcatcccacagtgcccctggacctgccccctgccactgttcctgccaccactttcccaggggccatgggctccgtgaagcccgccctggactggctcacgagagaaggcggcgagctgcccgaggcggacgagtggacggggggtgacgcacccgccttctccacttccaccctcctctcaggtgatggagactcagcagagcttgagggccctcccgcccccctcatcctcccgtccagcctcgactaccagtatgacacccccgggctctgggagctggaagaggcgaccttgggggcaagctcctgcccctgtgtggagagcgttcagggctccacgttgatgccggtccatgtggagcgggaaatccggctgctaggcaggaacctgcaccttttccaggatggcccaggagacaatgagtgtgtgatggagctggagggcctcgaggtggtggttgaggcccgggtcgagtgtgagccacctccagatacccagtgccatgtcacctgccagcagcaccagctcagctatgaggctctgcagccggagctccgtgtggggctgtttctgcgtcgggccggccgtctgcgtgtggacagtgctgaggggctgcatgtggtactgtatgactgttccgtgggacatggagactgcagccgctgccaaactgccatgccccagtatggctgtgtgtggtgtgagggggagcgtccacgttgtgtgacccgggaggcctgtggtgaggctgaggctgtggccacccagtgcccagcgcccctcatccactcggtggagccactgactgggcctgtagacggaggcacccgtgtcaccatcaggggctccaacctgggccagcatgtgcaggatgtgctgggcatggtcacggtggctggagtgccctgtgctgtggatgcccaggagtacgaggtctccagcagcctcgtgtgcatcaccggggccagtggggaggaggtggccggcgccacagcggtggaggtgccgggaagaggacgtggtgtctcagaacacgactttgcctaccaggatccgaaggtccattccatcttcccggcccgcggccccagagctgggggcacccgtctcaccctgaatggctccaagctcctgactgggcggctggaggacatccgagtggtggttggagaccagccttgtcacttgctgccggagcagcagtcagaacaactgcggtgtgagaccagcccacgccccacgcctgccacgctccctgtggctgtgtggtttggggccacggagcggaggcttcaacgcggacagttcaagtataccttggaccccaacatcacctctgctggccccaccaagagcttcctcagtggaggacgtgagatatgcgtccgtggccagaatctggacgtggtacagacgccaagaatccgggtgaccgtggtctcgagaatgctgcagcccagccaggggcttggacggaggcgtcgcgtggtcccggagacggcatgttcccttggaccctcctgcagtagccagcaatttgaggagccgtgccatgtcaactcctcccagctcatcacgtgccgcacacctgccctcccaggcctgcctgaggacccctgggtccgggtggaatttatccttgacaacctggtctttgactttgcaacactgaaccccacacctttctcctatgaggccgaccccaccctgcagccactcaaccctgaggaccccaccatgccattccggcacaagcctgggagtgtgttctccgtggagggggagaacctggaccttgcaatgtccaaggaggaggtggtggctatgataggggatggcccctgtgtggtgaagacgctgacgcggcaccacctgtactgcgagccccccgtggagcagcccctgccacggcaccatgccctccgagaggcacctgactctttgcctgagttcacggtgcagatggggaacttgcgcttctccctgggtcacgtgcagtatgacggcgagagccctggggcttttcctgtggcagcccaggtgggcttgggggtgggcacctctcttctggctctgggtgtcatcatcattgtcctcatgtacaggaggaagagcaagcaggccctgagggactataagaaggttcagatccagctggagaatctggagagcagtgtgcgggaccgctgcaagaaggaattcacagacctcatgactgagatgaccgatctcaccagtgacctcctgggcagcggcatccccttcctcgactacaaggtgtatgcggagaggatcttcttccctgggcaccgcgagtcgcccttgcaccgggacctgggtgtgcctgagagcagacggcccactgtggagcaagggctggggcagctctctaacctgctcaacagcaagctcttcctcaccaagttcatccacacgctggagagccagcgcaccttttcagctcgggaccgtgcctacgtggcatctctgctcaccgtggcactgcatgggaagcttgagtatttcactgacatcctccgcactctgctcagtgacctggttgcccagtatgtggccaagaaccccaagctgatgctgcgcaggacagagactgtggtggagaagctgctcaccaactggatgtccatctgtctgtataccttcgtgagggactccgtaggggagcctctgtacatgctctttcgagggattaagcaccaagtggataaggggccagtggacagtgtgacaggcaaggccaaatacaccttgaacgacaaccgcctgctcagagaggatgtggagtaccgtcccctgaccttgaatgcactattggctgtggggcctggggcaggagaggcccagggcgtgcccgtgaaggtcctagactgtgacaccatctcccaggcaaaggagaagatgctggaccagctttataaaggagtgcctctcacccagcggccagaccctcgcacccttgatgttgagtggcggtctggggtggccgggcacctcattctttctgacgaggatgtcacttctgaggtccagggtctgtggaggcgcctgaacacactgcagcattacaaggtcccagatggagcaactgtggccctcgtcccctgcctcaccaagcatgtgctccgggaaaaccaggattatgtccctggagagcggaccccaatgctggaggatgtagatgaggggggcatccggccctggcacctggtgaagccaagtgatgagccggagccgcccaggcctcggaggggcagccttcggggcggggagcgtgagcgcgccaaggccatccctgagatctacctgacccgcctgctgtccatgaagggcaccctgcagaagttcgtggatgacctgttccaggtgattctcagcaccagccgccccgtgccgctcgctgtgaagtacttctttgacctgctggatgagcaggcccagcagcatggcatctccgaccaggacaccatccacatctggaagaccaacagcttgcctctgaggttctggatcaatataataaaaaacccgcagtttgtgttcgacgtgcaaacatctgataacatggatgcggtgctccttgtcattgcacagaccttcatggacgcctgcaccctggccgaccacaagctgggccgggactccccgatcaacaaacttctgtatgcacgggacattccccggtacaagcggatggtggaaaggtactatgcagacatcagacagactgtcccagccagcgaccaagagatgaactctgtcctggctgaactgtcctggaactactccggagacctcggggcgcgagtggccctgcatgaactctacaagtacatcaacaagtactatgaccagatcatcactgccctggaggaggatggcacggcccagaagatgcagctgggctatcggctccagcagattgcagctgctgtggaaaacaaggtcacagatctataggaacccaggagccacggcctgctgttgcttcagcctggcctgggcagccctggaagctcggaggagaggccaccttcttaggtgcctgtagtgactgacaagcagagttagtggaaggtgactcccagtctcctggtggctctggcctcggccctgctggatccacctcctagacccggggcctcaaggctcatggggtagtacccagcctgctccccgagtccagcgaccctgtgacaccggtctgcagggagttggggactaagggcttccagagagtggctggaagagactccaggcccctggggagactgtactgttcctgaacactggccttggccacactgggattcggagaggaaggaggagagccccatgcttcctgtctgcctcctccaccatccctgacctcagttgagctgcctctggccttgttgctgctgccacatcctaggtctaagagttgaacgcctctcctaggccactacaaactgacccctcagcagggctggctgccacagggctgccctgcctcataggtagccatggtgagggctatctgctgcaggggggtcttggggagagtggtgactccattgacccagcttttcattaaaggataacacactgca

SEQ ID NO: 166760 - DNA, 7308 bp, Homo sapiens
  Payload ID: 12831
  Gene Symbol: PLXNB1
  Gene Name: plexin B1
  Uniprot ID: O43157
  ENST ID: ENST00000358536
  CDS Start-End: 271-6678
gcccggccgacgcggctttgtctcctttgttcccggcggtggcagcgccgcgcgggaggggcgggcagcgggcgcagttttccgcccctcggtctccgggtaacagctgcggctccgccagacccggggagaggccgctgcgcgcggagcccgagcccggagcggccgacgcccgcctcggcgcgcacatcccgcggggcccggccgggtggtgactcccacacgggtcatgctgttgtctcctgatccagccggccctgccaggtgaccatgcctgctctgggcccagctcttctccaggctctctgggccgggtgggtcctcaccctccagccccttccaccaactgcattcactcccaatggcacgtatctgcagcacctggcaagggaccccacctcaggcaccctctacctgggggctaccaacttcctgttccagctgagccctgggctgcagctggaggccacagtgtccaccggccctgtgctagacagcagggactgcctgccacctgtgatgcctgatgagtgcccccaggcccagcctaccaacaacccgaatcagctgctcctggtgagcccaggggccctggtggtatgcgggagcgtgcaccagggggtctgtgaacagcggcgcctggggcagctcgagcagctgctgctgcggccagagcggcctggggacacacaatatgtggctgccaatgatcctgcggtcagcacggtggggctggtagcccagggcttggcaggggagcccctcctgtttgtggggcgaggatacaccagcaggggtgtggggggtggcattccacccatcacaacccgggccctgtggccgcccgacccccaagctgccttctcctatgaggagacagccaagctggcagtgggccgcctctccgagtacagccaccacttcgtgagtgcctttgcacgtggggccagcgcctacttcctgttcctgcggcgggacctgcaggctcagtctagagcttttcgtgcctatgtatctcgagtgtgtctccgggaccagcactactactcctatgtggagttgcctctggcctgcgaaggtggccgctacgggctgatccaggctgcagctgtggccacgtccagggaggtggcgcatggggaggtgctctttgcagctttctcctcggctgcaccccccactgtgggccggcccccatcggcggctgctggggcatctggagcctctgccctctgtgccttccccctggatgaggtggaccggcttgctaatcgcacgcgagatgcctgctacacccgggagggtcgtgctgaggatgggaccgaggtggcctacatcgagtatgatgtcaattctgactgtgcacagctgccagtggacaccctggatgcttatccctgtggctcagaccacacgcccagccccatggccagccgggtcccgctggaagccacaccaattctggagtggccagggattcagctaacagctgtggcagtcaccatggaagatggacacaccatcgctttcctgggtgatagtcaagggcagctgcacagggtctacttgggcccagggagcgatggccacccatactccacacagagcatccagcaggggtctgcagtgagcagagacctcacctttgatgggacctttgagcacctgtatgtcatgacccagagcacacttctgaaggttcctgtggcttcctgtgctcagcacctggactgtgcatcttgccttgctcacagggacccatactgtgggtggtgcgtgctccttggcaggtgcagtcgccgttctgagtgctcgaggggccagggcccagagcagtggctatggagcttccagcctgagctgggctgtctgcaagtggcagccatgagtcctgccaacatcagccgagaggagacgagggaggttttcctatcagtgccagacctgccacccctgtggccaggggagtcatattcctgccactttggggaacatcagagtcctgccctgctgactggttctggtgtgatgtgcccctccccagaccctagtgaggccccagtgctgccgagaggagccgactacgtatccgtgagcgtggagctcagatttggcgctgttgtgatcgccaaaacttccctctctttctatgactgtgtggcggtcactgaactccgcccatctgcgcagtgccaggcctgtgtgagcagccgctgggggtgtaactggtgtgtctggcagcacctgtgcacccacaaggcctcgtgtgatgctgggcccatggttgcaagccatcagagcccgcttgtctccccagaccctcctgcaagaggtggacccagcccctccccacccacagcccccaaagccctggccacccctgctcctgacacccttcccgtggagcctggggctccctccacagccacagcttcggacatctcacctggggctagtccttccctgctcagcccctgggggccatgggcaggttctggctccatatcttcccctggctccacagggtcgcctctccatgaggagccctcccctcccagcccccaaaatggacctggaaccgctgtccctgcccccactgacttcagaccctcagccacacctgaggacctcttggcctccccgctgtcaccctcagaggtagcagcagtgccccctgcagaccctggccccgaggctcttcatcccacagtgcccctggacctgccccctgccactgttcctgccaccactttcccaggggccatgggctccgtgaagcccgccctggactggctcacgagagaaggcggcgagctgcccgaggcggacgagtggacggggggtgacgcacccgccttctccacttccaccctcctctcaggtgatggagactcagcagagcttgagggccctcccgcccccctcatcctcccgtccagcctcgactaccagtatgacacccccgggctctgggagctggaagaggcgaccttgggggcaagctcctgcccctgtgtggagagcgttcagggctccacgttgatgccggtccatgtggagcgggaaatccggctgctaggcaggaacctgcaccttttccaggatggcccaggagacaatgagtgtgtgatggagctggagggcctcgaggtggtggttgaggcccgggtcgagtgtgagccacctccagatacccagtgccatgtcacctgccagcagcaccagctcagctatgaggctctgcagccggagctccgtgtggggctgtttctgcgtcgggccggccgtctgcgtgtggacagtgctgaggggctgcatgtggtactgtatgactgttccgtgggacatggagactgcagccgctgccaaactgccatgccccagtatggctgtgtgtggtgtgagggggagcgtccacgttgtgtgacccgggaggcctgtggtgaggctgaggctgtggccacccagtgcccagcgcccctcatccactcggtggagccactgactgggcctgtagacggaggcacccgtgtcaccatcaggggctccaacctgggccagcatgtgcaggatgtgctgggcatggtcacggtggctggagtgccctgtgctgtggatgcccaggagtacgaggtctccagcagcctcgtgtgcatcaccggggccagtggggaggaggtggccggcgccacagcggtggaggtgccgggaagaggacgtggtgtctcagaacacgactttgcctaccaggatccgaaggtccattccatcttcccggcccgcggccccagagctgggggcacccgtctcaccctgaatggctccaagctcctgactgggcggctggaggacatccgagtggtggttggagaccagccttgtcacttgctgccggagcagcagtcagaacaactgcggtgtgagaccagcccacgccccacgcctgccacgctccctgtggctgtgtggtttggggccacggagcggaggcttcaacgcggacagttcaagtataccttggaccccaacatcacctctgctggccccaccaagagcttcctcagtggaggacgtgagatatgcgtccgtggccagaatctggacgtggtacagacgccaagaatccgggtgaccgtggtctcgagaatgctgcagcccagccaggggcttggacggaggcgtcgcgtggtcccggagacggcatgttcccttggaccctcctgcagtagccagcaatttgaggagccgtgccatgtcaactcctcccagctcatcacgtgccgcacacctgccctcccaggcctgcctgaggacccctgggtccgggtggaatttatccttgacaacctggtctttgactttgcaacactgaaccccacacctttctcctatgaggccgaccccaccctgcagccactcaaccctgaggaccccaccatgccattccggcacaagcctgggagtgtgttctccgtggagggggagaacctggaccttgcaatgtccaaggaggaggtggtggctatgataggggatggcccctgtgtggtgaagacgctgacgcggcaccacctgtactgcgagccccccgtggagcagcccctgccacggcaccatgccctccgagaggcacctgactctttgcctgagttcacggtgcagatggggaacttgcgcttctccctgggtcacgtgcagtatgacggcgagagccctggggcttttcctgtggcagcccaggtgggcttgggggtgggcacctctcttctggctctgggtgtcatcatcattgtcctcatgtacaggaggaagagcaagcaggccctgagggactataagaaggttcagatccagctggagaatctggagagcagtgtgcgggaccgctgcaagaaggaattcacagacctcatgactgagatgaccgatctcaccagtgacctcctgggcagcggcatccccttcctcgactacaaggtgtatgcggagaggatcttcttccctgggcaccgcgagtcgcccttgcaccgggacctgggtgtgcctgagagcagacggcccactgtggagcaagggctggggcagctctctaacctgctcaacagcaagctcttcctcaccaagttcatccacacgctggagagccagcgcaccttttcagctcgggaccgtgcctacgtggcatctctgctcaccgtggcactgcatgggaagcttgagtatttcactgacatcctccgcactctgctcagtgacctggttgcccagtatgtggccaagaaccccaagctgatgctgcgcaggacagagactgtggtggagaagctgctcaccaactggatgtccatctgtctgtataccttcgtgagggactccgtaggggagcctctgtacatgctctttcgagggattaagcaccaagtggataaggggccagtggacagtgtgacaggcaaggccaaatacaccttgaacgacaaccgcctgctcagagaggatgtggagtaccgtcccctgaccttgaatgcactattggctgtggggcctggggcaggagaggcccagggcgtgcccgtgaaggtcctagactgtgacaccatctcccaggcaaaggagaagatgctggaccagctttataaaggagtgcctctcacccagcggccagaccctcgcacccttgatgttgagtggcggtctggggtggccgggcacctcattctttctgacgaggatgtcacttctgaggtccagggtctgtggaggcgcctgaacacactgcagcattacaaggtcccagatggagcaactgtggccctcgtcccctgcctcaccaagcatgtgctccgggaaaaccaggattatgtccctggagagcggaccccaatgctggaggatgtagatgaggggggcatccggccctggcacctggtgaagccaagtgatgagccggagccgcccaggcctcggaggggcagccttcggggcggggagcgtgagcgcgccaaggccatccctgagatctacctgacccgcctgctgtccatgaagggcaccctgcagaagttcgtggatgacctgttccaggtgattctcagcaccagccgccccgtgccgctcgctgtgaagtacttctttgacctgctggatgagcaggcccagcagcatggcatctccgaccaggacaccatccacatctggaagaccaacagcttgcctctgaggttctggatcaatataataaaaaacccgcagtttgtgttcgacgtgcaaacatctgataacatggatgcggtgctccttgtcattgcacagaccttcatggacgcctgcaccctggccgaccacaagctgggccgggactccccgatcaacaaacttctgtatgcacgggacattccccggtacaagcggatggtggaaaggtactatgcagacatcagacagactgtcccagccagcgaccaagagatgaactctgtcctggctgaactgtcctggaactactccggagacctcggggcgcgagtggccctgcatgaactctacaagtacatcaacaagtactatgaccagatcatcactgccctggaggaggatggcacggcccagaagatgcagctgggctatcggctccagcagattgcagctgctgtggaaaacaaggtcacagatctataggaacccaggagccacggcctgctgttgcttcagcctggcctgggcagccctggaagctcggaggagaggccaccttcttaggtgcctgtagtgactgacaagcagagttagtggaaggtgactcccagtctcctggtggctctggcctcggccctgctggatccacctcctagacccggggcctcaaggctcatggggtagtacccagcctgctccccgagtccagcgaccctgtgacaccggtctgcagggagttggggactaagggcttccagagagtggctggaagagactccaggcccctggggagactgtactgttcctgaacactggccttggccacactgggattcggagaggaaggaggagagccccatgcttcctgtctgcctcctccaccatccctgacctcagttgagctgcctctggccttgttgctgctgccacatcctaggtctaagagttgaacgcctctcctaggccactacaaactgacccctcagcagggctggctgccacagggctgccctgcctcataggtagccatggtgagggctatctgctgcaggggggtcttggggagagtggtgactccattgacccagcttttcattaaaggataacacactg

SEQ ID NO: 166761 - DNA, 3863 bp, Homo sapiens
  Payload ID: 12831
  Gene Symbol: PLXNB1
  Gene Name: plexin B1
  Uniprot ID: O43157
  ENST ID: ENST00000449094
  CDS Start-End: 1-2190
atgcctgctctgggcccagctcttctccaggctctctgggccgggtgggtcctcaccctccagccccttccaccaactgcattcactcccaatggcacgtatctgcagcacctggcaagggaccccacctcaggcaccctctacctgggggctaccaacttcctgttccagctgagccctgggctgcagctggaggccacagtgtccaccggccctgtgctagacagcagggactgcctgccacctgtgatgcctgatgagtgcccccaggcccagcctaccaacaacccgaatcagctgctcctggtgagcccaggggccctggtggtatgcgggagcgtgcaccagggggtctgtgaacagcggcgcctggggcagctcgagcagctgctgctgcggccagagcggcctggggacacacaatatgtggctgccaatgatcctgcggtcagcacggtggggctggtagcccagggcttggcaggggagcccctcctgtttgtggggcgaggatacaccagcaggggtgtggggggtggcattccacccatcacaacccgggccctgtggccgcccgacccccaagctgccttctcctatgaggagacagccaagctggcagtgggccgcctctccgagtacagccaccacttcgtgagtgcctttgcacgtggggccagcgcctacttcctgttcctgcggcgggacctgcaggctcagtctagagcttttcgtgcctatgtatctcgagtgtgtctccgggaccagcactactactcctatgtggagttgcctctggcctgcgaaggtggccgctacgggctgatccaggctgcagctgtggccacgtccagggaggtggcgcatggggaggtgctctttgcagctttctcctcggctgcaccccccactgtgggccggcccccatcggcggctgctggggcatctggagcctctgccctctgtgccttccccctggatgaggtggaccggcttgctaatcgcacgcgagatgcctgctacacccgggagggtcgtgctgaggatgggaccgaggtggcctacatcgagtatgatgtcaattctgactgtgcacagctgccagtggacaccctggatgcttatccctgtggctcagaccacacgcccagccccatggccagccgggtcccgctggaagccacaccaattctggagtggccagggattcagctaacagctgtggcagtcaccatggaagatggacacaccatcgctttcctgggtgatagtcaagggcagctgcacagggtctacttgggcccagggagcgatggccacccatactccacacagagcatccagcaggggtctgcagtgagcagagacctcacctttgatgggacctttgagcacctgtatgtcatgacccagagcacacttctgaaggttcctgtggcttcctgtgctcagcacctggactgtgcatcttgccttgctcacagggacccatactgtgggtggtgcgtgctccttggcaggtgcagtcgccgttctgagtgctcgaggggccagggcccagagcagtggctatggagcttccagcctgagctgggctgtctgcaagtggcagccatgagtcctgccaacatcagccgagaggagacgagggaggttttcctatcagtgccagacctgccacccctgtggccaggggagtcatattcctgccactttggggaacatcagagtcctgccctgctgactggttctggtgtgatgtgcccctccccagaccctagtgaggccccagtgctgccgagaggagccgactacgtatccgtgagcgtggagctcagatttggcgctgttgtgatcgccaaaacttccctctctttctatgactgtgtggcggtcactgaactccgcccatctgcgcagtgccaggcctgtgtgagcagccgctgggggtgtaactggtgtgtctggcagcacctgtgcacccacaaggcctcgtgtgatgctgggcccatggttgcaagccatcaggtgatggagactcagcagagcttgagggccctcccgcccccctcatcctcccgtccagcctcgactaccagtatgacacccccgggctctgggagctggaagaggcgaccttgggggcaagctcctgcccctgtgtggagagcgttcagggctccacgttgatgccggtccatgtggagcgggaaatccggctgctaggcaggaacctgcaccttttccaggatggcccaggagacaatgagtgtgtgatggagctggagggcctcgaggtggtggttgaggcccgggtcgagtgtgagccacctccagatacccagtgccatgtcacctgccagcagcaccagctcagctatgaggctctgcagccggagctccgtgtggggctgtttctgcgtcgggccggccgtctgcgtgtggacagtgctgaggggctgcatgtggtactgtatgactgttccgtgggacatggagactgcagccgctgccaaactgccatgccccagtatggctgtgtgtggtgtgagggggagcgtccacgttgtgtgacccgggaggcctgtggtgaggctgaggctgtggccacccagtgcccagcgcccctcatccactcggtggagccactgactgggcctgtagacggaggcacccgtgtcaccatcaggggctccaacctgggccagcatgtgcaggatgtgctgggcatggtcacggtggctggagtgccctgtgctgtggatgcccaggagtacgaggtctccagcagcctcgtgtgcatcaccggggccagtggggaggaggtggccggcgccacagcggtggaggtgccgggaagaggacgtggtgtctcagaacacgactttgcctaccaggatccgaaggtccattccatcttcccggcccgcggccccagagctgggggcacccgtctcaccctgaatggctccaagctcctgactgggcggctggaggacatccgagtggtggttggagaccagccttgtcacttgctgccggagcagcagtcagaacaactgcggtgtgagaccagcccacgccccacgcctgccacgctccctgtggctgtgtggtttggggccacggagcggaggcttcaacgcggacagttcaagtataccttggaccccaacatcacctctgctggccccaccaagagcttcctcagtggaggacgtgagatatgcgtccgtggccagaatctggacgtggtacagacgccaagaatccgggtgaccgtggtctcgagaatgctgcagcccagccaggggcttggacggaggcgtcgcgtggtcccggagacggcatgttcccttggaccctcctgcagtagccagcaatttgaggagccgtgccatgtcaactcctcccagctcatcacgtgccgcacacctgccctcccaggcctgcctgaggacccctgggtccgggtggaatttatccttgacaacctggtctttgactttgcaacactgaaccccacacctttctcctatgaggccgaccccaccctgcagccactcaaccctgaggaccccaccatgccattccggcacaagcctgggagtgtgttctccgtggagggggagaacctggaccttgcaatgtccaaggaggaggtggtggctatgataggggatggcccctgtgtggtgaagacgctgacgcggcaccacctgtactgcgagccccccgtggagcagcccctgccacggcaccatgccctccgagaggcacctgactctttgcctgagttcacggtgcagatggggaacttgcgcttctccctgggtcacgtgcagtatgacggcgagagccct

SEQ ID NO: 166762 - DNA, 5859 bp, Homo sapiens
  Payload ID: 12831
  Gene Symbol: PLXNB1
  Gene Name: plexin B1
  Uniprot ID: O43157
  ENST ID: ENST00000456774
  CDS Start-End: 1-5859
atgcctgctctgggcccagctcttctccaggctctctgggccgggtgggtcctcaccctccagccccttccaccaactgcattcactcccaatggcacgtatctgcagcacctggcaagggaccccacctcaggcaccctctacctgggggctaccaacttcctgttccagctgagccctgggctgcagctggaggccacagtgtccaccggccctgtgctagacagcagggactgcctgccacctgtgatgcctgatgagtgcccccaggcccagcctaccaacaacccgaatcagctgctcctggtgagcccaggggccctggtggtatgcgggagcgtgcaccagggggtctgtgaacagcggcgcctggggcagctcgagcagctgctgctgcggccagagcggcctggggacacacaatatgtggctgccaatgatcctgcggtcagcacggtggggctggtagcccagggcttggcaggggagcccctcctgtttgtggggcgaggatacaccagcaggggtgtggggggtggcattccacccatcacaacccgggccctgtggccgcccgacccccaagctgccttctcctatgaggagacagccaagctggcagtgggccgcctctccgagtacagccaccacttcgtgagtgcctttgcacgtggggccagcgcctacttcctgttcctgcggcgggacctgcaggctcagtctagagcttttcgtgcctatgtatctcgagtgtgtctccgggaccagcactactactcctatgtggagttgcctctggcctgcgaaggtggccgctacgggctgatccaggctgcagctgtggccacgtccagggaggtggcgcatggggaggtgctctttgcagctttctcctcggctgcaccccccactgtgggccggcccccatcggcggctgctggggcatctggagcctctgccctctgtgccttccccctggatgaggtggaccggcttgctaatcgcacgcgagatgcctgctacacccgggagggtcgtgctgaggatgggaccgaggtggcctacatcgagtatgatgtcaattctgactgtgcacagctgccagtggacaccctggatgcttatccctgtggctcagaccacacgcccagccccatggccagccgggtcccgctggaagccacaccaattctggagtggccagggattcagctaacagctgtggcagtcaccatggaagatggacacaccatcgctttcctgggtgatagtcaagggcagctgcacagggtctacttgggcccagggagcgatggccacccatactccacacagagcatccagcaggggtctgcagtgagcagagacctcacctttgatgggacctttgagcacctgtatgtcatgacccagagcacacttctgaaggttcctgtggcttcctgtgctcagcacctggactgtgcatcttgccttgctcacagggacccatactgtgggtggtgcgtgctccttggcaggtgcagtcgccgttctgagtgctcgaggggccagggcccagagcagtggctatggagcttccagcctgagctgggctgtctgcaagtggcagccatgagtcctgccaacatcagccgagaggagacgagggaggttttcctatcagtgccagacctgccacccctgtggccaggggagtcatattcctgccactttggggaacatcagagtcctgccctgctgactggttctggtgtgatgtgcccctccccagaccctagtgaggccccagtgctgccgagaggagccgactacgtatccgtgagcgtggagctcagatttggcgctgttgtgatcgccaaaacttccctctctttctatgactgtgtggcggtcactgaactccgcccatctgcgcagtgccaggcctgtgtgagcagccgctgggggtgtaactggtgtgtctggcagcacctgtgcacccacaaggcctcgtgtgatgctgggcccatggttgcaagccatcagagcccgcttgtctccccagaccctcctgcaagaggtgatggagactcagcagagcttgagggccctcccgcccccctcatcctcccgtccagcctcgactaccagtatgacacccccgggctctgggagctggaagaggcgaccttgggggcaagctcctgcccctgtgtggagagcgttcagggctccacgttgatgccggtccatgtggagcgggaaatccggctgctaggcaggaacctgcaccttttccaggatggcccaggagacaatgagtgtgtgatggagctggagggcctcgaggtggtggttgaggcccgggtcgagtgtgagccacctccagatacccagtgccatgtcacctgccagcagcaccagctcagctatgaggctctgcagccggagctccgtgtggggctgtttctgcgtcgggccggccgtctgcgtgtggacagtgctgaggggctgcatgtggtactgtatgactgttccgtgggacatggagactgcagccgctgccaaactgccatgccccagtatggctgtgtgtggtgtgagggggagcgtccacgttgtgtgacccgggaggcctgtggtgaggctgaggctgtggccacccagtgcccagcgcccctcatccactcggtggagccactgactgggcctgtagacggaggcacccgtgtcaccatcaggggctccaacctgggccagcatgtgcaggatgtgctgggcatggtcacggtggctggagtgccctgtgctgtggatgcccaggagtacgaggtctccagcagcctcgtgtgcatcaccggggccagtggggaggaggtggccggcgccacagcggtggaggtgccgggaagaggacgtggtgtctcagaacacgactttgcctaccaggatccgaaggtccattccatcttcccggcccgcggccccagagctgggggcacccgtctcaccctgaatggctccaagctcctgactgggcggctggaggacatccgagtggtggttggagaccagccttgtcacttgctgccggagcagcagtcagaacaactgcggtgtgagaccagcccacgccccacgcctgccacgctccctgtggctgtgtggtttggggccacggagcggaggcttcaacgcggacagttcaagtataccttggaccccaacatcacctctgctggccccaccaagagcttcctcagtggaggacgtgagatatgcgtccgtggccagaatctggacgtggtacagacgccaagaatccgggtgaccgtggtctcgagaatgctgcagcccagccaggggcttggacggaggcgtcgcgtggtcccggagacggcatgttcccttggaccctcctgcagtagccagcaatttgaggagccgtgccatgtcaactcctcccagctcatcacgtgccgcacacctgccctcccaggcctgcctgaggacccctgggtccgggtggaatttatccttgacaacctggtctttgactttgcaacactgaaccccacacctttctcctatgaggccgaccccaccctgcagccactcaaccctgaggaccccaccatgccattccggcacaagcctgggagtgtgttctccgtggagggggagaacctggaccttgcaatgtccaaggaggaggtggtggctatgataggggatggcccctgtgtggtgaagacgctgacgcggcaccacctgtactgcgagccccccgtggagcagcccctgccacggcaccatgccctccgagaggcacctgactctttgcctgagttcacggtgcagatggggaacttgcgcttctccctgggtcacgtgcagtatgacggcgagagccctggggcttttcctgtggcagcccaggtgggcttgggggtgggcacctctcttctggctctgggtgtcatcatcattgtcctcatgtacaggaggaagagcaagcaggccctgagggactataagaaggttcagatccagctggagaatctggagagcagtgtgcgggaccgctgcaagaaggaattcacagacctcatgactgagatgaccgatctcaccagtgacctcctgggcagcggcatccccttcctcgactacaaggtgtatgcggagaggatcttcttccctgggcaccgcgagtcgcccttgcaccgggacctgggtgtgcctgagagcagacggcccactgtggagcaagggctggggcagctctctaacctgctcaacagcaagctcttcctcaccaagttcatccacacgctggagagccagcgcaccttttcagctcgggaccgtgcctacgtggcatctctgctcaccgtggcactgcatgggaagcttgagtatttcactgacatcctccgcactctgctcagtgacctggttgcccagtatgtggccaagaaccccaagctgatgctgcgcaggacagagactgtggtggagaagctgctcaccaactggatgtccatctgtctgtataccttcgtgagggactccgtaggggagcctctgtacatgctctttcgagggattaagcaccaagtggataaggggccagtggacagtgtgacaggcaaggccaaatacaccttgaacgacaaccgcctgctcagagaggatgtggagtaccgtcccctgaccttgaatgcactattggctgtggggcctggggcaggagaggcccagggcgtgcccgtgaaggtcctagactgtgacaccatctcccaggcaaaggagaagatgctggaccagctttataaaggagtgcctctcacccagcggccagaccctcgcacccttgatgttgagtggcggtctggggtggccgggcacctcattctttctgacgaggatgtcacttctgaggtccagggtctgtggaggcgcctgaacacactgcagcattacaaggtcccagatggagcaactgtggccctcgtcccctgcctcaccaagcatgtgctccgggaaaaccaggattatgtccctggagagcggaccccaatgctggaggatgtagatgaggggggcatccggccctggcacctggtgaagccaagtgatgagccggagccgcccaggcctcggaggggcagccttcggggcggggagcgtgagcgcgccaaggccatccctgagatctacctgacccgcctgctgtccatgaagggcaccctgcagaagttcgtggatgacctgttccaggtgattctcagcaccagccgccccgtgccgctcgctgtgaagtacttctttgacctgctggatgagcaggcccagcagcatggcatctccgaccaggacaccatccacatctggaagaccaacagcttgcctctgaggttctggatcaatataataaaaaacccgcagtttgtgttcgacgtgcaaacatctgataacatggatgcggtgctccttgtcattgcacagaccttcatggacgcctgcaccctggccgaccacaagctgggccgggactccccgatcaacaaacttctgtatgcacgggacattccccggtacaagcggatggtggaaaggtactatgcagacatcagacagactgtcccagccagcgaccaagagatgaactctgtcctggctgaactgtcctggaactactccggagacctcggggcgcgagtggccctgcatgaactctacaagtacatcaacaagtactatgaccagatcatcactgccctggaggaggatggcacggcccagaagatgcagctgggctatcggctccagcagattgcagctgctgtggaaaacaaggtcacagatctatag

SEQ ID NO: 166763 - DNA, 6335 bp, Homo sapiens
  Payload ID: 12832
  Gene Symbol: PLXNB2
  Gene Name: plexin B2
  Uniprot ID: O15031
  ENST ID: ENST00000359337
  CDS Start-End: 94-5610
ccttggcggcggacgtgcagagaatctcgatgctggcctggagcagaaactgagctggaccactggagcctcggtgagggggtgcggggggcaatggcactgcagctctgggccctgaccctgctgggcctgctgggcgcaggtgccagcctgaggccccgcaagctggacttcttccgcagcgagaaagagctgaaccacctggctgtggatgaggcctcaggcgtggtgtacctgggggcggtgaatgccctctaccagctggatgcgaagctgcagctggagcagcaggtggccacgggcccggccctggacaacaagaagtgcacgccgcccatcgaggccagccagtgccatgaggctgagatgactgacaatgtcaaccagctgctgctgctcgaccctcccaggaagcgcctggtggagtgcggcagcctcttcaagggcatctgcgctctgcgcgccctgagcaacatctccctccgcctgttctacgaggacggcagcggggagaagtctttcgtggccagcaatgatgagggcgtggccacagtggggctggtgagctccacgggtcctggtggtgaccgcgtgctgtttgtgggcaaaggcaatgggccacacgacaacggcatcatcgtgagcactcggctgttggaccggactgacagcagggaggcctttgaagcctacacggaccacgccacctacaaggccggctacctgtccaccaacacacagcagttcgtggcggccttcgaggacggcccctacgtcttctttgtcttcaaccagcaggacaagcacccggcccggaaccgcacgctgctggcacgcatgtgcagagaagaccccaactactactcctacctggagatggacctgcagtgccgggaccccgacatccacgccgctgcctttggcacctgcctggccgcctccgtggctgcgcctggctctggcagggtgctatatgctgtcttcagcagagacagccggagcagtggggggcccggtgcgggcctctgcctgttcccgctggacaaggtgcacgccaagatggaggccaaccgcaacgcctgttacacaggcacccgggaggcccgtgacatcttctacaagcccttccacggcgatatccagtgcggcggccacgcgccgggctccagcaagagcttcccatgtggctcggagcacctgccctacccgctgggcagccgcgacgggctcagaggcacagccgtgctgcagcgtggaggcctgaacctcacggccgtgacggtcgccgccgagaacaaccacactgttgcttttctgggcacctctgatggccggatcctcaaggtgtacctcaccccagatggcacctcctcagagtacgactctatccttgtggagataaacaagagagtcaagcgcgacctggtactgtctggagacctgggcagcctgtacgccatgacccaggacaaggtgttccggctgccggtgcaggagtgcctgagctacccgacctgcacccagtgccgcgactcccaggacccctactgcggctggtgcgtcgtcgagggacgatgcacccggaaggccgagtgtccgcgggccgaggaggccagccactggctgtggagccgaagcaagtcctgcgtggccgtcaccagcgcccagccacagaacatgagccggcgggcccagggggaggtgcagctgaccgtcagccccctccctgccctgagcgaggaggacgagttgctgtgcctttttggggagtcgccgccacaccccgcccgcgtggagggcgaggccgtcatctgcaactccccaagcagcatccccgtcacaccgccaggccaggaccacgtggccgtgaccatccagctcctccttagacgaggcaacatcttcctcacgtcctaccagtaccccttctacgactgccgccaggccatgagcctggaggagaacctgccgtgcatctcctgcgtgagcaaccgctggacctgccagtgggacctgcgctaccacgagtgccgggaggcttcgcccaaccctgaggacggcatcgtccgtgcccacatggaggacagctgtccccagttcctgggacccagccccctggtgatccccatgaaccacgagacagatgtgaacttccagggcaagaacctggacaccgtgaagggttcctccctgcacgtgggcagtgacttgctcaagttcatggagccggtgaccatgcaggaatctgggaccttcgcctttcggaccccaaagctgtcccacgatgccaacgagacgctgcccctgcacctctacgtcaagtcttacggcaagaatatcgacagcaagctccatgtgaccctctacaactgctcctttggccgcagcgactgcagcctgtgccgggccgctaaccccgactacaggtgtgcgtggtgcgggggccagagcaggtgcgtgtatgaggccctgtgcaacaccacctccgagtgcccgccgcccgtcatcaccaggatccagcctgagacgggccccctgggtgggggcatccgcatcaccatcctggggtccaatttgggcgtccaagcaggggacatccagaggatctctgtggccggccggaactgctcctttcagccggaacgttactccgtgtccacccggatcgtgtgtgtgatcgaggctgcggagacgcctttcacggggggtgtcgaggtggacgtcttcgggaaactgggccgttcgcctcccaatgtccagttcaccttccaacagcccaagcctctcagtgtggagccgcagcagggaccgcaggcgggcggcaccacactgaccatccacggcacccacctggacacgggctcccaggaggacgtgcgggtgaccctcaacggcgtcccgtgtaaagtgacgaagtttggggcgcagctccagtgtgtcactggcccccaggcgacacggggccagatgcttctggaggtctcctacggggggtcccccgtgcccaaccccggcatcttcttcacctaccgcgaaaaccccgtactgcgagccttcgagccgctacgaagctttgccagtggtggccgcagcatcaacgtcacgggtcagggcttcagcctgatccagaggtttgccatggtggtcatcgcggagcccctgcagtcctggcagccgccgcgggaggctgaatccctgcagcccatgacggtggtgggtacagactacgtgttccacaatgacaccaaggtcgtcttcctgtccccggctgtgcctgaggagccagaggcctacaacctcacggtgctgatcgagatggacgggcaccgtgccctgctcagaacagaggccggggccttcgagtacgtgcctgaccccacctttgagaacttcacaggtggcgtcaagaagcaggtcaacaagctcatccacgcccggggcaccaatctgaacaaggcgatgacgctgcaggaggccgaggccttcgtgggtgccgagcgctgcaccatgaagacgctgacggagaccgacctgtactgtgagcccccggaggtgcagcccccgcccaagcggcggcagaaacgagacaccacacacaacctgcccgagttcattgtgaagttcggctctcgcgagtgggtgctgggccgcgtggagtacgacacacgggtgagcgacgtgccgctcagcctcatcttgccgctggtcatcgtgcccatggtggtcgtcatcgcggtgtctgtctactgctactggaggaagagccagcaggccgaacgagagtatgagaagatcaagtcccagctggagggcctggaggagagcgtgcgggaccgctgcaagaaggaattcacagacctgatgatcgagatggaggaccagaccaacgacgtgcacgaggccggcatccccgtgctggactacaagacctacaccgaccgcgtcttcttcctgccctccaaggacggcgacaaggacgtgatgatcaccggcaagctggacatccctgagccgcggcggccggtggtggagcaggccctctaccagttctccaacctgctgaacagcaagtctttcctcatcaatttcatccacaccctggagaaccagcgggagttctcggcccgcgccaaggtctacttcgcgtccctgctgacggtggcgctgcacgggaaactggagtactacacggacatcatgcacacgctcttcctggagctcctggagcagtacgtggtggccaagaaccccaagctgatgctgcgcaggtctgagactgtggtggagaggatgctgtccaactggatgtccatctgcctgtaccagtacctcaaggacagtgccggggagcccctgtacaagctcttcaaggccatcaaacatcaggtggaaaagggcccggtggatgcggtacagaagaaggccaagtacactctcaacgacacggggctgctgggggatgatgtggagtacgcacccctgacggtgagcgtgatcgtgcaggacgagggagtggacgccatcccggtgaaggtcctcaactgtgacaccatctcccaggtcaaggagaagatcattgaccaggtgtaccgtgggcagccctgctcctgctggcccaggccagacagcgtggtcctggagtggcgtccgggctccacagcgcagatcctgtcggacctggacctgacgtcacagcgggagggccggtggaagcgcgtcaacacccttatgcactacaatgtccgggatggagccaccctcatcctgtccaaggtgggggtctcccagcagccggaggacagccagcaggacctgcctggggagcgccatgccctcctggaggaggagaaccgggtgtggcacctggtgcggccgaccgacgaggtggacgagggcaagtccaagagaggcagcgtgaaagagaaggagcggacgaaggccatcaccgagatctacctgacgcggctgctctcagtcaagggcacactgcagcagtttgtggacaacttcttccagagcgtgctggcgcctgggcacgcggtgccacctgcagtcaagtacttcttcgacttcctggacgagcaggcagagaagcacaacatccaggatgaagacaccatccacatctggaagacgaacagcttaccgctccggttctgggtgaacatcctcaagaacccccacttcatctttgacgtgcatgtccacgaggtggtggacgcctcgctgtcagtcatcgcgcagaccttcatggatgcctgcacgcgcacggagcataagctgagccgcgattctcccagcaacaagctgctgtacgccaaggagatctccacctacaagaagatggtggaggattactacaaggggatccggcagatggtgcaggtcagcgaccaggacatgaacacacacctggcagagatttcccgggcgcacacggactccttgaacaccctcgtggcactccaccagctctaccaatacacgcagaagtactatgacgagatcatcaatgccttggaggaggatcctgccgcccagaagatgcagctggccttccgcctgcagcagattgccgctgcactggagaacaaggtcactgacctctgacctacaatctccagtgctgccttgggacataggtacctgaggtacctgagagcccctcaggggaggaggccgagtggctgtggctgaggcccccaccctcccctggaacgcgccccaagccggagtgggtgcagccggaacccgcccagcgtctagactgtagcatcttcctctgagcaataccgccgggcaccgcaccagcaccagccccagccccagctccctccggccgcagaaccagcatcgggtgttcactgtcgagtctccagtgatttgaaaatgtgccttacgctgccacgctgggggcagctggcctccgcctccgcccacgcaccagcagccgcctccatgccctaggttgggcccctgggggatctgagggcctgtggcccccagggcaagttcccagatcctatgtctgtctgtccaccacgagatgggaggaggagaaaaagcggtacgatgccttcctgacctcaccggcctccccaagggtgccggcactctgggtggactcacggctgctgggccccacgtcaaaggtcaagtgagacgtaggtcaagtcctacgtcggggcccagacatcctggggtcctggtctgtcagacaggctgccctagagccccacccagtccggggggactgggagcagttccaagaccaccccacccctttttgtaaatcttgttcattgtaaatcaaatacagcgtctttttcactctg

SEQ ID NO: 166764 - DNA, 609 bp, Homo sapiens
  Payload ID: 12832
  Gene Symbol: PLXNB2
  Gene Name: plexin B2
  ENST ID: ENST00000425954
  CDS Start-End: 125-609
cagcgccgagcgcggcccgggcgccatcgagccttggcggcggacgtgcagagaatctcgatgctggcctggagcagaaactgagctggaccactggagcctcggtgagggggtgcggggggcaatggcactgcagctctgggccctgaccctgctgggcctgctgggcgcaggtgccagcctgaggccccgcaagctggacttcttccgcagcgagaaagagctgaaccacctggctgtggatgaggcctcaggcgtggtgtacctgggggcggtgaatgccctctaccagctggatgcgaagctgcagctggagcagcaggtggccacgggcccggccctggacaacaagaagtgcacgccgcccatcgaggccagccagtgccatgaggctgagatgactgacaatgtcaaccagctgctgctgctcgaccctcccaggaagcgcctggtggagtgcggcagcctcttcaagggcatctgcgctctgcgcgccctgagcaacatctccctccgcctgttctacgaggacggcagcggggagaagtctttcgtggccagcaatgatgagggcgtggccacagtggggctggtgagctccacgggtcc

SEQ ID NO: 166765 - DNA, 1620 bp, Homo sapiens
  Payload ID: 12832
  Gene Symbol: PLXNB2
  Gene Name: plexin B2
  ENST ID: ENST00000432455
  CDS Start-End: 190-1620
atgtcctgtcctgatgagttggtggttcctgctgtagccatcggcctcgtgtgccccgagcgcctggcggtgcccacccctcccacaggaggtcctcaggaagcacggagacatcgagaatctcgatgctggcctggagcagaaactgagctggaccactggagcctcggtgagggggtgcggggggcaatggcactgcagctctgggccctgaccctgctgggcctgctgggcgcaggtgccagcctgaggccccgcaagctggacttcttccgcagcgagaaagagctgaaccacctggctgtggatgaggcctcaggcgtggtgtacctgggggcggtgaatgccctctaccagctggatgcgaagctgcagctggagcagcaggtggccacgggcccggccctggacaacaagaagtgcacgccgcccatcgaggccagccagtgccatgaggctgagatgactgacaatgtcaaccagctgctgctgctcgaccctcccaggaagcgcctggtggagtgcggcagcctcttcaagggcatctgcgctctgcgcgccctgagcaacatctccctccgcctgttctacgaggacggcagcggggagaagtctttcgtggccagcaatgatgagggcgtggccacagtggggctggtgagctccacgggtcctggtggtgaccgcgtgctgtttgtgggcaaaggcaatgggccacacgacaacggcatcatcgtgagcactcggctgttggaccggactgacagcagggaggcctttgaagcctacacggaccacgccacctacaaggccggctacctgtccaccaacacacagcagttcgtggcggccttcgaggacggcccctacgtcttctttgtcttcaaccagcaggacaagcacccggcccggaaccgcacgctgctggcacgcatgtgcagagaagaccccaactactactcctacctggagatggacctgcagtgccgggaccccgacatccacgccgctgcctttggcacctgcctggccgcctccgtggctgcgcctggctctggcagggtgctatatgctgtcttcagcagagacagccggagcagtggggggcccggtgcgggcctctgcctgttcccgctggacaaggtgcacgccaagatggaggccaaccgcaacgcctgttacacaggcacccgggaggcccgtgacatcttctacaagcccttccacggcgatatccagtgcggcggccacgcgccgggctccagcaagagcttcccatgtggctcggagcacctgccctacccgctgggcagccgcgacgggctcagaggcacagccgtgctgcagcgtggaggcctgaacctcacggccgtgacggtcgccgccgagaacaaccacactgttgcttttctgggcacctctgatggccggatcctcaaggtgtacctcaccccagatggcacctcctcagagtacgactctatccttgtggagataaacaagagagtcaagcgcgacctggtactgtctggagacctgggcagcctgtacgccatgacccaggacaaggtgttccggctgccggtgcaggagtgcctgagctacccgacctgcacccag

SEQ ID NO: 166766 - DNA, 704 bp, Homo sapiens
  Payload ID: 12832
  Gene Symbol: PLXNB2
  Gene Name: plexin B2
  ENST ID: ENST00000411680
  CDS Start-End: 1-704
tacaagcccttccacggcgatatccagtgcggcggccacgcgccgggctccagcaagagcttcccatgtggctcggagcacctgccctacccgctgggcagccgcgacgggctcagaggcacagccgtgctgcagcgtggaggcctgaacctcacggccgtgacggtcgccgccgagaacaaccacactgttgcttttctggagtggcgtccgggctccacagcgcagatcctgtcggacctggacctgacgtcacagcgggagggccggtggaagcgcgtcaacacccttatgcactacaatgtccgggatggagccaccctcatcctgtccaaggtgggggtctcccagcagccggaggacagccagcaggacctgcctggggagcgccatgccctcctggaggaggagaaccgggtgtggcacctggtgcggccgaccgacgaggtggacgagggcaagtccaagagaggcagcgtgaaagagaaggagcggacgaaggccatcaccgagatctacctgacgcggctgctctcagtcaagggcacactgcagcagtttgtggacaacttcttccagagcgtgctggcgcctgggcacgcggtgccacctgcagtcaagtacttcttcgacttcctggacgagcaggcagagaagcacaacatccaggatgaagacaccatccacatctggaagacgaacag

SEQ ID NO: 166767 - DNA, 567 bp, Homo sapiens
  Payload ID: 12832
  Gene Symbol: PLXNB2
  Gene Name: plexin B2
  ENST ID: ENST00000427829
  CDS Start-End: 1-567
acgaagtttggggcgcagctccagtgtgtcactggcccccaggcgacacggggccagatgcttctggaggtctcctacggggggtcccccgtgcccaaccccggcatcttcttcacctaccgcgaaaaccccgtactgcgagccttcgagccgctacgaagctttgccaggtggtgggtacagactacgtgttccacaatgacaccaaggtcgtcttcctgtccccggctgtgcctgaggagccagaggcctacaacctcacggtgctgatcgagatggacgggcaccgtgccctgctcagaacagaggccggggccttcgagtacgtgcctgaccccacctttgagaacttcacaggtggcgtcaagaagcaggtcaacaagctcatccacgcccggggcaccaatctgaacaaggcgatgacgctgcaggaggccgaggccttcgtgggtgccgagcgctgcaccatgaagacgctgacggagaccgacctgtactgtgagcccccggaggtgcagcccccgcccaagcggcggcagaaacgagacaccacacacaacctgcccg

SEQ ID NO: 166768 - DNA, 6383 bp, Homo sapiens
  Payload ID: 12832
  Gene Symbol: PLXNB2
  Gene Name: plexin B2
  Uniprot ID: O15031
  ENST ID: ENST00000449103
  CDS Start-End: 142-5658
atggcagcagcgcgggccagagcgcagcgccgagcgcggcccgggcgccatcgagccttggcggcggacgtgcagagaatctcgatgctggcctggagcagaaactgagctggaccactggagcctcgggtgcggggggcaatggcactgcagctctgggccctgaccctgctgggcctgctgggcgcaggtgccagcctgaggccccgcaagctggacttcttccgcagcgagaaagagctgaaccacctggctgtggatgaggcctcaggcgtggtgtacctgggggcggtgaatgccctctaccagctggatgcgaagctgcagctggagcagcaggtggccacgggcccggccctggacaacaagaagtgcacgccgcccatcgaggccagccagtgccatgaggctgagatgactgacaatgtcaaccagctgctgctgctcgaccctcccaggaagcgcctggtggagtgcggcagcctcttcaagggcatctgcgctctgcgcgccctgagcaacatctccctccgcctgttctacgaggacggcagcggggagaagtctttcgtggccagcaatgatgagggcgtggccacagtggggctggtgagctccacgggtcctggtggtgaccgcgtgctgtttgtgggcaaaggcaatgggccacacgacaacggcatcatcgtgagcactcggctgttggaccggactgacagcagggaggcctttgaagcctacacggaccacgccacctacaaggccggctacctgtccaccaacacacagcagttcgtggcggccttcgaggacggcccctacgtcttctttgtcttcaaccagcaggacaagcacccggcccggaaccgcacgctgctggcacgcatgtgcagagaagaccccaactactactcctacctggagatggacctgcagtgccgggaccccgacatccacgccgctgcctttggcacctgcctggccgcctccgtggctgcgcctggctctggcagggtgctatatgctgtcttcagcagagacagccggagcagtggggggcccggtgcgggcctctgcctgttcccgctggacaaggtgcacgccaagatggaggccaaccgcaacgcctgttacacaggcacccgggaggcccgtgacatcttctacaagcccttccacggcgatatccagtgcggcggccacgcgccgggctccagcaagagcttcccatgtggctcggagcacctgccctacccgctgggcagccgcgacgggctcagaggcacagccgtgctgcagcgtggaggcctgaacctcacggccgtgacggtcgccgccgagaacaaccacactgttgcttttctgggcacctctgatggccggatcctcaaggtgtacctcaccccagatggcacctcctcagagtacgactctatccttgtggagataaacaagagagtcaagcgcgacctggtactgtctggagacctgggcagcctgtacgccatgacccaggacaaggtgttccggctgccggtgcaggagtgcctgagctacccgacctgcacccagtgccgcgactcccaggacccctactgcggctggtgcgtcgtcgagggacgatgcacccggaaggccgagtgtccgcgggccgaggaggccagccactggctgtggagccgaagcaagtcctgcgtggccgtcaccagcgcccagccacagaacatgagccggcgggcccagggggaggtgcagctgaccgtcagccccctccctgccctgagcgaggaggacgagttgctgtgcctttttggggagtcgccgccacaccccgcccgcgtggagggcgaggccgtcatctgcaactccccaagcagcatccccgtcacaccgccaggccaggaccacgtggccgtgaccatccagctcctccttagacgaggcaacatcttcctcacgtcctaccagtaccccttctacgactgccgccaggccatgagcctggaggagaacctgccgtgcatctcctgcgtgagcaaccgctggacctgccagtgggacctgcgctaccacgagtgccgggaggcttcgcccaaccctgaggacggcatcgtccgtgcccacatggaggacagctgtccccagttcctgggacccagccccctggtgatccccatgaaccacgagacagatgtgaacttccagggcaagaacctggacaccgtgaagggttcctccctgcacgtgggcagtgacttgctcaagttcatggagccggtgaccatgcaggaatctgggaccttcgcctttcggaccccaaagctgtcccacgatgccaacgagacgctgcccctgcacctctacgtcaagtcttacggcaagaatatcgacagcaagctccatgtgaccctctacaactgctcctttggccgcagcgactgcagcctgtgccgggccgctaaccccgactacaggtgtgcgtggtgcgggggccagagcaggtgcgtgtatgaggccctgtgcaacaccacctccgagtgcccgccgcccgtcatcaccaggatccagcctgagacgggccccctgggtgggggcatccgcatcaccatcctggggtccaatttgggcgtccaagcaggggacatccagaggatctctgtggccggccggaactgctcctttcagccggaacgttactccgtgtccacccggatcgtgtgtgtgatcgaggctgcggagacgcctttcacggggggtgtcgaggtggacgtcttcgggaaactgggccgttcgcctcccaatgtccagttcaccttccaacagcccaagcctctcagtgtggagccgcagcagggaccgcaggcgggcggcaccacactgaccatccacggcacccacctggacacgggctcccaggaggacgtgcgggtgaccctcaacggcgtcccgtgtaaagtgacgaagtttggggcgcagctccagtgtgtcactggcccccaggcgacacggggccagatgcttctggaggtctcctacggggggtcccccgtgcccaaccccggcatcttcttcacctaccgcgaaaaccccgtactgcgagccttcgagccgctacgaagctttgccagtggtggccgcagcatcaacgtcacgggtcagggcttcagcctgatccagaggtttgccatggtggtcatcgcggagcccctgcagtcctggcagccgccgcgggaggctgaatccctgcagcccatgacggtggtgggtacagactacgtgttccacaatgacaccaaggtcgtcttcctgtccccggctgtgcctgaggagccagaggcctacaacctcacggtgctgatcgagatggacgggcaccgtgccctgctcagaacagaggccggggccttcgagtacgtgcctgaccccacctttgagaacttcacaggtggcgtcaagaagcaggtcaacaagctcatccacgcccggggcaccaatctgaacaaggcgatgacgctgcaggaggccgaggccttcgtgggtgccgagcgctgcaccatgaagacgctgacggagaccgacctgtactgtgagcccccggaggtgcagcccccgcccaagcggcggcagaaacgagacaccacacacaacctgcccgagttcattgtgaagttcggctctcgcgagtgggtgctgggccgcgtggagtacgacacacgggtgagcgacgtgccgctcagcctcatcttgccgctggtcatcgtgcccatggtggtcgtcatcgcggtgtctgtctactgctactggaggaagagccagcaggccgaacgagagtatgagaagatcaagtcccagctggagggcctggaggagagcgtgcgggaccgctgcaagaaggaattcacagacctgatgatcgagatggaggaccagaccaacgacgtgcacgaggccggcatccccgtgctggactacaagacctacaccgaccgcgtcttcttcctgccctccaaggacggcgacaaggacgtgatgatcaccggcaagctggacatccctgagccgcggcggccggtggtggagcaggccctctaccagttctccaacctgctgaacagcaagtctttcctcatcaatttcatccacaccctggagaaccagcgggagttctcggcccgcgccaaggtctacttcgcgtccctgctgacggtggcgctgcacgggaaactggagtactacacggacatcatgcacacgctcttcctggagctcctggagcagtacgtggtggccaagaaccccaagctgatgctgcgcaggtctgagactgtggtggagaggatgctgtccaactggatgtccatctgcctgtaccagtacctcaaggacagtgccggggagcccctgtacaagctcttcaaggccatcaaacatcaggtggaaaagggcccggtggatgcggtacagaagaaggccaagtacactctcaacgacacggggctgctgggggatgatgtggagtacgcacccctgacggtgagcgtgatcgtgcaggacgagggagtggacgccatcccggtgaaggtcctcaactgtgacaccatctcccaggtcaaggagaagatcattgaccaggtgtaccgtgggcagccctgctcctgctggcccaggccagacagcgtggtcctggagtggcgtccgggctccacagcgcagatcctgtcggacctggacctgacgtcacagcgggagggccggtggaagcgcgtcaacacccttatgcactacaatgtccgggatggagccaccctcatcctgtccaaggtgggggtctcccagcagccggaggacagccagcaggacctgcctggggagcgccatgccctcctggaggaggagaaccgggtgtggcacctggtgcggccgaccgacgaggtggacgagggcaagtccaagagaggcagcgtgaaagagaaggagcggacgaaggccatcaccgagatctacctgacgcggctgctctcagtcaagggcacactgcagcagtttgtggacaacttcttccagagcgtgctggcgcctgggcacgcggtgccacctgcagtcaagtacttcttcgacttcctggacgagcaggcagagaagcacaacatccaggatgaagacaccatccacatctggaagacgaacagcttaccgctccggttctgggtgaacatcctcaagaacccccacttcatctttgacgtgcatgtccacgaggtggtggacgcctcgctgtcagtcatcgcgcagaccttcatggatgcctgcacgcgcacggagcataagctgagccgcgattctcccagcaacaagctgctgtacgccaaggagatctccacctacaagaagatggtggaggattactacaaggggatccggcagatggtgcaggtcagcgaccaggacatgaacacacacctggcagagatttcccgggcgcacacggactccttgaacaccctcgtggcactccaccagctctaccaatacacgcagaagtactatgacgagatcatcaatgccttggaggaggatcctgccgcccagaagatgcagctggccttccgcctgcagcagattgccgctgcactggagaacaaggtcactgacctctgacctacaatctccagtgctgccttgggacataggtacctgaggtacctgagagcccctcaggggaggaggccgagtggctgtggctgaggcccccaccctcccctggaacgcgccccaagccggagtgggtgcagccggaacccgcccagcgtctagactgtagcatcttcctctgagcaataccgccgggcaccgcaccagcaccagccccagccccagctccctccggccgcagaaccagcatcgggtgttcactgtcgagtctccagtgatttgaaaatgtgccttacgctgccacgctgggggcagctggcctccgcctccgcccacgcaccagcagccgcctccatgccctaggttgggcccctgggggatctgagggcctgtggcccccagggcaagttcccagatcctatgtctgtctgtccaccacgagatgggaggaggagaaaaagcggtacgatgccttcctgacctcaccggcctccccaagggtgccggcactctgggtggactcacggctgctgggccccacgtcaaaggtcaagtgagacgtaggtcaagtcctacgtcggggcccagacatcctggggtcctggtctgtcagacaggctgccctagagccccacccagtccggggggactgggagcagttccaagaccaccccacccctttttgtaaatcttgttcattgtaaatcaaatacagcgtctttttcactctg

SEQ ID NO: 166769 - DNA, 253 bp, Homo sapiens
  Payload ID: 12832
  Gene Symbol: PLXNB2
  Gene Name: plexin B2
  ENST ID: ENST00000434732
  CDS Start-End: 1-253
agacagatgtgaacttccagggcaagaacctggacaccgtgaaggtgtggatgagtggtggaggtggccgtgggaaacccacagaggacgttcagaggcttctgcagacacagggttcctccctgcacgtgggcagtgacttgctcaagttcatggagccggtgaccatgcaggaatctgggaccttcgcctttcggaccccaaagctgtcccacgatgccaacgagacgctgcccctgcacctctacgtcaa

SEQ ID NO: 166770 - DNA, 1387 bp, Homo sapiens
  Payload ID: 12832
  Gene Symbol: PLXNB2
  Gene Name: plexin B2
  ENST ID: ENST00000614805
  CDS Start-End: 347-1387
cccagacctgatgatcgagatggaggaccagaccaacgacgtgcacgaggccggcatccccgtgctggactacaagacctacaccgaccgcgtcttcttcctgccctccaaggacggcgacaaggacgtgatgatcaccggcaagctggacatccctgagccgcggcggccggtggtggagcaggccctctaccagttctccaacctgctgaacagcaagtctttcctcatcaatttcatccacaccctggagaaccagcgggagttctcggcccgcgccaaggtctacttcgcgtccctgctgacggtggcgctgcacgggaaactggagtactacacggacatcatgcacacgctcttcctggagctcctggagcagtacgtggtggccaagaaccccaagctgatgctgcgcaggtctgagactgtggtggagaggatgctgtccaactggatgtccatctgcctgtaccagtacctcaaggacagtgccggggagcccctgtacaagctcttcaaggccatcaaacatcaggtggaaaagggcccggtggatgcggtacagaagaaggccaagtacactctcaacgacacggggctgctgggggatgatgtggagtacgcacccctgacggtgagcgtgatcgtgcaggacgagggagtggacgccatcccggtgaaggtcctcaactgtgacaccatctcccaggtcaaggagaagatcattgaccaggtgtaccgtgggcagccctgctcctgcggcccaggccagacagcgtggtcctggagtggcgtccgggctccacagcgcagatccgtcggacctggacctgacgtcacagcgggagggccggtggaagcgcgtcaacacccttatgcactacaatgtccgggatggagccaccctcatcctgtccaaggtgggggtctcccagcagccggaggacagccagcaggacctgcctggagcgccatgcctcctggaggaggagaaccgggtgtggcacctggtgcggccgaccgacgaggtggacgagggcaagtccaagagaggcagcgtgaaagagaaggagcggacgaaggccatcaccgagatctacctgacgcggctgctctcagtcaagggcacactgcagcagtttgtggacaacttcttccagagcgtgctggcgcctggcacgcggtgccacctgcagtcaagtacttcttcgacttcctggacgagcaggcagagaagcacaacatccaggatgaagacaccatccacatctggaagacgaacagcttaccgctccggttctgggtgaacatcctcaagaacccccacttcatctttgacgtgcatgtcacgaggtggtggacgcctcgctgtcagtcatcgcgcaga

SEQ ID NO: 166771 - DNA, 3443 bp, Homo sapiens
  Payload ID: 12832
  Gene Symbol: PLXNB2
  Gene Name: plexin B2
  ENST ID: ENST00000610984
  CDS Start-End: 1790-2272
acggcgtcccgtgtaaagtgacgaagtttggggcgcagctccagtgtgtcactggcccccaggcgacacggggccagatgcttctggaggtctcctacggggggtcccccgtgcccaaccccggcatcttcttcacctaccgcgaaaaccccgtactgcgagccttcgagccgctacgaagctttgccagtggtggccgcagcatcaacgtcacgggtcagggcttcagcctgatccagaggtttgccatggtggtcatcgcggagcccctgcagtcctggcagccgccgcgggaggctgaatccctgcagcccatgacggtggtgggtacagactacgtgttccacaatgacaccaaggtcgtcttcctgtccccggctgtgcctgaggagccagaggcctacaacctcacggtgctgatcgagatggacgggcaccgtgccctgctcagaacagaggccggggccttcgagtacgtgcctgaccccacctttgagaacttcacaggtggcgtcaagaagcaggtcaacaagctcatccacgcccggggcaccaatctgaacaaggcgatgacgctgcaggaggccgaggccttcgtgggtgccgagcgctgcaccatgaagacgctgacggagaccgacctgtactgtgagcccccggaggtgcagcccccgcccaagcggcggcagaaacgagacaccacacacaacctgcccgagttcattgtgaagttcggctctcgcgagtgggtgctgggccgcgtggagtacgacacacgggtgagcgacgtgccgctcagcctcatcttgccgctggtcatcgtgcccatggtggtcgtcatcgcggtgtctgtctactgctactggaggaagagccagcaggccgaacgagagtatgagaagatcaagtcccagctggagggcctggaggagagcgtgcgggaccgctgcaagaaggaattcacagacctgatgatcgagatggaggaccagaccaacgacgtgcacgaggccggcatccccgtgctggactacaagacctacaccgaccgcgtcttcttcctgccctccaaggacggcgacaaggacgtgatgatcaccggcaagctggacatccctgagccgcggcggccggtggtggagcaggccctctaccagttctccaacctgctgaacagcaagtctttcctcatcaatttcatccacaccctggagaaccagcgggagttctcggcccgcgccaaggtctacttcgcgtccctgctgacggtggcgctgcacgggaaactggagtactacacggacatcatgcacacgctcttcctggagctcctggagcagtacgtggtggccaagaaccccaagctgatgctgcgcaggtctgagactgtggtggagaggatgctgtccaactggatgtccatctgcctgtaccagtacctcaaggacagtgccggggagcccctgtacaagctcttcaaggccatcaaacatcaggtggaaaagggcccggtggatgcggtacagaagaaggccaagtacactctcaacgacacggggctgctgggggatgatgtggagtacgcacccctgacggtgagcgtgatcgtgcaggacgagggagtggacgccatcccggtgaaggtcctcaactgtgacaccatctcccaggtcaaggagaagatcattgaccaggtgtaccgtgggcagccctgctcctgctggcccaggccagacagcgtggtcctggagtggcgtccgggctccacagcgcagatcctgtcggacctggacctgacgtcacagcgggagggccggtggaagcgcgtcaacacccttatgcactacaatgtccgggatggagccaccctcatcctgtccaaggtgggggtctcccagcagccggaggacagccagcaggacctgcctggggagcgccatgccctcctggaggaggagaaccgggtgtggcacctggtgcggccgaccgacgaggtggacgagggcaagtccaagagaggcagcgtgaaagagaaggagcggacgaaggccatcaccgagatctacctgacgcggctgctctcagtcaagggcacactgcagcagtttgtggacaacttcttccagagcgtgctggcctgggcacgcggtgccacctgcagtcaagtacttcttcgacttcctggacgagcaggcagagaagcacaacatccaggatgaagacaccatccacatctggaagacgaacagcttaccgctccggttctgggtgaacatcctcaagaacccccacttcatctttgacgtgcatgtccacgaggtggtggacgcctcgctgtcagtcatcgcgcagaccttcatggatgcctgcacgcgcacggagcataagctgagccgcgattctcccagcaacaagctgctgtacgccaaggagatctccacctacaagaagatggtggaggattactacaaggggatccggcagatggtgcaggtcagcgaccaggacatgaacacacacctggcagagatttcccgggcgcacacggactccttgaacaccctcgtggcactccaccagctctaccaatacacgcagaagtactatgacgagatcatcaatgccttggaggaggatcctgccgcccagaagatgcagctggccttccgcctgcagcagattgccgctgcactggagaacaaggtcactgacctctgacctacaatctccagtgctgccttgggacataggtacctgaggtacctgagagcccctcaggggaggaggccgagtggctgtggctgaggcccccaccctcccctggaacgcgccccaagccggagtgggtgcagccggaacccgcccagcgtctagactgtagcatcttcctctgagcaataccgccgggcaccgcaccagcaccagccccagccccagctccctccggccgcagaaccagcatcgggtgttcactgtcgagtctccagtgatttgaaaatgtgccttacgctgccacgctgggggcagctggcctccgcctccgcccacgcaccagcagccgcctccatgccctaggttgggcccctgggggatctgagggcctgtggcccccagggcaagttcccagatcctatgtctgtctgtccaccacgagatgggaggaggagaaaaagcggtacgatgccttcctgacctcaccggcctccccaagggtgccggcactctgggtggactcacggctgctgggccccacgtcaaaggtcaagtgagacgtaggtcaagtcctacgtcggggcccagacatcctggggtcctggtctgtcagacaggctgccctagagccccacccagtccggggggactgggagcagttccaagaccaccccacccctttttgtaaatcttgttcattgtaaatcaaatacagcgtctttttcactctg

SEQ ID NO: 166772 - DNA, 6146 bp, Homo sapiens
  Payload ID: 12833
  Gene Symbol: PLXNB3
  Gene Name: plexin B3
  Uniprot ID: Q9ULL4
  ENST ID: ENST00000361971
  CDS Start-End: 115-5844
gctcctggcaccgccagctgctacttggccctcgccggtggcccaccaggacaatgcccccccgcagccatctcatgcccatcgccactgccctggggcagctgaactgagcgtatgtgccacgccgcccaggagacccctctgctgcaccacttcatggcccccgtgatggctcgctggcctcccttcggcctctgcctcctcctgctgctgctgtccccaccgccactgcccttgacaggggcccatcgcttctccgcacctaataccactctcaaccacttggcactggcacctggccgaggcacactctatgtcggcgcagtgaaccgcctcttccagctcagccccgagctgcagctcgaggccgtggctgtcactggccctgtaatcgacagccctgactgcgtgcccttccgtgacccagccgagtgcccacaggcccagctcactgacaatgccaaccagctgctgctggtgagcagccgcgcccaggagctggtggcctgcgggcaggtgcggcagggcgtgtgtgagacacggcgccttggggatgtggccgaggtgctgtaccaggctgaggaccctggtgacgggcagtttgtggctgccaataccccgggagtggcaacggtggggctggtggtgcccttgcccggccgggacctcctgcttgtggccagaggcctggcgggcaagctgtcggcaggggtgccacccctggccatccgccagctggccgggtctcagcccttctccagcgagggcctgggccgcctggtggtgggcgacttctccgactacaacaacagctacgtcggggcctttgccgacgcccgctccgcctacttcgtgttccgccgccgcggggcccgggcccaggctgagtaccgctcctacgtggcccgcgtctgcctgggggacaccaacctgtactcctacgtggaggtccccctcgcctgccagggccagggcctcatccaggccgccttccttgccccgggcaccttgctaggggtgtttgccgcgggcccaaggggcacccaggcggcgctctgtgccttccccatggtggagctgggtgccagcatggagcaggcccggagactctgctacacggcgggcggccggggccccagcggcgcagaggaagccaccgtggagtacggcgtcacgtcgcgctgcgtcaccctgccccttgattcccccgagtcgtacccctgtggcgacgagcacacccccagccccattgctggccgccagcccctggaggtccagcctctgctgaagctcgggcagccggtcagcgccgtggcagctctccaggcagatgggcacatgatagccttcctgggggacacccagggccagctgtacaaggtctttctccacggctcccagggccaggtttaccactcccagcaagtggggcctccaggctcagccatcagcccagacctgctgctggacagcagtggcagtcacctctatgtcctgactgcccaccaggtggaccggatacctgtggcagcctgcccccagttccctgactgtgccagctgcctccaggcccaggacccgctgtgtggctggtgtgtcctccagggcaggtgtacccggaagggccagtgcgggcgggcaggccagctgaaccagtggctgtggagttatgaggaggacagccactgcctgcacatccagagcctgctgccgggccaccacccccgccaggagcagggccaggtcactttgtctgtcccccggctgcccatcctggatgcagatgaatacttccattgtgcgttcggggactatgacagcttggctcatgtggaagggccccacgtggcctgtgtcacccctccccaagaccaggtgccacttaaccctccaggcacagaccacgtcactgtgcccctggccctgatgttcgaggacgtgactgtggctgccaccaacttctccttttatgactgcagtgccgtccaggccttggaggcggctgccccgtgtcgcgcttgcgtgggcagcatctggcggtgtcactggtgcccgcagagtagccactgcgtgtacggagagcactgcccagagggcgagaggaccatctacagcgcccaggaggtggacatccaggtgcgtggcccaggggcttgcccacaggtcgaaggcctggcaggtccccacctggtgcctgtgggctgggagagccatttggccctacgcgtgcggaaccttcaacatttccgaggcctgcctgcctccttccactgctggctggagctgcctggagaacttcggggactgccggccaccctggaggagacagcaggggattcaggcctcatccactgccaggcccaccagttttatccctccatgtcccagcgggagctcccagtgcccatctacgtcacccagggtgaagcccagaggctggacaacacccatgctctttatgtgatcctgtacgactgcgccatgggccacccggactgcagccactgccaagcggccaacaggagcctgggctgcctgtggtgtgctgacggccagcctgcctgtcgctatgggcccttgtgcccgccgggggctgtggagctgctgtgtcctgcgcccagcattgatgcagtcgagcccctgaccggtccccctgagggaggcttggccctcaccatcctgggctccaacctgggccgggccttcgccgatgtgcagtacgccgtgagcgtggccagccggccctgcaaccctgagccctctctctaccgcacgtcggcccggattgtgtgtgtgacatctcctgcccccaatggcaccactgggcccgtccgggtggccattaagagccagccaccaggcatctcaagccagcacttcacctaccaggaccctgtcctgctgagcctgagtcctcgctggggcccccaggcagggggcacccagctcaccatccgaggtcagcacctccagacaggtggcaacaccagtgccttcgtgggtggccaaccctgtcccatcctggagccagtgtgtccggaggccatcgtgtgccgtaccaggccccaggctgccccaggagaagcagcggtccttgtggtctttggccatgcccagcgcacactgctcgccagccccttccgctacaccgccaacccccagcttgtagcggcggagcccagtgccagcttccgggggggtgggcgactgatccgtgtcaggggcaccggcctagacgtggtgcagcggcccctactgtctgtgtggctggaggctgacgcagaggtgcaggcttccagggcccagccccaggacccacagccaaggaggagctgtggagcccctgctgcggacccccaggcttgtatccagctcggtggggggctgctgcagtgctccaccgtctgctccgtcaactcgtccagcctcctcctgtgccggagccctgctgtaccagacagagcccacccgcagcgggtcttcttcaccctagacaacgtgcaagtggacttcgccagtgccagtgggggccagggcttcctgtaccagcccaacccccgcctggcacccctcagccgcgaggggcctgcccgcccctaccgcctcaagccaggccatgtcctggatgtggagggcgagggcctcaacctgggcatcagcaaggaggaggtgcgcgtgcacatcggccgcggcgagtgcctggtgaagacgctcacgcgcacccacctgtactgcgagccgcctgcgcacgccccgcagcctgccaatggctccggcctgccacagttcgtggtgcagatgggcaatgtgcagctggccctgggccctgtgcagtacgaggctgaacccccgctgtctgcctttcccgtggaggcccaggcaggcgtgggcatgggtgctgcagtgctgattgccgccgtgctcctcctcaccctcatgtacaggcacaagagcaagcaggccctgcgggactaccagaaggtgctagtgcagctggagagcctggagaccggcgtgggagaccagtgccgcaaggagttcacagacctcatgacggagatgaccgacctcagcagcgacctggagggcagcgggatccccttcctggactaccgcacctacgccgagcgcgccttcttccctggccatggcggttgcccgctgcagcccaagcctgaggggccaggggaggacggccactgtgccactgtgcgccagggcctcacgcagctctccaacctgctcaacagcaagctcttcctcctcacgctcatccacaccctggaggagcagcccagcttttcccagagggatcgctgccatgtggcttcgctgctgtcgctagcgctacacggcaagctggagtacctgacggacatcatgaggaccctgctgggtgacctggcggcccattacgtgcacaggaaccccaagctcatgctacgcaggacagagaccatggtggagaaactgctcaccaactggctgtccatctgcctgtacgccttcctgagggaggtggctggtgaaccactgtacatgctcttccgggccatccagtaccaggtggacaaaggccccgtggacgccgtgacaggcaaggccaaacggaccctgaatgatagccgcttgctgcgggaggacgtggagttccagcccctgacgctgatggtgctggtggggcccggggctggcggggccgcaggcagcagcgagatgcagcgcgtgccagcccgggtgctcgacacggacaccatcacccaggtcaaggagaaggtgttggaccaagtctacaagggcacccccttctcccagaggccctcagtgcatgccctagaccttgagtggcgctcaggcctggctggtcacctgaccctatcggacgaagacttgacctccgtgacccaaaaccactggaagagactcaacaccttgcaacactacaaggtcccagatggagcaacagtggggctcgtccctcagctgcaccgtggcagcaccatctcccagagcctggcccagaggtgccccttgggagagaacatacccacgctggaggatggcgaggaggggggggtgtgcctctggcacctggtgaaagccaccgaggagccagaaggggccaaggtgcggtgcagcagcctgcgggagcgcgagccagcaagggccaaggccattccggaaatctacctcacccgtctgctgtccatgaagggcacgctgcagaagtttgtggacgacaccttccaggccattctcagcgtgaaccggcccatccccatcgccgtcaagtacctgtttgaccttctggatgagctagcagagaagcacggcatcgaggacccagggaccctgcacatctggaagaccaacagtctgctgctgcggttctgggtgaatgccttgaagaacccacagctcatctttgatgtacgggtgtcggacaatgtggacgccatccttgctgtcatcgcccagaccttcattgactcctgtaccacctcggagcataaagtgggccgggattccccagtgaacaaactgctctacgcccgggagatcccacgctacaagcagatggtggagaggtactatgcggacattcgccagagctctccggcgagctaccaggagatgaactctgctttggctgagctctccgggaactacacttctgctccccactgtctggaggctctgcaagaactctacaaccacatccacaggtactatgatcagattatcagtgccctggaggaggaccctgtgggccagaagctgcagctggcctgccgcctgcagcaggtcgccgccctggtggaaaacaaagtgactgacctgtgagctctggctcagacagcagcaagccggatccaccaacaccgcagcgccttatgaccccggaaccgagccagccactgaggggagctggcagagcctgggggcacagggtgcaaagccaggcactgtgcccagcagtgggctccctgcctgccacctcccctgccagcccacccaccttccccccacctgagattgtttctaatttataaggatccccctccttccccctctccccattgtatttatttgcctgctggaaaatcacatccggaaataaaatagaaatatgtctttttatttta

SEQ ID NO: 166773 - DNA, 774 bp, Homo sapiens
  Payload ID: 12833
  Gene Symbol: PLXNB3
  Gene Name: plexin B3
  ENST ID: ENST00000411613
  CDS Start-End: 1-774
agagcctggagaccggcgtgggagaccagtgccgcaaggagttcacagacctcatgacggagatgaccgacctcagcagcgacctggagggcagcgggatccccttcctggactaccgcacctacgccgagcgcgccttcttccctggccatggcggttgcccgctgcagcccaagcctgaggggccaggggaggacggccactgtgccactgtgcgccagggcctcacgcagctctccaacctgctcaacagcaagctcttcctcctcacgctcatccacaccctggaggagcagcccagcttttcccagagggatcgctgccatgtggcttcgctgctgtcgctagcgctacacggcaagctggagtacctgacggacatcatgaggaccctgctgggtgacctggcggcccattacgtgcacaggaaccccaagctcatgctacgcaggacagagaccatggtggagaaactgctcaccaactggctgtccatctgcctgtacgccttcctgagggaggtggctggtgaaccactgtacatgctcttccgggccatccagtaccaggtggacaaaggccccgtggacgccgtgacagagtggcgctcaggcctggctggtcacctgaccctatcggacgaagacttgacctccgtgacccaaaaccactggaagagactcaacaccttgcaacactacaaggtcccagatggagcaacagtggggctcgtccctcagctgcaccgtggcagcaccatctcccagagcctgg

SEQ ID NO: 166774 - DNA, 489 bp, Homo sapiens
  Payload ID: 12833
  Gene Symbol: PLXNB3
  Gene Name: plexin B3
  ENST ID: ENST00000455214
  CDS Start-End: 1-489
caaacggaccctgaatgatagccgcttgctgcgggaggacgtggagttccagcccctgacgctgatggtgctggtggggcccggggctggcggggccgcaggcagcagcgagatgcagcgcgtgccagcccgggtgctcgacacggacaccatcacccaggtcaaggagaaggtgttggaccaagtctacaagggcacccccttctcccagaggccctcagtgcatgccctagaccttgagtggcgctcaggcctggctggtcacctgaccctatcggacgaagacttgacctccgtgacccaaaaccactggaagagactcaacaccttgcaacactacaaggtcccagatggagcaacagtggggctcgtccctcagctgcaccgtggcagcaccatctcccagagcctggcccagaggtgccccttgggagagagtgagtccctcggccctgacctggggccactggagtccaggctgggcaggca

SEQ ID NO: 166775 - DNA, 526 bp, Homo sapiens
  Payload ID: 12833
  Gene Symbol: PLXNB3
  Gene Name: plexin B3
  ENST ID: ENST00000448847
  CDS Start-End: 1-526
ctgcctcgcagggcacgctgcagaagtttgtggacgacaccttccaggccattctcagcgtgaaccggcccatccccatcgccgtcaagtacctgtttgaccttctggatgagctagcagagaagcacggcatcgaggacccagggaccctgcacatctggaagaccaacagtctgctgctgcggttctgggtgaatgccttgaagaacccacagctcatctttgatgtacgggtgtcggacaatgtggacgccatccttgctgtcatcgcccagaccttcattgactcctgtaccacctcggagcataaagtgggccgggtgagagcagtgccagcagcagcagctggcaggggcttgaggaggaaaggcttatgggggaagcctagagggctgtgcacagagctctgggtgggcagtggcagcatcatgggggcaccttcacctccgagctcatgcctagcgcctcccctccctccggagcaggattccccagtgaacaaactgctctacgcccgggagatccc

SEQ ID NO: 166776 - DNA, 6377 bp, Homo sapiens
  Payload ID: 12833
  Gene Symbol: PLXNB3
  Gene Name: plexin B3
  Uniprot ID: Q9ULL4
  ENST ID: ENST00000538966
  CDS Start-End: 272-6070
gatgagtcggactgggcacgattgcattgtggggagggaggctggggctctgtgagacgtgctcctggcaccgccagctgctacttggccctcgccggtggcccaccaggacaatgcccccccgcagccatctcatgcccatcgccactgccctggggcagctgaactgagcgtatgtgccacgccgcccaggagacccctctgctgcaccacttcatgcacccccgctgccttgccccagtgcttcctcgccctggagctgggcgccagcatggagctcacccctgcctcttcgctgacttgctccttgctcagcccgcggctgcctggctctttcccccagctgcggagggttcctccttgcagccggccctggctgcccaaggcccccgtgatggctcgctggcctcccttcggcctctgcctcctcctgctgctgctgtccccaccgccactgcccttgacaggggcccatcgcttctccgcacctaataccactctcaaccacttggcactggcacctggccgaggcacactctatgtcggcgcagtgaaccgcctcttccagctcagccccgagctgcagctcgaggccgtggctgtcactggccctgtaatcgacagccctgactgcgtgcccttccgtgacccagccgagtgcccacaggcccagctcactgacaatgccaaccagctgctgctggtgagcagccgcgcccaggagctggtggcctgcgggcaggtgcggcagggcgtgtgtgagacacggcgccttggggatgtggccgaggtgctgtaccaggctgaggaccctggtgacgggcagtttgtggctgccaataccccgggagtggcaacggtggggctggtggtgcccttgcccggccgggacctcctgcttgtggccagaggcctggcgggcaagctgtcggcaggggtgccacccctggccatccgccagctggccgggtctcagcccttctccagcgagggcctgggccgcctggtggtgggcgacttctccgactacaacaacagctacgtcggggcctttgccgacgcccgctccgcctacttcgtgttccgccgccgcggggcccgggcccaggctgagtaccgctcctacgtggcccgcgtctgcctgggggacaccaacctgtactcctacgtggaggtccccctcgcctgccagggccagggcctcatccaggccgccttccttgccccgggcaccttgctaggggtgtttgccgcgggcccaaggggcacccaggcggcgctctgtgccttccccatggtggagctgggtgccagcatggagcaggcccggagactctgctacacggcgggcggccggggccccagcggcgcagaggaagccaccgtggagtacggcgtcacgtcgcgctgcgtcaccctgccccttgattcccccgagtcgtacccctgtggcgacgagcacacccccagccccattgctggccgccagcccctggaggtccagcctctgctgaagctcgggcagccggtcagcgccgtggcagctctccaggcagatgggcacatgatagccttcctgggggacacccagggccagctgtacaaggtctttctccacggctcccagggccaggtttaccactcccagcaagtggggcctccaggctcagccatcagcccagacctgctgctggacagcagtggcagtcacctctatgtcctgactgcccaccaggtggaccggatacctgtggcagcctgcccccagttccctgactgtgccagctgcctccaggcccaggacccgctgtgtggctggtgtgtcctccagggcaggtgtacccggaagggccagtgcgggcgggcaggccagctgaaccagtggctgtggagttatgaggaggacagccactgcctgcacatccagagcctgctgccgggccaccacccccgccaggagcagggccaggtcactttgtctgtcccccggctgcccatcctggatgcagatgaatacttccattgtgcgttcggggactatgacagcttggctcatgtggaagggccccacgtggcctgtgtcacccctccccaagaccaggtgccacttaaccctccaggcacagaccacgtcactgtgcccctggccctgatgttcgaggacgtgactgtggctgccaccaacttctccttttatgactgcagtgccgtccaggccttggaggcggctgccccgtgtcgcgcttgcgtgggcagcatctggcggtgtcactggtgcccgcagagtagccactgcgtgtacggagagcactgcccagagggcgagaggaccatctacagcgcccaggaggtggacatccaggtgcgtggcccaggggcttgcccacaggtcgaaggcctggcaggtccccacctggtgcctgtgggctgggagagccatttggccctacgcgtgcggaaccttcaacatttccgaggcctgcctgcctccttccactgctggctggagctgcctggagaacttcggggactgccggccaccctggaggagacagcaggggattcaggcctcatccactgccaggcccaccagttttatccctccatgtcccagcgggagctcccagtgcccatctacgtcacccagggtgaagcccagaggctggacaacacccatgctctttatgtgatcctgtacgactgcgccatgggccacccggactgcagccactgccaagcggccaacaggagcctgggctgcctgtggtgtgctgacggccagcctgcctgtcgctatgggcccttgtgcccgccgggggctgtggagctgctgtgtcctgcgcccagcattgatgcagtcgagcccctgaccggtccccctgagggaggcttggccctcaccatcctgggctccaacctgggccgggccttcgccgatgtgcagtacgccgtgagcgtggccagccggccctgcaaccctgagccctctctctaccgcacgtcggcccggattgtgtgtgtgacatctcctgcccccaatggcaccactgggcccgtccgggtggccattaagagccagccaccaggcatctcaagccagcacttcacctaccaggaccctgtcctgctgagcctgagtcctcgctggggcccccaggcagggggcacccagctcaccatccgaggtcagcacctccagacaggtggcaacaccagtgccttcgtgggtggccaaccctgtcccatcctggagccagtgtgtccggaggccatcgtgtgccgtaccaggccccaggctgccccaggagaagcagcggtccttgtggtctttggccatgcccagcgcacactgctcgccagccccttccgctacaccgccaacccccagcttgtagcggcggagcccagtgccagcttccgggggggtgggcgactgatccgtgtcaggggcaccggcctagacgtggtgcagcggcccctactgtctgtgtggctggaggctgacgcagaggtgcaggcttccagggcccagccccaggacccacagccaaggaggagctgtggagcccctgctgcggacccccaggcttgtatccagctcggtggggggctgctgcagtgctccaccgtctgctccgtcaactcgtccagcctcctcctgtgccggagccctgctgtaccagacagagcccacccgcagcgggtcttcttcaccctagacaacgtgcaagtggacttcgccagtgccagtgggggccagggcttcctgtaccagcccaacccccgcctggcacccctcagccgcgaggggcctgcccgcccctaccgcctcaagccaggccatgtcctggatgtggagggcgagggcctcaacctgggcatcagcaaggaggaggtgcgcgtgcacatcggccgcggcgagtgcctggtgaagacgctcacgcgcacccacctgtactgcgagccgcctgcgcacgccccgcagcctgccaatggctccggcctgccacagttcgtggtgcagatgggcaatgtgcagctggccctgggccctgtgcagtacgaggctgaacccccgctgtctgcctttcccgtggaggcccaggcaggcgtgggcatgggtgctgcagtgctgattgccgccgtgctcctcctcaccctcatgtacaggcacaagagcaagcaggccctgcgggactaccagaaggtgctagtgcagctggagagcctggagaccggcgtgggagaccagtgccgcaaggagttcacagacctcatgacggagatgaccgacctcagcagcgacctggagggcagcgggatccccttcctggactaccgcacctacgccgagcgcgccttcttccctggccatggcggttgcccgctgcagcccaagcctgaggggccaggggaggacggccactgtgccactgtgcgccagggcctcacgcagctctccaacctgctcaacagcaagctcttcctcctcacgctcatccacaccctggaggagcagcccagcttttcccagagggatcgctgccatgtggcttcgctgctgtcgctagcgctacacggcaagctggagtacctgacggacatcatgaggaccctgctgggtgacctggcggcccattacgtgcacaggaaccccaagctcatgctacgcaggacagagaccatggtggagaaactgctcaccaactggctgtccatctgcctgtacgccttcctgagggaggtggctggtgaaccactgtacatgctcttccgggccatccagtaccaggtggacaaaggccccgtggacgccgtgacaggcaaggccaaacggaccctgaatgatagccgcttgctgcgggaggacgtggagttccagcccctgacgctgatggtgctggtggggcccggggctggcggggccgcaggcagcagcgagatgcagcgcgtgccagcccgggtgctcgacacggacaccatcacccaggtcaaggagaaggtgttggaccaagtctacaagggcacccccttctcccagaggccctcagtgcatgccctagaccttgagtggcgctcaggcctggctggtcacctgaccctatcggacgaagacttgacctccgtgacccaaaaccactggaagagactcaacaccttgcaacactacaaggtcccagatggagcaacagtggggctcgtccctcagctgcaccgtggcagcaccatctcccagagcctggcccagaggtgccccttgggagagaacatacccacgctggaggatggcgaggaggggggggtgtgcctctggcacctggtgaaagccaccgaggagccagaaggggccaaggtgcggtgcagcagcctgcgggagcgcgagccagcaagggccaaggccattccggaaatctacctcacccgtctgctgtccatgaagggcacgctgcagaagtttgtggacgacaccttccaggccattctcagcgtgaaccggcccatccccatcgccgtcaagtacctgtttgaccttctggatgagctagcagagaagcacggcatcgaggacccagggaccctgcacatctggaagaccaacagtctgctgctgcggttctgggtgaatgccttgaagaacccacagctcatctttgatgtacgggtgtcggacaatgtggacgccatccttgctgtcatcgcccagaccttcattgactcctgtaccacctcggagcataaagtgggccgggattccccagtgaacaaactgctctacgcccgggagatcccacgctacaagcagatggtggagaggtactatgcggacattcgccagagctctccggcgagctaccaggagatgaactctgctttggctgagctctccgggaactacacttctgctccccactgtctggaggctctgcaagaactctacaaccacatccacaggtactatgatcagattatcagtgccctggaggaggaccctgtgggccagaagctgcagctggcctgccgcctgcagcaggtcgccgccctggtggaaaacaaagtgactgacctgtgagctctggctcagacagcagcaagccggatccaccaacaccgcagcgccttatgaccccggaaccgagccagccactgaggggagctggcagagcctgggggcacagggtgcaaagccaggcactgtgcccagcagtgggctccctgcctgccacctcccctgccagcccacccaccttccccccacctgagattgtttctaatttataaggatccccctccttccccctctccccattgtatttatttgcctgctggaaaatcacatccggaaataaaatagaaatatgtctttttattttattttg

SEQ ID NO: 166777 - DNA, 7346 bp, Homo sapiens
  Payload ID: 12834
  Gene Symbol: PLXNC1
  Gene Name: plexin C1
  Uniprot ID: O60486
  ENST ID: ENST00000258526
  CDS Start-End: 250-4956
gcgaggaggaaacggtgccggagcgcgcagggcttgctgccgccaccgccgctgcacaggctgccggagcgagcctgccgcgcgccgccctccccgctctccttcctgggcgagctgcggggatggggcggccgcgggagcccgagcgcgcgcaggaaccgccgccgccgccgcccgcgtctccgttgccgcgcgcctgagccgccgtcgccgccgcgcgccctgcccgggggcggcccccccagccccatggaggtctcccggaggaaggcgccgccgcgccccccgcgccccgcagcgccactgcccctgctcgcctatctgctggcactggcggctcccggccggggcgcggacgagcccgtgtggcggtcggagcaagccatcggagccatcgcggcgagccaggaggacggcgtgtttgtggcgagcggcagctgcctggaccagctggactacagcctggagcacagcctctcgcgcctgtaccgggaccaagcgggcaactgcacagagccggtctcgctggcgccccccgcgcggccccggcccgggagcagcttcagcaagctgctgctgccctaccgcgagggggcggccggcctcggggggctgctgctcaccggctggaccttcgaccggggcgcctgcgaggtgcggcccctgggcaacctgagccgcaactccctgcgcaacggcaccgaggtggtgtcgtgccacccgcagggctcgacggccggcgtggtgtaccgcgcgggccggaacaaccgctggtacctggcggtggccgccacctacgtgctgcctgagccggagacggcgagccgctgcaaccccgcggcatccgaccacgacacggccatcgcgctcaaggacacggaggggcgcagcctggccacgcaggagctggggcgcctcaagctgtgcgagggcgcgggcagcctgcacttcgtggacgcctttctctggaacggcagcatctacttcccctactacccctacaactacacgagcggcgctgccaccggctggcccagcatggcgcgcatcgcgcagagcaccgaggtgctgttccagggccaggcatccctcgactgcggccacggccaccccgacggccgccgcctgctcctctcctccagcctagtggaggccctggacgtctgggcgggagtgttcagcgcggccgctggagagggccaggagcggcgctcccccaccaccacggcgctctgcctcttcagaatgagtgagatccaggcgcgcgccaagagggtcagctgggacttcaagacggccgagagccactgcaaagaaggggatcaacctgaaagagtccaaccaatcgcatcatctaccttgatccattccgacctgacatccgtttatggcaccgtggtaatgaacaggactgttttattcttggggactggagatggccagttacttaaggttattcttggtgagaatttgacttcaaattgtccagaggttatctatgaaattaaagaagagacacctgttttctacaaactcgttcctgatcctgtgaagaatatctacatttatctaacagctgggaaagaggtgaggagaattcgtgttgcaaactgcaataaacataaatcctgttcggagtgtttaacagccacagaccctcactgcggttggtgccattcgctacaaaggtgcacttttcaaggagattgtgtacattcagagaacttagaaaactggctggatatttcgtctggagcaaaaaagtgccctaaaattcagataattcgaagcagtaaagaaaagactacagtgactatggtgggaagcttctctccaagacactcaaagtgcatggtgaagaatgtggactctagcagggagctctgccagaataaaagtcagcccaaccggacctgcacctgtagcatcccaaccagagcaacctacaaagatgtttcagttgtcaacgtgatgttctccttcggttcttggaatttatcagacagattcaactttaccaactgctcatcattaaaagaatgcccagcatgcgtagaaactggctgcgcgtggtgtaaaagtgcaagaaggtgtatccaccccttcacagcttgcgacccttctgattatgagagaaaccaggaacagtgtccagtggctgtcgagaagacatcaggaggaggaagacccaaggagaacaaggggaacagaaccaaccaggctttacaggtcttctacattaagtccattgagccacagaaagtatcgacattagggaaaagcaacgtgatagtaacgggagcaaactttacccgggcatcgaacatcacaatgatcctgaaaggaaccagtacctgtgataaggatgtgatacaggttagccatgtgctaaatgacacccacatgaaattctctcttccatcaagccggaaagaaatgaaggatgtgtgtatccagtttgatggtgggaactgctcttctgtgggatccttatcctacattgctctgccacattgttcccttatatttcctgctaccacctggatcagtggtggtcaaaatataaccatgatgggcagaaattttgatgtaattgacaacttaatcatttcacatgaattaaaaggaaacataaatgtctctgaatattgtgtggcgacttactgcgggtttttagcccccagtttaaagagttcaaaagtgcgcacgaatgtcactgtgaagctgagagtacaagacacctacttggattgtggaaccctgcagtatcgggaggaccccagattcacggggtatcgggtggaatccgaggtggacacagaactggaagtgaaaattcaaaaagaaaatgacaacttcaacatttccaaaaaagacattgaaattactctcttccatggggaaaatgggcaattaaattgcagttttgaaaatattactagaaatcaagatcttaccaccatcctttgcaaaattaaaggcatcaagactgcaagcaccattgccaactcttctaagaaagttcgggtcaagctgggaaacctggagctctacgtcgagcaggagtcagttccttccacatggtattttctgattgtgctccctgtcttgctagtgattgtcatttttgcggccgtgggggtgaccaggcacaaatcgaaggagctgagtcgcaaacagagtcaacaactagaattgctggaaagcgagctccggaaagagatacgtgacggctttgctgagctgcagatggataaattggatgtggttgatagttttggaactgttcccttccttgactacaaacattttgctctgagaactttcttccctgagtcaggtggcttcacccacatcttcactgaagatatgcataacagagacgccaacgacaagaatgaaagtctcacagctttggatgccctaatctgtaataaaagctttcttgttactgtcatccacacccttgaaaagcagaagaacttttctgtgaaggacaggtgtctgtttgcctccttcctaaccattgcactgcaaaccaagctggtctacctgaccagcatcctagaggtgctgaccagggacttgatggaacagtgtagtaacatgcagccgaaactcatgctgagacgcacggagtccgtcgtcgaaaaactcctcacaaactggatgtccgtctgcctttctggatttctccgggagactgtcggagagcccttctatttgctggtgacgactctgaaccagaaaattaacaagggtcccgtggatgtaatcacttgcaaagccctgtacacacttaatgaagactggctgttgtggcaggttccggaattcagtactgtggcattaaacgtcgtctttgaaaaaatcccggaaaacgagagtgcagatgtctgtcggaatatttcagtcaatgttctcgactgtgacaccattggccaagccaaagaaaagattttccaagcattcttaagcaaaaatggctctccttatggacttcagcttaatgaaattggtcttgagcttcaaatgggcacacgacagaaagaacttctggacatcgacagttcctccgtgattcttgaagatggaatcaccaagctaaacaccattggccactatgagatatcaaatggatccactataaaagtctttaagaagatagcaaattttacttcagatgtggagtactcggatgaccactgccatttgattttaccagattcggaagcattccaagatgtgcaaggaaagagacatcgagggaagcacaagttcaaagtaaaagaaatgtatctgacaaagctgctgtcgaccaaggtggcaattcattctgtgcttgaaaaactttttagaagcatttggagtttacccaacagcagagctccatttgctataaaatacttttttgactttttggacgcccaggctgaaaacaaaaaaatcacagatcctgacgtcgtacatatttggaaaacaaacagccttcctcttcgcttctgggtaaacatcctgaagaaccctcagtttgtctttgacattaagaagacaccacatatagacggctgtttgtcagtgattgcccaggcattcatggatgcattttctctcacagagcagcaactagggaaggaagcaccaactaataagcttctctatgccaaggatatcccaacctacaaagaagaagtaaaatcttattacaaagcaatcagggatttgcctccattgtcatcctcagaaatggaagaatttttaactcaggaatctaagaaacatgaaaatgaatttaatgaagaagtggccttgacagaaatttacaaatacatcgtaaaatattttgatgagattctaaataaactagaaagagaacgagggctggaagaagctcagaaacaactcttgcatgtaaaagtcttatttgatgaaaagaagaaatgcaagtggatgtaagcactctggggcctggcttaatctggcaaagttcttcagacgacttgggagcaaaatggctgcttgagctactctgtgtcgttaatttgttgtttgcacataggttccactttgggcactgtctttttaagagaccaaggcacatgcacagcttttagaaagcataccaacccttgtgcctgtgtgtataccgtgggaacccttctgtaaatagagttgaagtggttgttgcaaacagcctccttgtttacagagaatacaaggccagtaagcgaatgtcagtattgtaactacagtctccacttaagcacaatgatataagtggttttgtttgaaaactacagctatgtagcacttgtgctacactgcacctctgcattgtaaagggatactgccagtgctcaaaacaaaatgtgaaatgagtcatttggaaacaaggtgggggtgttagggcaacctcgaggatttgcagcattgaaactttccccagtagttcttggaaaagctgaccgcagaatttggtagtgtacacttagcatttgtgagtgtgtgtgtgtgtttaaaccaaaaactaacagtgttgcaacattgttgaaagggctcgtgtttttcagtggtcatcaactgcactccatcaaactcacctccatttcaccaaggagctctaaagtaaggagagtgggctttatttaaatgaacagcattttaaccagatactttgtcctaatgtatgttccttttcttcatctgttttttcatactaaatgtatttgatagtggacatgttggatattatacaaaaaaatcattaattcatttctgttccaaaacctttgatcagaacgatctgtggaagagtaactccatttctatatgagtgagtgtctccttgctttagatttctggtgaaccctgtggttatgaatacttgtgtgtgatttaaaaaaaaaaagatacattttacattttatcgaattgctgttcacactggagtattatatataaatatatatatttgaggcccaaggcctgaaaaatattagtatacaacttggtatcttagtcttactatgtactttttgaaagtattcctcgcaggagaaagaatttaaaatacccattttattcatgcctttctttttaaagaattctctatccagttatactgtagtctttttagtgctgattttttaattcctgaatttttgctgctcatgaccagttttaataccactgtgttttccttctattaaaccagaagaagtaaacagcataattggcaactcttgagcttttcttgtggcaggcaccttttacccttggtgctccaaatcccccatctaggaaagaaaattttttcaagtcaaataacattgatcacatattccttgaaatcatttaccaacactgtatggagcattaggatttaaatatgaatttgtcttaaaggcaattcctttttgcttctgtattatctggaaaagcatgagagaggtgacacctcaacaaactgatcagagaaaataagcagttactaccctgataggcaccttcccaatcctgttgcttttgaccattgtctgtccaacggacacacctcaaacaaacaaaactaccaaatagatgacagatcagaataaaggtgagaggtctggtccccattgaaggctgctacagtcttcaaagaggtgaaggagttcataagagaacaacagtaggaaagttgagagccaagggtaggagagttgcccaaaagacttcccctactactttagggtactgaaaactcaaaggatcagctacagctttatctaagtatttactaaatgctacatgagggtgtccctgtccagctttctggcacatgagtcctgtgtggagagttacctcctcttccagggactgtgctgttgggaactttgggcaagtcacttacctctttgtgcctcaatttctgtataatatttctaagctacctcactgaggtggtatgaagattcactaatgtatgtagcgtgtttgtcaatcctccagtgaaaagcactatctagatcacattttggatcacattagccaaatgcagtaaatggccaaattagatgtgtgctgaagacaatcagtcactgggtctatattaaacagcaaccagagcaacaaatggcaaacaatttctattttcaagtttctttgcatatttttttggtgcaaaaccatttataaacttttttttctaacactagtgtctacagcagcattcaaaaaaattctgttaccttttctgtattaggatttaaagtctatttcttattgtatacctgattgaagctgttcttggagatgaatgttttaaatgtctatatccaaaaaataaacattttgatgtaactgtg

SEQ ID NO: 166778 - DNA, 1813 bp, Homo sapiens
  Payload ID: 12834
  Gene Symbol: PLXNC1
  Gene Name: plexin C1
  ENST ID: ENST00000545312
  CDS Start-End: 577-1500
acagtgctgattcaagagcgtctcgagcactctgagtggtgagggggcggctcggctcgccaggaggaagtggcatccagccagtcggcgatactttcactttcagtggaataattcccgctggtgcaggggtctgatgtccctccaccaggtgctcaagggggtctgggacaccgacagccctagtcctcctgtcctaccccacagacgtttagtgggtgacagtagctccgtgaccgccaggagactgtcggagagcccttctatttgctggtgacgactctgaaccagaaaattaacaagggtcccgtggatgtaatcacttgcaaagccctgtacacacttaatgaagactggctgttgtggcaggttccggaattcagtactgtggcattaaacgtcgtctttgaaaaaatcccggaaaacgagagtgcagatgtctgtcggaatatttcagtcaatgttctcgactgtgacaccattggccaagccaaagaaaagattttccaagcattcttaagcaaaaatggctctccttatggacttcagcttaatgaaattggtcttgagcttcaaatgggcacacgacagaaagaacttctggacatcgacagttcctccgtgattcttgaagatggaatcaccaagctaaacaccattggccactatgagatatcaaatggatccactataaaagtctttaagaagatagcaaattttacttcagatgtggagtactcggatgaccactgccatttgattttaccagattcggaagcattccaagatgtgcaaggaaagagacatcgagggaagcacaagttcaaagtaaaagaaatgtatctgacaaagctgctgtcgaccaaggtggcaattcattctgtgcttgaaaaactttttagaagcatttggagtttacccaacagcagagctccatttgctataaaatacttttttgactttttggacgcccaggctgaaaacaaaaaaatcacagatcctgacgtcgtacatatttggaaaacaaacagccttcctcttcgcttctgggtaaacatcctgaagaaccctcagtttgtctttgacattaagaagacaccacatatagacggctgtttgtcagtgattgcccaggcattcatggatgcattttctctcacagagcagcaactagggaaggaagcaccaactaataagcttctctatgccaaggatatcccaacctacaaagaagaagtaaaatcttattacaaagcaatcagggatttgcctccattgtcatcctcagaaatggaagaatttttaactcaggaatctaagaaacatgaaaatgaatttaatgaagaagtggccttgacagaaatttacaaatacatcgtaaaatattttgatgagattctaaataaactagaaagagaacgagggctggaagaagctcagaaacaactcttgcatgtaaaagtcttatttgatgaaaagaagaaatgcaagtggatgtaagcactctggggcctggcttaatctggcaaagttcttcagacgacttgggagcaaaatggctgcttgagctactctgtgtcgttaatttgttgtttgcacataggttccactttgggcactgtctttttaagagaccaaggcacatgcacagcttttagaaagcataccaacccttgtgcctgtgtgtataccgtgggaacccttctgtaaatagagttgaagtggttgttgcaaacagcctccttgtttacagagaatacaaggccagtaagcgaatgtcagtattgtaactacagtctccacttaagcacaa

SEQ ID NO: 166779 - DNA, 2455 bp, Homo sapiens
  Payload ID: 12834
  Gene Symbol: PLXNC1
  Gene Name: plexin C1
  ENST ID: ENST00000547057
  CDS Start-End: 238-2085
acttgtaaaatgagtaaggttttggtttttttctgctgcattttggcatcttcctcttcagagtgacccctcactgggaaattttcttataagatccagctttttaatgctattttctagtttcattctagctcctgctctctgtccctatctgttttgtttttgtttttgtttttaagaactgtaaagattgctatttgttttcatttttggtttttgagttaccatgtccctctgatgcagcatctctgtctcttagcggccgtgggggtgaccaggcacaaatcgaaggagctgagtcgcaaacagagtcaacaactagaattgctggaaagcgagctccggaaagagatacgtgacggctttgctgagctgcagatggataaattggatgtggttgatagttttggaactgttcccttccttgactacaaacattttgctctgagaactttcttccctgagtcaggtggcttcacccacatcttcactgaagatatgcataacagagacgccaacgacaagaatgaaagtctcacagctttggatgccctaatctgtaataaaagctttcttgttactgtcatccacacccttgaaaagcagaagaacttttctgtgaaggacaggtgtctgtttgcctccttcctaaccattgcactgcaaaccaagctggtctacctgaccagcatcctagaggtgctgaccagggacttgatggaacagtgtagtaacatgcagccgaaactcatgctgagacgcacggagtccgtcgtcgaaaaactcctcacaaactggatgtccgtctgcctttctggatttctccgggagactgtcggagagcccttctatttgctggtgacgactctgaaccagaaaattaacaagggtcccgtggatgtaatcacttgcaaagccctgtacacacttaatgaagactggctgttgtggcaggttccggaattcagtactgtggcattaaacgtcgtctttgaaaaaatcccggaaaacgagagtgcagatgtctgtcggaatatttcagtcaatgttctcgactgtgacaccattggccaagccaaagaaaagattttccaagcattcttaagcaaaaatggctctccttatggacttcagcttaatgaaattggtcttgagcttcaaatgggcacacgacagaaagaacttctggacatcgacagttcctccgtgattcttgaagatggaatcaccaagctaaacaccattggccactatgagatatcaaatggatccactataaaagtctttaagaagatagcaaattttacttcagatgtggagtactcggatgaccactgccatttgattttaccagattcggaagcattccaagatgtgcaaggaaagagacatcgagggaagcacaagttcaaagtaaaagaaatgtatctgacaaagctgctgtcgaccaaggtggcaattcattctgtgcttgaaaaactttttagaagcatttggagtttacccaacagcagagctccatttgctataaaatacttttttgactttttggacgcccaggctgaaaacaaaaaaatcacagatcctgacgtcgtacatatttggaaaacaaacagccttcctcttcgcttctgggtaaacatcctgaagaaccctcagtttgtctttgacattaagaagacaccacatatagacggctgtttgtcagtgattgcccaggcattcatggatgcattttctctcacagagcagcaactagggaaggaagcaccaactaataagcttctctatgccaaggatatcccaacctacaaagaagaagtaaaatcttattacaaagcaatcagggatttgcctccattgtcatcctcagaaatggaagaatttttaactcaggaatctaagaaacatgaaaatgaatttaatgaagaagtggccttgacagaaatttacaaatacatcgtaaaatattttgatgagattctaaataaactagaaagagaacgagggctggaagaagctcagaaacaactcttgcatgtaaaagtcttatttgatgaaaagaagaaatgcaagtggatgtaagcactctggggcctggcttaatctggcaaagttcttcagacgacttgggagcaaaatggctgcttgagctactctgtgtcgttaatttgttgtttgcacataggttccactttgggcactgtctttttaagagaccaaggcacatgcacagcttttagaaagcataccaacccttgtgcctgtgtgtataccgtgggaacccttctgtaaatagagttgaagtggttgttgcaaacagcctccttgtttacagagaatacaaggccagtaagcgaatgtcagtattgtaactacagtctccacttaagcacaatgatataagtggttttgtttgaaaactacagctatgtagcacttgtgctacactgca

SEQ ID NO: 166780 - DNA, 1894 bp, Homo sapiens
  Payload ID: 12834
  Gene Symbol: PLXNC1
  Gene Name: plexin C1
  ENST ID: ENST00000549217
  CDS Start-End: 60-1310
agccaactgggatctttggttacaagtgaaggttatttgatttagctttcacttgtaaaatgacggccgtgggggtgaccaggcacaaatcgaaggagctgagtcgcaaacagagtcaacaactagaattgctggaaagcgagctccggaaagagatacgtgacggctttgctgagctgcagatggataaattggatgtggttgatagttttggaactgttcccttccttgactacaaacattttgctctgagaactttcttccctgagtcaggtggcttcacccacatcttcactgaagatatgcataacagagacgccaacgacaagaatgaaagtctcacagctttggatgccctaatctgtaataaaagctttcttgttactgtcatccacacccttgaaaagcagaagaacttttctgtgaaggacaggtgtctgtttgcctccttcctaaccattgcactgcaaaccaagctggtctacctgaccagcatcctagaggtgctgaccagggacttgatggaacagtgtagtaacatgcagccgaaactcatgctgagacgcacggagtccgtcgtcgaaaaactcctcacaaactggatgtccgtctgcctttctggatttctccgggagactgtcggagagcccttctatttgctggtgacgactctgaaccagaaaattaacaagggtcccgtggatgtaatcacttgcaaagccctgtacacacttaatgaagactggctgttgtggcaggttccggaattcagtactgtggcattaaacgtcgtctttgaaaaaatcccggaaaacgagagtgcagatgtctgtcggaatatttcagtcaatgttctcgactgtgacaccattggccaagccaaagaaaagattttccaagcattcttaagcaaaaatggctctccttatggacttcagcttaatgaaattggtcttgagcttcaaatgggcacacgacagaaagaacttctggacatcgacagttcctccgtgattcttgaagatggaatcaccaagctaaacaccattggccactatgagatatcaaatggatccactataaaagtctttaagaagatagcaaattttacttcagatgtggagtactcggatgaccactgccatttgattttaccagattcggaagcattccaagatgtgcaaggaaagagacatcgagggaagcacaagttcaaagtaaaagaaatgtatctgacaaagctgctgtcgaccaagccttcctcttcgcttctgggtaaacatcctgaagaaccctcagtttgtctttgacattaagaagacaccacatatagacggctgtttgtcagtgattgcccaggcattcatggatgcattttctctcacagagcagcaactagggaaggaagcaccaactaataagcttctctatgccaaggatatcccaacctacaaagaagaagtaaaatcttattacaaagcaatcagggatttgcctccattgtcatcctcagaaatggaagaatttttaactcaggaatctaagaaacatgaaaatgaatttaatgaagaagtggccttgacagaaatttacaaatacatcgtaaaatattttgatgaggtaagattttaaataacattgtttttaacctttgaatcaggcacaaggatgtggttatagcattctgtcagtttcagaacagctctggcatcccaaaaggccagaaagggaagccaggaagcctgtctgagatgggggatcctggcactgagccagaccctgtacatggctgccccccttacagttttatcatgctgcccacatttggaccagcctgaatttacatttgagttcatggggcctacagccaccctgactcaagttaactttgatg

SEQ ID NO: 166781 - DNA, 557 bp, Homo sapiens
  Payload ID: 12834
  Gene Symbol: PLXNC1
  Gene Name: plexin C1
  ENST ID: ENST00000550080
  CDS Start-End: 248-557
tttagctttcacttgtaaaatgagtaaggttttggtttttttctgctgcattttggcatcttcctcttcagagtgacccctcactgggaaattttcttataagatccagctttttaatgctattttctagtttcattctagctcctgctctctgtccctatctgttttgtttttgtttttgtttttaagaactgtaaagattgctatttgttttcatttttggtttttgagttaccatgtccctctgatgcagcatctctgtctcttagcggccgtgggggtgaccaggcacaaatcgaaggagctgagtcgcaaacagagtcaacaactagaattgctggaaagcgagctccggaaagagatacgtgacggctttgctgagctgcagatggataaattggatgtggttgatagttttggaactgttcccttccttgactacaaacattttgctctgagaactttcttccctgagaacagagacgccaacgacaagaatgaaagtctcacagctttggatgccctaatctgtaataaaagctttcttgttactgtca

SEQ ID NO: 166782 - DNA, 527 bp, Homo sapiens
  Payload ID: 12834
  Gene Symbol: PLXNC1
  Gene Name: plexin C1
  ENST ID: ENST00000551850
  CDS Start-End: 201-527
cccatacagtctgatgctcatggcaagagagacgtgaccaaaagctgccgtggaagtcccaaaaagaggcactactctcagcctgggaggatctgggaggcttcagagagaaagaaggggatcaacctgaaagagtccaaccaatcgcatcatctaccttgatccattccgacctgacatccgtttatggcaccgtggtaatgaacaggactgttttattcttggggactggagatggccagttacttaaggttattcttggtgagaatttgacttcaaattgtccagaggttatctatgaaattaaagaagagacacctgttttctacaaactcgttcctgatcctgtgaagaatatctacatttatctaacagctgggaaagaggtgaggagaattcgtgttgcaaactgcaataaacataaatcctgttcggagtgtttaacagccacagaccctcactgcggttggtgccattcgctacaaaggtgcacttttcaaggagattgtgtacattcagagaactta

SEQ ID NO: 166783 - DNA, 7094 bp, Homo sapiens
  Payload ID: 12835
  Gene Symbol: PLXND1
  Gene Name: plexin D1
  Uniprot ID: Q9Y4D7
  ENST ID: ENST00000324093
  CDS Start-End: 180-5957
ccgggctgcgcggcgaggctgacccgggcccgggcgccggggtcgggggcggctggcgcgggcaggaagcgcatcgcggcccgggcccgccccccgcctcccgccgcctccgggctcccggctcccggccgcgcctcgccccatgcactcgccgcgccgcgcagcccgcgcacgcccggatggctcctcgcgccgcgggcggcgcaccccttagcgcccgggccgccgccgccagccccccgccgttccagacgccgccgcggtgcccggtgccgctgctgttgctgctgctcctgggggcggcgcgggccggcgccctggagatccagcgtcggttcccctcgcccacgcccaccaacaacttcgccctggacggcgcggcggggaccgtgtacctggcggccgtcaaccgcctctatcagctgtcgggcgccaacctgagcctggaggccgaggcggccgtgggcccggtgcccgacagcccgctgtgtcacgctccgcagctgccgcaggcctcgtgcgagcacccgcggcgcctcacggacaactacaacaagatcctgcagctggaccccggccagggcctggtagtcgtgtgcgggtccatctaccagggcttctgccagctgcggcgccggggcaacatctcggccgtggccgtgcgcttcccgcccgccgcgccgcccgccgagcccgtcacggtgttccccagcatgctgaacgtggcggccaaccacccgaacgcgtccaccgtggggctagttctgcctcccgccgcgggcgcggggggcagccgcctgctcgtgggcgccacgtacaccggttacggcagctccttcttcccgcgcaaccgcagcctggaggaccaccgcttcgagaacacgcccgagatcgccatccgctccctggacacgcgcggcgacctggccaagctcttcaccttcgacctcaacccctccgacgacaacatcctcaagatcaagcagggcgccaaggagcagcacaagctgggcttcgtgagcgccttcctgcacccgtccgacccgccgccgggtgcacagtcctacgcgtacctggcgctcaacagcgaggcgcgcgcgggcgacaaggagagccaggcgcggagcctgctggcgcgcatctgcctgccccacggcgccggcggcgacgccaagaagctcaccgagtcctacatccagttgggcttgcagtgcgcgggcggcgcgggccgcggcgacctctacagccgcctggtgtcggtcttcccagcccgggagcggctctttgctgtcttcgagcggccccaggggtcccccgcggcccgcgctgctccggccgcactctgcgccttccgcttcgccgacgtgcgagccgccatccgagctgcgcgcaccgcctgcttcgtggaaccggcgcccgacgtggtggcggtgctcgacagcgtggtgcagggcacgggaccggcctgtgagcgcaagctcaacatccagctccagccagagcagctggactgtggagctgctcacctgcagcacccgctgtccatcctgcagcccctgaaggccacgcccgtgttccgcgccccgggcctcacctccgtggccgtggccagcgtcaacaactacacagcggtcttcctgggcacggtcaacgggaggcttctcaagatcaacctgaacgagagcatgcaggtggtgagcaggcgggtggtgactgtggcctatggggagcccgtgcaccatgtcatgcagtttgacccagcagactccggttacctttacctgatgacgtcccaccagatggccagggtgaaggtcgccgcctgcaacgtgcactccacctgtggggactgcgtgggtgcggcggacgcctactgcggctggtgtgccctggagacgcggtgcaccttgcagcaggactgcaccaattccagccagcagcatttctggaccagtgccagcgagggccccagccgctgtcctgccatgaccgtcctgccttccgagatcgatgtgcgccaggagtacccaggcatgatcctgcagatctcgggcagcctgcccagcctcagtggcatggagatggcctgtgactatgggaacaacatccgcactgtggctcgggtcccaggccctgcctttggtcaccagattgcctactgcaacctcctgccgagggaccagtttccgcccttcccccccaaccaggaccacgtgactgttgagatgtctgtgagggtcaatgggcggaacatcgtcaaggccaatttcaccatctacgactgcagccgcactgcacaagtgtacccccacacagcctgtaccagctgcctgtcggcacagtggccctgtttctggtgcagccagcagcactcctgtgtttccaaccagtctcggtgcgaggcctcaccaaaccccacgagccctcaggactgcccccggaccctgctctcacccctggcacccgtgcctacgggtggctcccagaacatcctggtgcctctggccaacactgcctttttccagggtgcagccctggagtgtagttttgggctggaggagatcttcgaggctgtgtgggtgaatgagtctgttgtacgctgtgaccaggtggtgctgcacacgacccggaagagccaggtgttcccgctcagcctccaactaaaggggcggccagcccgattcctggacagccctgagcccatgacagtcatggtctataactgtgccatgggcagccccgactgttcccagtgcctgggccgcgaagacctgggtcacctgtgcatgtggagtgatggctgccgcctgcgggggcctctgcagcccatggctggcacctgccccgcccccgagatccacgcgattgagcccctgagtggcccgttggacggtgggaccctgctgaccatccgaggaaggaacctgggccggcggctcagtgacgtggcccacggcgtgtggattggtggtgtggcctgtgagccactgcctgacagatacacggtgtcggaggagatcgtgtgtgtcacagggccagccccaggaccactctcaggtgtggtgaccgtgaacgcctctaaggagggcaagtcccgggaccgcttctcctacgtgctgcccctggtccactccctggagcctaccatgggccccaaggccgggggcaccaggatcaccatccatgggaatgacctccatgtaggctccgagctccaggtcctggtgaacgacacagacccctgcacggagctgatgcgcacagataccagcatcgcctgcaccatgcctgagggggccctgccggctccggtgcctgtgtgtgtgcgcttcgagcgtcggggctgcgtgcacggcaacctcaccttctggtacatgcagaacccggtcatcacggccatcagtccccgccgcagccctgtcagtggcggcaggaccatcacagtggctggtgagcgtttccacatggtgcagaatgtgtccatggccgtccaccacattggccgggagcccacgctctgcaaggttctcaactccaccctcatcacctgcccgtcccccggggccctgagcaacgcatcagcgccagtggacttcttcatcaatgggcgggcctacgcagacgaggtggctgtggctgaggagctactggaccccgaggaggcacagcggggcagcaggttccgcctggactacctccccaacccacagttctctacggccaagagggagaagtggatcaagcaccaccccggggagcctctcaccctcgttatccacaaggagcaggacagcctggggctccagagtcacgagtaccgggtcaagataggccaagtaagctgcgacatccagattgtctctgacagaatcatccactgctcggtcaacgagtccctgggcgcggccgtggggcagctgcccatcacaatccaggtagggaacttcaaccagaccatcgccacactgcagctggggggcagcgagacggccatcatcgtgtccatcgtcatctgcagcgtcctgctgctgctctccgtggtggccctgttcgtcttctgtaccaagagccgacgtgctgagcgttactggcagaagacgctgctgcagatggaggagatggaatctcagatccgagaggaaatccgcaaaggcttcgctgagctgcagacagacatgacagatctcaccaaggagctgaaccgcagccagggcatccccttcctggagtataagcacttcgtgacccgcaccttcttccccaagtgttcctccctttatgaagagcgttacgtgctgccctcccagaccctcaactcccagggcagctcccaggcacaggaaacccacccactgctgggagagtggaagattcctgagagctgccggcccaacatggaagagggaattagcttgttctcctcactactcaacaacaagcacttcctcatcgtctttgtccacgcgctggagcagcagaaggactttgcggtgcgcgacaggtgcagcctggcctcgctgctgaccatcgcgctgcacggcaagctggagtactacaccagcatcatgaaggagctgctggtggacctcattgacgcctcggccgccaagaaccccaagctcatgctgcggcgcacagagtctgtggtggagaagatgctcaccaactggatgtccatctgcatgtacagctgtctgcgggagacggtgggggagccattcttcctgctgctgtgtgccatcaagcagcaaatcaacaagggctccatcgacgccatcacaggcaaggcccgctacacactcagtgaggagtggctgctgcgggagaacatcgaggccaagccccggaacctgaacgtgtccttccagggctgtggcatggactcgctgagcgtgcgggccatggacaccgacacgctgacacaggtcaaggagaagatcctggaggccttctgcaagaatgtgccctactcccagtggccgcgtgcagaggacgtcgaccttgagtggttcgcctccagcacacagagctacatccttcgggacctggacgacacctcagtggtggaagacggccgcaagaagcttaacacgctggcccattacaagatccctgaaggtgcctccctggccatgagtctcatagacaagaaggacaacacactgggccgagtgaaagacttggacacagagaagtatttccatttggtgctgcctacggacgagctggcggagcccaagaagtctcaccggcagagccatcgcaagaaggtgctcccggaaatctacctgacccgcctgctctccaccaagggcacgttgcagaagtttctggatgacctgttcaaggccattctgagtatccgtgaagacaagcccccactggctgtcaagtactttttcgacttcctggaggagcaggctgagaagaggggaatctccgaccccgacaccctacacatctggaagaccaacagccttcctctccggttctgggtgaacatcctgaagaacccccagtttgtctttgacatcgacaagacagaccacatcgacgcctgcctttcagtcatcgcgcaggccttcatcgacgcctgctccatctctgacctgcagctgggcaaggattcgccaaccaacaagctcctctacgccaaggagattcctgagtaccggaagatcgtgcagcgctactacaagcagatccaggacatgacgccgctcagcgagcaagagatgaatgcccatctggccgaggagtcgaggaaataccagaatgagttcaacaccaatgtggccatggcagagatttataagtacgccaagaggtatcggccgcagatcatggccgcgctggaggccaaccccacggcccggaggacacaactgcagcacaagtttgagcaggtggtggctttgatggaggacaacatctacgagtgctacagtgaggcctgagacacatggagagttggtcaggctgctgctgggagaaatggacgcccactgggcctcaacttgatcttctaccccgtgcctgtgactcagactgggaaatactgagcagagacggctggggcgggggcaggaggaggggctgctctctgagacaggggcgcccccgccttgacccctgggcacctccatcccctcccacctgtccccagatcagtctctgggatggaggccagagagctggtcaggctcccccatctgcccagcacggcctgcactgtgcccacccacttgctccacaacgtccagttggtcctgctgccaagagccccgtgcatccaggcggccaagcacaaactgggggagaggaggccgccagcccggaggctgcagcccagaaactctacctcatccacactggtgcagggagccctccttgaactgacctttgattggtttctgcttcaactaccaaaatgttatctccacttccccctcacccgtagaggatcctggccacagacagtttcaagtagtgtcagatttttgttgcttgggcggctgttggtagagtgggcagtgcccgcgccatggggtgctctgtgggcttctccaggagcagggagggtggaggggagggatggggggcacaggagctgggagccccgtctccaggaaaaggagaggggttaagatgcaccgaggctgtagctgggctacttgatcttgctgaaagtgtttctaaagatagcaccacttttttttttaaagcttttatatattaaaaaacgtatcatgcaccaactgtgaatagctgccgcttgcgcagaggacccggggaggggtcccgagaggctccccatgcaacactggaaatgactgttccagagagcgggcagacctggcagagcgcccctggcgcctgagactaccacccactccgttcctgccagaaacgaccctctgtggccgatgggccatgcgggcccctcgcagccaactcagccagtgttgggactggctcagagcccatgggggctggaggggggcagctgggactctggaatcttctttataataaaagccttacggacaaacctactgtgggctccagcctttgtcctgagatagccaagcggg

SEQ ID NO: 166784 - DNA, 477 bp, Homo sapiens
  Payload ID: 12835
  Gene Symbol: PLXND1
  Gene Name: plexin D1
  ENST ID: ENST00000505665
  CDS Start-End: 1-338
ggcgggtggtgactgtggcctatggggagcccgtgcaccatgtcatgcagtttgacccagcagactccggttacctttacctgatgacgtcccaccagatggccagggtgaaggtcgccgcctgcaacgtgcactccacctgtggggactgcgtgggtgcggcggacgcctactgcggctggtgtgccctggagacgcggtgcaccttgcagcaggactgcaccaattccagccagcagcatttctggaccagtgccagcgagggccccagccgctgtcctgccatgaccgtcctgccttccgagatcgatgtgcgccaggagtacccaaccacgtgactgttgagatgtctgtgagggtcaatgggcggaacatcgtcaaggccaatttcaccatctacgactgcagccgcactgcacaagtgtacccccacacagcctgtaccagctgcctgtcggcacagtggccctgtttctg

SEQ ID NO: 166785 - DNA, 546 bp, Homo sapiens
  Payload ID: 12835
  Gene Symbol: PLXND1
  Gene Name: plexin D1
  ENST ID: ENST00000504689
  CDS Start-End: 88-255
gattcgccaaccaacaagctcctctacgccaaggagattcctgagtaccggaagatcgtgcagcgctactacaagcagatccaggacatgacgccgctcagcgagcaagagatgaatgcccatctggccgaggagtcgaggaaataccagaatgagttcaacaccaatgtggccatggcagagatttataagtacgccaagaggtatcggccgcagcttttatatattaaaaaacgtatcatgcaccaactgtgaatagctgccgcttgcgcagaggacccggggaggggtcccgagaggctccccatgcaacactggaaatgactgttccagagagcgggcagacctggcagagcgcccctggcgcctgagactaccacccactccgttcctgccagaaacgaccctctgtggccgatgggccatgcgggcccctcgcagccaactcagccagtgttgggactggctcagagcccatgggggctggaggggggcagctgggactctggaatcttctttataataaaagccttacggacaaaccta

SEQ ID NO: 166786 - DNA, 507 bp, Homo sapiens
  Payload ID: 12835
  Gene Symbol: PLXND1
  Gene Name: plexin D1
  ENST ID: ENST00000505237
  CDS Start-End: 1-507
ctccagccagagcagctggactgtggagctgctcacctgcagcacccgctgtccatcctgcagcccctgaaggccacgcccgtgttccgcgccccgggcctcacctccgtggccgtggccagcgtcaacaactacacagcggtcttcctgggcacggtcaacgggaggcttctcaagatcaacctgaacgagagcatgcaggtggtgagcaggcgggtggtgactgtggcctatggggagcccgtgcaccatgtcatgcagtttgacccagcagactccggttacctttacctgatgacgtcccaccagatggccagggtgaaggtcgccgcctgcaacgtgcactccacctgtggggactgcgtgggtgcggcggacgcctactgcggctggtgtgccctggagacgcgccagcagcatttctggaccagtgccagcgagggccccagccgctgtcctgccatgaccgtcctgccttccgagatcgatgtgcgccaggagtaccca

SEQ ID NO: 166787 - DNA, 2662 bp, Homo sapiens
  Payload ID: 12835
  Gene Symbol: PLXND1
  Gene Name: plexin D1
  ENST ID: ENST00000512744
  CDS Start-End: 1-1141
ggaagagggaattagcttgttctcctcactactcaacaacaagcacttcctcatcgtctttgtccacgcgctggagcagcagaaggactttgcggtgcgcgacaggtgcagcctggcctcgctgctgaccatcgcgctgcacggcaagctggagtactacaccagcatcatgaaggagctgctggtggacctcattgacgcctcggccgccaagaaccccaagctcatgctgcggcgcacagagtctgtggtggagaagatgctcaccaactggatgtccatctgcatgtacagctgtctgcgggagacggtgggggagccattcttcctgctgctgtgtgccatcaagcagcaaatcaacaagggctccatcgacgccatcacaggcaaggcccgctacacactcagtgaggagtggctgctgcgggagaacatcgaggccaagccccggaacctgaacgtgtccttccagggctgtggcatggactcgctgagcgtgcgggccatggacaccgacacgctgacacaggtcaaggagaagatcctggaggccttctgcaagaatgtgccctactcccagtggccgcgtgcagaggacgtcgaccttgagtggttcgcctccagcacacagagctacatccttcgggacctggacgacacctcagtggtggaagacggccgcaagaagcttaacacgctggcccattacaagatccctgaaggtgcctccctggccatgagtctcatagacaagaaggacaacacactgggccgagtgaaagacttggacacagagaagtatttccatttggtgctgcctacggacgagctggcggagcccaagaagtctcaccggcagagccatcgcaagaaggtgctcccggaaatctacctgacccgcctgctctccaccaagggcacgttgcagaagtttctggatgacctgttcaaggccattctgagtatccgtgaagacaagcccccactggctgtcaagtactttttcgacttcctggaggagcaggctgagaagaggggaatctccgaccccgacaccctacacatctggaagaccaacaggtggcggccttcctctccggttctgggtgaacatcctgaagaacccccagtttgtctttgacatcgacaagacagaccacatcgacgcctgcctttcagtcatcgcgcaggccttcatcgacgcctgctccatctctgacctgcagctgggcaaggattcgccaaccaacaagctcctctacgccaaggagattcctgagtaccggaagatcgtgcagcgctactacaagcagatccaggacatgacgccgctcagcgagcaagagatgaatgcccatctggccgaggagtcgaggaaataccagaatgagttcaacaccaatgtggccatggcagagatttataagtacgccaagaggtatcggccgcagatcatggccgcgctggaggccaaccccacggcccggaggacacaactgcagcacaagtttgagcaggtggtggctttgatggaggacaacatctacgagtgctacagtgaggcctgagacacatggagagttggtcaggctgctgctgggagaaatggacgcccactgggcctcaacttgatcttctaccccgtgcctgtgactcagactgggaaatactgagcagagacggctggggcgggggcaggaggaggggctgctctctgagacaggggcgcccccgccttgacccctgggcacctccatcccctcccacctgtccccagatcagtctctgggatggaggccagagagctggtcaggctcccccatctgcccagcacggcctgcactgtgcccacccacttgctccacaacgtccagttggtcctgctgccaagagccccgtgcatccaggcggccaagcacaaactgggggagaggaggccgccagcccggaggctgcagcccagaaactctacctcatccacactggtgcagggagccctccttgaactgacctttgattggtttctgcttcaactaccaaaatgttatctccacttccccctcacccgtagaggatcctggccacagacagtttcaagtagtgtcagatttttgttgcttgggcggctgttggtagagtgggcagtgcccgcgccatggggtgctctgtgggcttctccaggagcagggagggtggaggggagggatggggggcacaggagctgggagccccgtctccaggaaaaggagaggggttaagatgcaccgaggctgtagctgggctacttgatcttgctgaaagtgtttctaaagatagcaccacttttttttttaaagcttttatatattaaaaaacgtatcatgcaccaactgtgaatagctgccgcttgcgcagaggacccggggaggggtcccgagaggctccccatgcaacactggaaatgactgttccagagagcgggcagacctggcagagcgcccctggcgcctgagactaccacccactccgttcctgccagaaacgaccctctgtggccgatgggccatgcgggcccctcgcagccaactcagccagtgttgggactggctcagagcccatgggggctggaggggggcagctgggactctggaatcttctttataataaaagccttacggacaaa

SEQ ID NO: 166788 - DNA, 691 bp, Homo sapiens
  Payload ID: 12835
  Gene Symbol: PLXND1
  Gene Name: plexin D1
  ENST ID: ENST00000506979
  CDS Start-End: 1-691
gtccctccatcccgggtcactgttgaaagacttggacacagagaagtatttccatttggtgctgcctacggacgagctggcggagcccaagaagtctcaccggcagagccatcgcaagaaggtgctcccggaaatctacctgacccgcctgctctccaccaagggcacgttgcagaagtttctggatgacctgttcaaggccattctgagtatccgtgaagacaagcccccactggctgtcaagtactttttcgacttcctggaggagcaggctgagaagaggggaatctccgaccccgacaccctacacatctggaagaccaacagccttcctctccggttctgggtgaacatcctgaagaacccccagtttgtctttgacatcgacaagacagaccacatcgacgcctgcctttcagtcatcgcgcaggccttcatcgacgcctgctccatctctgacctgcagctgggcaaggattcgccaaccaacaagctcctctacgccaaggagattcctgagtaccggaagatcgtgcagcgctactacaagcagatccaggacatgacgccgctcagcgagcaagagatgaatgcccatctggccgaggagtcgaggaaataccagaatgagttcaacaccaatgtggccatggcagagatttataagtacgccaagaggtatcggccgcag

SEQ ID NO: 166789 - DNA, 6252 bp, Homo sapiens
  Payload ID: 12836
  Gene Symbol: PLXDC1
  Gene Name: plexin domain containing 1
  Uniprot ID: Q8IUK5
  ENST ID: ENST00000315392
  CDS Start-End: 213-1715
agctccccgcctgctcccggaggccgcagcctccagctccgctcgcgctctcgccgctcctgccggctcgcccggccccgcgctccgccgtctcctcgccgcccgcccctccgccagccccggggaccgcgcggccgcagcctgagccagggccccctccctcgtcaggaccggggcagcaagcaggccgggggcaggtccgggcacccaccatgcgaggcgagctctggctcctggtgctggtgctcagggaggctgcccgggcgctgagcccccagcccggagcaggtcacgatgagggcccaggctctggatgggctgccaaagggaccgtgcggggctggaaccggagagcccgagagagccctgggcatgtgtcagagccggacaggacccagctgagccaggacctgggtgggggcaccctggccatggacacgctgccagataacaggaccagggtggtggaggacaaccacagctattatgtgtcccgtctctatggccccagcgagccccacagccgggaactgtgggtagatgtggccgaggccaaccggagccaagtgaagatccacacaatactctccaacacccaccggcaggcttcgagagtggtcttgtcctttgatttccctttctacgggcatcctctgcggcagatcaccatagcaactggaggcttcatcttcatgggggacgtgatccatcggatgctcacagctactcagtatgtggcgcccctgatggccaacttcaaccctggctactccgacaactccacagttgtttactttgacaatgggacagtctttgtggttcagtgggaccacgtttatctccaaggctgggaagacaagggcagtttcaccttccaggcagctctgcaccatgacggccgcattgtctttgcctataaagagatccctatgtctgtcccggaaatcagctcctcccagcatcctgtcaaaaccggcctatcggatgccttcatgattctcaatccatccccggatgtgccagaatctcggcgaaggagcatctttgaatatcaccgcatagagctggaccccagcaaggtcaccagcatgtcggccgtggagttcaccccattgccgacctgcctgcagcataggagctgtgacgcctgcatgtcctcagacctgaccttcaactgcagctggtgccatgtcctccagagatgctccagtggctttgaccgctatcgccaggagtggatggactatggctgtgcacaggaggcagagggcaggatgtgcgaggacttccaggatgaggaccacgactcagcctcccctgacacttccttcagcccctatgatggagacctcaccactacctcctcctccctcttcatcgacagcctcaccacagaagatgacaccaagttgaatccctatgcaggaggagacggccttcagaacaacctgtcccccaagacaaagggcactcctgtgcacctgggcaccatcgtgggcatcgtgctggcagtcctcctcgtggcggccatcatcctggctggaatttacatcaatggccaccccacatccaatgctgcgctcttcttcatcgagcgtagacctcaccactggccagccatgaagtttcgcagccaccctgaccattccacctatgcggaggtggagccctcgggccatgagaaggagggcttcatggaggctgagcagtgctgagaacaccaagtctcccctttgaagactttgaggccacagaaaagacagttaaagcaaagaagagaagtgacttttcctggcctctcccagcatgccctgggctgagatgagatggtggtttatggctccagagctgctgctcgcttcgtcagcacaccccgaatattgaagagggggccaaaaaacaaccacatggattttttataggaacaacaacctaatctcatcctgttttgatgcaagggttctcttctgtgtcttgtaaccatgaaacagcagaagaactaacataactaactccatttttgtttaaggggcctttacctattcctgcacctaggctaggataactttagagcactgacataaaacgcaaaaacaggaatcatgccgtttgcaaaactaactctgggattaaaggggaagcatgtaaacagctaactgtttttgttaaagatttataggaatgaggaggtttggctattgtcacatgacagactgttagccaaggacaaagaagttctgcaaacctcccctggacccttgctggtgtccagatgtctgcggttgtcagccccttcctttcccccgacctaaacataaaagacaaggcaaagcccgcataattttaagacggttctttaggacattagtccaccatcttcttggtttgctggctctccgaaataaagtccctttccttgctccaactccttgtctctcaacgtattggctatgacgcagcaagcagaatgaatttggactcagttacaggctgtcaatggtctgctctgtagcagtctcagagcctccccgacccactacctggagatagccagatagccagatgccctgctcctggccacctttaaagcccctgcatatgacacaggttaactaaagtcaagattggggctgctgcattccaggttccctagactcacaagctggtccttggccaggtgcagtggctcacgcctgtaatcccagcactttgggaggctgaggcaggcggatcacctgaagtcagaagtttgagaccagcctggccaacataattaaaatgtctctactaaaaatacaaaaaattagctgggtgtggtgacgcttgcctgtatcccagctactcaggaagctgagacacgagaatcacttgaacctgggaggcagaggttgcagtgagctcagatagtgccactgcactccagcctgggtgacagagcgagactccgtctcaaaaaaaaaaaaagaaagcagatcctcatggctatagagttggcattttagccccagcttctgtagctctgaaagcctaaagaaggtattctctccatctgttaaacacagtatagtggctctcagcccttggggcatgttatcatgggagggaagtcaaataagaggagagaaaagaactcaagggggaaactgcatttttaggctttgctctcttaccttgccctttctactcagaaccaataacttctgcatcaaaacatgttacagcctgcatcaagggctttaccccaacctgcagcccagccttccctgggtgagcttgctatgcgcagccacatttaccatgtggggctccctattctgatggcctgttcggtgccgggtttactcactgccctgttctgatgtcagtgcctgtacatacctccaaaggcaggacttgcctgataaatatttttcctcctctgaactggattttataggcattaaagacaagtcgggtggctagagggctccttgagacatacctagcagggaactgcaggtggattctgttgagaggcaaagcacctgagtggttgggacacaggcagctggcatgggagggactttttttgagacagggtctcactgtgtcgcccagggcaaggatgcccaaagacaccaggttggagaggcacctgccaactacttgctttccctggagcctgcatgtgcctgtggggtggggaggcgtaggggtctacggctgcctgagatgggtgtgcacagtgtgtgaagtacctacctccttgccttgctggactgtcagccagtcgcagggccggccacaagacccatgtctccatctggtcatactccatagctaccaagttaacctgctctaaactttggagaactggatctgtccaataaacgcttatttggccaagcctgatggctcgtgcctgtactcccagcactttgggaggctgaggtgggagggttgcttgagcccaggggtttgagaccagcttgggcaacaacaacaaaaatgccaggtgtggtggggtgcacctgtagtcccagctactagggaggctgagccaggaggatcacttgagcccgggaggttgaggctgcagtggggggtcataatcatgccactgtactccagcctgggtgacagagtgagaccctgtctccgaaaaaaaaaaaaaaaaaaagaacggaaaaagaaatgcttacattgtcagggatcctgtagacaatcattaactctatgagatgcttggttctatttttttgggagactttgtccaagtgttttggcttaagaaatccataggcctctcttggtgacacatctctagtactttttgtcataaacaaacaggccatctgccgccaaatacatccactccccatgccactgacatcctatgggtcagccaggcttgctttgactgaggccgaggcatctggaactttctctgcctgcaggggctagcagcagaggcttcaccgcatcaccaccccttcctccactcctgacattctttcccttcagggatccaaaatggttggccgagctcccagtgggaaaacgtgtgctagagttggggagtgagatgagtggtgctgtccatggaatcaggccacagcaggaactgccccactggccatttgagacacacacaggtggtaaatgctctgctggtgggctgtgcttccctcattcagagagctctgttacagcccactgtgtcctttagaagcttgaaaggaacccaactctttgctgcactgtcctttttcttcctcaaattcagaccctccttccaccggcacccccctactccaccctcagctcttccttgcctggtttatcaagcagagctgaggccccacgtttccaactctgattgtcacttgcatcttcacaaaggataaaccacggagcaactggaaaaccatcagccaagcgttcggatgagtctggttattggtccacccccgaccagattcccttacacttaactcacttctttctttggcaatgaccctcatgacatgtataaatgggtatgactaagaagaggctgtgatctaacatttatttgctgccattttttactctggggagaagcagccccaactcatcactgggaaagaactccccctgcaaaccagctaaatttgataatttaaaccccctgcccctaaaacttctcacagagctggggagttggtggcaactttccaagtcaaggtcttgcttagaaagtccttcactacatggccaggtgcagtggctcacgcctgtagtcccaggtacttgggagcctgaggcaggaggattgcttgagctcaggagttcaaggctgcagagagctatgatcatcccactgcatttgtttaaaaataaatttttaaaatttgtgtgttttatcaggggtctcctgtacagtgtatctgtgtatgtttgtgtgtgtgtttgtatacagccttgtttaatgttttgagcaataagatatgcacacacaggtattttgttgctaaagagattggacaaggttgtagctgtgctcaggcttcagcttggtttgttaaattgagagataaacaatgacaagagctgccagccaaccacactattcaaaaagcaaagtgttcaccactaaagctaaccattcatctggttgcaggcaaggctaaggctctctctcctctagttcctggaacagactcacagattggcatgaagcactgatcaggggctgcactcagactccctggccaagcaaacctacaccagaagagtcagtgtcacagatatgatgcggccaatctctgtctccaaaaacctacctgaacttaatggtagaattcaaagatctggggactgagggcacccagccttctaaaacacaatgtattcatgtgtttagtgtaaactctctgcatggattctcagtgttaataataaaaggaagcattcttttacaactcctgctgtgtgcaaaagaaagtgcaaaggatttggagtggcattccgaagatcaccacacataccttggttctgatggctgctgaactccgacttcttcgctgagacatgactgtgggaacagcctccagctatctgctcatcagaggtgctttcctcaacctcctgcaccacctccaagagaaacagcctaaaaagaaaccccagctgtttacttatattggtctgtaaatccctggaagtaaaccccatgcatttttatctactgtctgaggacatacaataaatctgagaaagtctatgctgtca

SEQ ID NO: 166790 - DNA, 876 bp, Homo sapiens
  Payload ID: 12836
  Gene Symbol: PLXDC1
  Gene Name: plexin domain containing 1
  ENST ID: ENST00000441877
  CDS Start-End: 211-876
ccaggatgccccctcaccccgtctcccactctccagcgccccagctccttgccgtcacaagaacgaagtcacgatgagggcccaggctctggatgggctgccaaagggaccgtgcggggctggaaccggagagcccgagagagccctgggcatgtgtcagagccggacaggacccagctgagccaggacctgggtgggggcaccctggccatggacacgctgccagataacaggaccagggtggtggaggacaaccacagctattatgtgtcccgtctctatggccccagcgagccccacagccgggaactgtgggtagatgtggccgaggccaaccggagccaagtgaagatccacacaatactctccaacacccaccggcaggcttcgagagtggtcttgtcctttgatttccctttctacgggcatcctctgcggcagatcaccatagcaactggaggcttcatcttcatgggggacgtgatccatcggatgctcacagctactcagtatgtggcgcccctgatggccaacttcaaccctggctactccgacaactccacagttgtttactttgacaatgggacagtctttgtggttcagtgggaccacgtttatctccaaggctgggaagacaagggcagtttcaccttccaggcagctctgcaccatgacggccgcattgtctttgcctataaagagatccctatgtctgtcccggaaatcagctcctcccagcatcctgtcaaaaccggcctatcggatgccttcatgattctcaatccatccccggatgtgccagaatctcggcgaaggagcatctttgaatatcaccgcatagagctggaccccagcaaggtcaccagcatgtcggcc

SEQ ID NO: 166791 - DNA, 2082 bp, Homo sapiens
  Payload ID: 12836
  Gene Symbol: PLXDC1
  Gene Name: plexin domain containing 1
  ENST ID: ENST00000444911
  CDS Start-End: 20-1402
ctcctggaaaatttctccaatggcgctcagcgttcgcacccttcctctccgcggttttctagtccctaggccccagcccactagaagccaggatgccccctcaccccgtctcccactctccagcgccccagctccttgccgtcacaagaacgaagaggacaaccacagctattatgtgtcccgtctctatggccccagcgagccccacagccgggaactgtgggtagatgtggccgaggccaaccggagccaagtgaagatccacacaatactctccaacacccaccggcaggcttcgagagtggtcttgtcctttgatttccctttctacgggcatcctctgcggcagatcaccatagcaactggaggcttcatcttcatgggggacgtgatccatcggatgctcacagctactcagtatgtggcgcccctgatggccaacttcaaccctggctactccgacaactccacagttgtttactttgacaatgggacagtctttgtggttcagtgggaccacgtttatctccaaggctgggaagacaagggcagtttcaccttccaggcagctctgcaccatgacggccgcattgtctttgcctataaagagatccctatgtctgtcccggaaatcagctcctcccagcatcctgtcaaaaccggcctatcggatgccttcatgattctcaatccatccccggatgtgccagaatctcggcgaaggagcatctttgaatatcaccgcatagagctggaccccagcaaggtcaccagcatgtcggccgtggagttcaccccattgccgacctgcctgcagcataggagctgtgacgcctgcatgtcctcagacctgaccttcaactgcagctggtgccatgtcctccagagatgctccagtggctttgaccgctatcgccaggagtggatggactatggctgtgcacaggaggcagagggcaggatgtgcgaggacttccaggatgaggaccacgactcagcctcccctgacacttccttcagcccctatgatggagacctcaccactacctcctcctccctcttcatcgacagcctcaccacagaagatgacaccaagttgaatccctatgcaggaggagacggccttcagaacaacctgtcccccaagacaaagggcactcctgtgcacctgggcaccatcgtgggcatcgtgctggcagtcctcctcgtggcggccatcatcctggctggaatttacatcaatggccaccccacatccaatgctgcgctcttcttcatcgagcgtagacctcaccactggccagccatgaagtttcgcagccaccctgaccattccacctatgcggaggtggagccctcgggccatgagaaggagggcttcatggaggctgagcagtgctgagaacaccaagtctcccctttgaagactttgaggccacagaaaagacagttaaagcaaagaagagaagtgacttttcctggcctctcccagcatgccctgggctgagatgagatggtggtttatggctccagagctgctgctcgcttcgtcagcacaccccgaatattgaagagggggccaaaaaacaaccacatggattttttataggaacaacaacctaatctcatcctgttttgatgcaagggttctcttctgtgtcttgtaaccatgaaacagcagaagaactaacataactaactccatttttgtttaaggggcctttacctattcctgcacctaggctaggataactttagagcactgacataaaacgcaaaaacaggaatcatgccgtttgcaaaactaactctgggattaaaggggaagcatgtaaacagctaactgtttttgttaaagatttataggaatgaggaggtttggctattgtcacatgacagactgttagccaaggacaaagaagttctgcaaacctcccctggacccttgctggtgtccagatgtctgcggttgtcagccccttcctttcccccgacctaaacataaaagacaaggcaaagcccgcataattttaagacggttctttaggacattagtccaccatcttcttggtttgctggctc

SEQ ID NO: 166792 - DNA, 619 bp, Homo sapiens
  Payload ID: 12836
  Gene Symbol: PLXDC1
  Gene Name: plexin domain containing 1
  ENST ID: ENST00000415163
  CDS Start-End: 247-619
cagctccttgccgtcacaagaacgaagtaggtcaggggagggaagaggcatcttcgtgtcctgacctgattccttgccgtctattaaatatcctacattgcgggtcacgatgagggcccaggctctggatgggctgccaaagggaccgtgcggggctggaaccggagagcccgagagagccctgggcatgtgtcagagccggacaggacccagctgagccaggacctgggtgggggcaccctggccatggacacgctgccagataacaggaccagggtggtggaggacaaccacagctattatgtgtcccgtctctatggccccagcgagccccacagccgggaactgtgggtagatgtggccgaggccaaccggagccaagtgaagatccacacaatactctccaacacccaccggcaggcttcgagagtggtcttgtcctttgatttccctttctacgggcatcctctgcggcagatcaccatagcaactggaggcttcatcttcatgggggacgtgatccatcggatgctcacagctactcagtatgtggcgcccctgatggccaacttcaaccctggctactccgacaactccacagttgtttactttgacaatg

SEQ ID NO: 166793 - DNA, 2859 bp, Homo sapiens
  Payload ID: 12836
  Gene Symbol: PLXDC1
  Gene Name: plexin domain containing 1
  Uniprot ID: Q8IUK5
  ENST ID: ENST00000578390
  CDS Start-End: 83-1096
gcggccgcagcctgagccagggccccctccctcgtcaggaccggggcagcaagcaggccgggggcaggtccgggcacccaccatgcgaggcgagctctggctcctggtgctggtgctcagggaggctgcccgggcgctgagcccccagcccggagcaggtcacgatgagggcccaggctctggatgggctgccaaagggaccgtgcggggctggaaccggagagcccgagagagccctgggcatgtgtcagagccggacaggacccagctgagccaggacctgggtgggggcaccctggccatggacacgctgccagataacaggaccagggtggtggaggacaaccacagctattatgtgtcccgtctctatggccccagcgagccccacagccgggaactgtgggtagatgtggccgaggccaaccggagccaagtgaagatccacacaatactctccaacacccaccggcaggcttcgagagtggtcttgtcctttgatttccctttctacgggcatcctctgcggcagatcaccatagcaactggaggcttcatcttcatgggggacgtgatccatcggatgctcacagctactcagtatgtggcgcccctgatggccaacttcaaccctggctactccgacaactccacagttgtttactttgacaatgggacagtctttgtggttcagtgggaccacgtttatctccaaggctgggaagacaagggcagtttcaccttccaggcagctctgcaccatgacggccgcattgtctttgcctataaagagatccctatgtctgtcccggaaatcagctcctcccagcatcctgtcaaaaccggcctatcggatgccttcatgattctcaatccatccccggatgtgccagaatctcggcgaaggagcatctttgaatatcaccgcatagagctggaccccagcaaggtcaccagcatgtcggccgtggagttcaccccattgccgacctgcctgcagcataggagctgtgacgcctgcatgtcctcagacctgaccttcaactgcagctggtgccatgtcctccagagtagagatgaggtttcaccgtgttagccaggacagtctcgatctcctgacctcatgatccgcccgcctcggcctcccaaagtactgggattacaggcgtgagccaccacgcccagccgcaagaagcatttttacaaagcattcagcatccttcgcatgagactcacagagcctcagaaagaatatgtaggatagaccccaggtccctcaacaaccaggatgaaaacacgtatgtgaattgcctggattctcagcagtgtcacggcagctcagagtcaaggcgaccttgaggatcactggagctcatgcagtcctgctagcccctacacctactcacatgggcagatgtggccttggtcctggggagctgggtgggaaggaaggcagggatgccacaaataccttcatcttccggggaagtagagggaatgggagtgcctgactacctcagcctggggaccttggctcctcttctcactatcagcagagagctgttactgaacagtgaaaggggaaggcttctttgtcaatcccatcataactctgtccttttggtcctcctgcagatgctccagtggctttgaccgctatcgccaggagtggatggactatggctgtgcacaggaggcagagggcaggatgtgcgaggacttccaggatgaggaccacgactcagcctcccctgacacttccttcagcccctatgatggagacctcaccactacctcctcctccctcttcatcgacagcctcaccacagaagatgacaccaagttgaatccctatgcaggaggagacggccttcagaacaacctgtcccccaagacaaagggcactcctgtgcacctgggcaccatcgtgggcatcgtgctggcagtcctcctcgtggcggccatcatcctggctggaatttacatcaatggccaccccacatccaatgctgcgctcttcttcatcgagcgtagacctcaccactggccagccatgaagtttcgcagccaccctgaccattccacctatgcggaggtggagccctcgggccatgagaaggagggcttcatggaggctgagcagtgctgagaacaccaagtctcccctttgaagactttgaggccacagaaaagacagttaaagcaaagaagagaagtgacttttcctggcctctcccagcatgccctgggctgagatgagatggtggtttatggctccagagctgctgctcgcttcgtcagcacaccccgaatattgaagagggggccaaaaaacaaccacatggattttttataggaacaacaacctaatctcatcctgttttgatgcaagggttctcttctgtgtcttgtaaccatgaaacagcagaagaactaacataactaactccatttttgtttaaggggcctttacctattcctgcacctaggctaggataactttagagcactgacataaaacgcaaaaacaggaatcatgccgtttgcaaaactaactctgggattaaaggggaagcatgtaaacagctaactgtttttgttaaagatttataggaatgaggaggtttggctattgtcacatgacagactgttagccaaggacaaagaagttctgcaaacctcccctggacccttgctggtgtccagatgtctgcggttgtcagccccttcctttcccccgacctaaacataaaagacaaggcaaagcccgcataattttaagacggttctttaggacattagtccaccatcttcttggtttgctggctctccgaaataaagtccctttccttgctccaa

SEQ ID NO: 166794 - DNA, 1039 bp, Homo sapiens
  Payload ID: 12836
  Gene Symbol: PLXDC1
  Gene Name: plexin domain containing 1
  ENST ID: ENST00000578808
  CDS Start-End: 253-552
gctgcagctggaggtagctgcctatctgattctgtttgagagtccgccaagttgggatttaaattagacatcaagaagaatttacagaccggccttgccttgttccacggtcacgatgagggcccaggctctggatgggctgccaaagggaccgtgcggggctggaaccggagagcccgagagagccctgggcatgtgtcagagccggacaggacccagctgagccaggacctgggtgggggcaccctggccatggacacgctgccagataacaggaccagggtggtggtgtgggaagggaccggcagcactggcagtgcctgggagctcgtgggaaatgtggaatgtcggagtcctcagacctgcagaatcagaatccgattcccaggaggacaaccacagctattatgtgtcccgtctctatggccccagcgagccccacagccgggaactgtgggtagatgtggccgaggccaaccggagccaagtgaagatccacacaatactctccaacacccaccggcaggcttcgagagtggtcttgtcctttgatttccctttctacgggcatcctctgcggcagatcaccatagcaactggaggcttcatcttcatgggggacgtgatccatcggatgctcacagctactcagtatgtggcgcccctgatggccaacttcaaccctggctactccgacaactccacagttgtttactttgacaatgggacagtctttgtggttcagtgggaccacgtttatctccaaggctgggaagacaagggcagtttcaccttccaggcagctctgcaccatgacggccgcattgtctttgcctataaagagatccctatgtctgtcccggaaatcagctcctcccagcatcctgtcaaaaccggcctatcggatgccttcatgattctcaatccatccccggatgtgccagaatctcggcgaaggagcatctttgaatatcaccgcatagagctggaccccagcaaggtcaccagcatgtcggccgtggagttcaccccattgccg

SEQ ID NO: 166795 - DNA, 565 bp, Homo sapiens
  Payload ID: 12836
  Gene Symbol: PLXDC1
  Gene Name: plexin domain containing 1
  ENST ID: ENST00000579190
  CDS Start-End: 272-565
ctttttgctttcgcaggcgagtgaggatggagtcctggcccctgccagtggctcagcctgtgtgtgtacccagggtagaatgcaatgcgagtgagggcgaggagctccgggctgacccttggaacacggtcacgatgagggcccaggctctggatgggctgccaaagggaccgtgcggggctggaaccggagagcccgagagagccctgggcatgtgtcagagccggacaggacccagctgagccaggacctgggtgggggcaccctggccatggacacgctgccagataacaggaccagggtggtggaggacaaccacagctattatgtgtcccgtctctatggccccagcgagccccacagccgggaactgtgggtagatgtggccgaggccaaccggagccaagtgaagatccacacaatactctccaacacccaccggcaggcttcgagagtggtcttgtcctttgatttccctttctacgggcatcctctgcggcagatcaccatagcaactggaggcttcatcttcatgggggacgtgatccatcggatgctcacagct

SEQ ID NO: 166796 - DNA, 547 bp, Homo sapiens
  Payload ID: 12836
  Gene Symbol: PLXDC1
  Gene Name: plexin domain containing 1
  ENST ID: ENST00000579279
  CDS Start-End: 1-547
caaggctgggaagacaagggcagtttcaccttccaggcagctctgcaccatgacggccgcattgtctttgcctataaagagatccctatgtctgtcccggaaatcagctcctcccagcatcctgtcaaaaccggcctatcggatgccttcatgattctcaatccatccccggatgtgccagaatctcggcgaaggagcatctttgaatatcaccgcatagagctggaccccagcaaggtcaccagcatgtcggccgtggagttcaccccattgccgacctgcctgcagcataggagctgtgacgcctgcatgtcctcagacctgaccttcaactgcagctggtgccatgtcctccagaggtccctcaacaaccaggatgaaaacacatgctccagtggctttgaccgctatcgccaggagtggatggactatggctgtgcacaggaggcagagggcaggatgtgcgaggacttccaggatgaggaccacgactcagcctcccctgacacttccttcagcccctatgatggagacctcaccactacct

SEQ ID NO: 166797 - DNA, 2822 bp, Homo sapiens
  Payload ID: 12837
  Gene Symbol: PLXDC2
  Gene Name: plexin domain containing 2
  Uniprot ID: Q6UX71
  ENST ID: ENST00000377242
  CDS Start-End: 842-2284
ggcgacggcagcgcctcctccgccaccaaactcctggggctccgcgggggcttggggccacctcctcctgagcccggaggaaccctctcccgataggttccagcgtgactccctcccactccacccttttcctttcttcttcctcttttttttttttttttttaaacacatttttttcctggcttcggacctcagactgctgcagccctaaccttcccagggctcagctctttggagctgcccattcctccggctgcgagaaaggacgcgcgccctgcgtcgggcgaagaaaagaagcaaaacttgtcgggagggtttcgtcatcaacctccttcccgcaaacctaaacctcctgccggggccatccctagacagaggaaagttcctgcagagccgaccagccctagtggatctggggcaggcagcggcgctggctgtggaattagatctgttttgaacccagtggagcgcatcgctggggctcggaagtcaccgtccgcgggcaccgggttggcgctgcccgagtggaaccgacagtttgcgagcctcggctgcaagtggcctctcctccccgcggttgttgttcagtgtcgggtgagggctgcgagtgtggcaagttgcaaagagagcctcagaggtccgaagagcgctgcgctcctactcgcgttcgcttcttcctcttctcggttccctactgtgaaatcgcagcgacatttacaaaggcctccgggtcctaccgagaccgatccgcagcgtttggcccggtcgtgcctattgcatcgggagcccccgagcaccggcgaaggactggcgggtggggtagggaggtggcggcggcggcatggcgaggttcccgaaggccgacctggccgctgcaggagttatgttactttgccacttcttcacggaccagtttcagttcgccgatgggaaacccggagaccaaatccttgattggcagtatggagttactcaggccttccctcacacagaggaggaggtggaagttgattcacacgcgtacagccacaggtggaaaagaaacttggactttctcaaggcggtagacacgaaccgagcaagcgtcggccaagactctcctgagcccagaagcttcacagacctgctgctggatgatgggcaggacaataacactcagatcgagagagtgaatctgtccttcgattttccattttatggccacttcctacgtgaaatcactgtggcaaccgggggtttcatatacactggagaagtcgtacatcgaatgctaacagccacacagtacatagcacctttaatggcaaatttcgatcccagtgtatccagaaattcaactgtcagatattttgataatggcacagcacttgtggtccagtgggaccatgtacatctccaggataattataacctgggaagcttcacattccaggcaaccctgctcatggatggacgaatcatctttggatacaaagaaattcctgtcttggtcacacagataagttcaaccaatcatccagtgaaagtcggactgtccgatgcatttgtcgttgtccacaggatccaacaaattcccaatgttcgaagaagaacaatttatgaataccaccgagtagagctacaaatgtcaaaaattaccaacatttcggctgtggagatgaccccattacccacatgcctccagtttaacagatgtggcccctgtgtatcttctcagattggcttcaactgcagttggtgtagtaaacttcaaagatgttccagtggatttgatcgtcatcggcaggactgggtggacagtggatgccctgaagagtcaaaagagaagatgtgtgagaatacagaaccagtggaaacttcttctcgaaccaccacaaccgtaggagcgacaaccacccagttcagggtcctaactaccaccagaagagcagtgacttctcagtttcccaccagcctccctacagaagatgataccaagatagcactacatctaaaagataatggagcttctacagatgacagtgcagctgagaagaaagggggaaccctccacgctggcctcatcattggaatcctcatcctggtcctcattgtagccacagccattcttgtgacagtctatatgtatcaccacccaacatcagcagccagcatcttctttattgagagacgcccaagcagatggcctgcgatgaagtttagaagaggctctggacatcctgcctatgctgaagttgaaccagttggagagaaagaaggctttattgtatcagagcagtgctaaaatttctaggacagaacaacaccagtactggtttacaggtgttaagactaaaattttgcctatacctttaagacaaacaaacaaacacacacacaaacaagctctaagctgctgtagcctgaagaagacaagatttctggacaagctcagcccaggaaacaaagggtaaacaaaaaactaaaacttatacaagataccatttacactgaacatagaattccctagtggaatgtcatctatagttcactcggaacatctcccgtggacttatctgaagtatgacaagattataatgcttttggcttaggtgcagggttgcaaagggatcagaaaaaaaaaatcataataaagctttagttcatgagggatcgacacctttggttcaaatgttctctgatgtctcaaagataactgttttccaaagcctgaaccctttcactcaaaagagcaatgatgaatgtctcaagattgctaagaaaaacagcccatgcaagagtgagaacaaacacaaaataagagattttctacattttcaaaa

SEQ ID NO: 166798 - DNA, 12468 bp, Homo sapiens
  Payload ID: 12837
  Gene Symbol: PLXDC2
  Gene Name: plexin domain containing 2
  Uniprot ID: Q6UX71
  ENST ID: ENST00000377252
  CDS Start-End: 842-2431
ggcgacggcagcgcctcctccgccaccaaactcctggggctccgcgggggcttggggccacctcctcctgagcccggaggaaccctctcccgataggttccagcgtgactccctcccactccacccttttcctttcttcttcctcttttttttttttttttttaaacacatttttttcctggcttcggacctcagactgctgcagccctaaccttcccagggctcagctctttggagctgcccattcctccggctgcgagaaaggacgcgcgccctgcgtcgggcgaagaaaagaagcaaaacttgtcgggagggtttcgtcatcaacctccttcccgcaaacctaaacctcctgccggggccatccctagacagaggaaagttcctgcagagccgaccagccctagtggatctggggcaggcagcggcgctggctgtggaattagatctgttttgaacccagtggagcgcatcgctggggctcggaagtcaccgtccgcgggcaccgggttggcgctgcccgagtggaaccgacagtttgcgagcctcggctgcaagtggcctctcctccccgcggttgttgttcagtgtcgggtgagggctgcgagtgtggcaagttgcaaagagagcctcagaggtccgaagagcgctgcgctcctactcgcgttcgcttcttcctcttctcggttccctactgtgaaatcgcagcgacatttacaaaggcctccgggtcctaccgagaccgatccgcagcgtttggcccggtcgtgcctattgcatcgggagcccccgagcaccggcgaaggactggcgggtggggtagggaggtggcggcggcggcatggcgaggttcccgaaggccgacctggccgctgcaggagttatgttactttgccacttcttcacggaccagtttcagttcgccgatgggaaacccggagaccaaatccttgattggcagtatggagttactcaggccttccctcacacagaggaggaggtggaagttgattcacacgcgtacagccacaggtggaaaagaaacttggactttctcaaggcggtagacacgaaccgagcaagcgtcggccaagactctcctgagcccagaagcttcacagacctgctgctggatgatgggcaggacaataacactcagatcgaggaggatacagaccacaattactatatatctcgaatatatggtccatctgattctgccagccgggatttatgggtgaacatagaccaaatggaaaaagataaagtgaagattcatggaatattgtccaatactcatcggcaagctgcaagagtgaatctgtccttcgattttccattttatggccacttcctacgtgaaatcactgtggcaaccgggggtttcatatacactggagaagtcgtacatcgaatgctaacagccacacagtacatagcacctttaatggcaaatttcgatcccagtgtatccagaaattcaactgtcagatattttgataatggcacagcacttgtggtccagtgggaccatgtacatctccaggataattataacctgggaagcttcacattccaggcaaccctgctcatggatggacgaatcatctttggatacaaagaaattcctgtcttggtcacacagataagttcaaccaatcatccagtgaaagtcggactgtccgatgcatttgtcgttgtccacaggatccaacaaattcccaatgttcgaagaagaacaatttatgaataccaccgagtagagctacaaatgtcaaaaattaccaacatttcggctgtggagatgaccccattacccacatgcctccagtttaacagatgtggcccctgtgtatcttctcagattggcttcaactgcagttggtgtagtaaacttcaaagatgttccagtggatttgatcgtcatcggcaggactgggtggacagtggatgccctgaagagtcaaaagagaagatgtgtgagaatacagaaccagtggaaacttcttctcgaaccaccacaaccgtaggagcgacaaccacccagttcagggtcctaactaccaccagaagagcagtgacttctcagtttcccaccagcctccctacagaagatgataccaagatagcactacatctaaaagataatggagcttctacagatgacagtgcagctgagaagaaagggggaaccctccacgctggcctcatcattggaatcctcatcctggtcctcattgtagccacagccattcttgtgacagtctatatgtatcaccacccaacatcagcagccagcatcttctttattgagagacgcccaagcagatggcctgcgatgaagtttagaagaggctctggacatcctgcctatgctgaagttgaaccagttggagagaaagaaggctttattgtatcagagcagtgctaaaatttctaggacagaacaacaccagtactggtttacaggtgttaagactaaaattttgcctatacctttaagacaaacaaacaaacacacacacaaacaagctctaagctgctgtagcctgaagaagacaagatttctggacaagctcagcccaggaaacaaagggtaaacaaaaaactaaaacttatacaagataccatttacactgaacatagaattccctagtggaatgtcatctatagttcactcggaacatctcccgtggacttatctgaagtatgacaagattataatgcttttggcttaggtgcagggttgcaaagggatcagaaaaaaaaaatcataataaagctttagttcatgagggatcgacacctttggttcaaatgttctctgatgtctcaaagataactgttttccaaagcctgaaccctttcactcaaaagagcaatgatgaatgtctcaagattgctaagaaaaacagcccatgcaagagtgagaacaaacacaaaataagagattttctacattttcaaaacagatgtgtggcaaaaggatgttgtttttctggtctagatccatctgtaccaacaagttcatcactttacagaacgaatctttttatccgtacaggaggttcaaaccatgtctgcctcttcctttgtaatgaatgacctttctatgagctgtgacaaaatttccgaacaattaactaaggatttgggaagagggggtggcaaacggggctttctgttttcctgcctcagcatgaaaacatctgatttatgctttatggaagccttacctccaatccccaactgttaagtcccatgaaaccacagttgctctgggctgatggaaacaaaaggaaacagtatgaagagttccttaatcatttttgaaacaaaaatgttaagggattttaaacatatgattatttttaattttatgccttttcagtactaaacacccatttcattgctgattcctgtctaagaagccattcacgtcagcatggcgatagaaagaatgaaaaaaccctgctgaatcatacagtaattttctttaaagcacatagtagttacataaatatatatatataaatatatttttgtttataactaacacaaggcaggatcttgtgactctaagagtgcgttttgtcatcaaggcaaaacagatgcaagatgcatcactgcattacttccatagagttgtaaaataatccttaatattagaatatttttctgtcacttagcaaaagtggttcagttcattgccgcgcccatcatgttcttgactatttgatccactttttcgtttatgtcaaccccttccctctctggctaaataaagtggatgcagaaagctccttaaatggagatatcgattgccttggaatcacaatcctgattttgaaaattcctcatgaatgaagaaaggaatggcatcccttgagaaggaaagtggttaatatacatactgagctcctaaagtttaaattcaggtactgagtgtacaatttcaccaacattctaacccatgaaacttttacactctgtgccaagaaactgttggcttttgtaaggtacagtgctcaacatttgcagattcaggtctcaagaagcagagatgtctcataagcagcattttcccaacagtttagcatctgtacacatctgccttggtcatcagtccactcacagagtaccatactttatcatcacaagtgtctgacgtgaacgaatgccattttctattccatatattttgctttacaattttaagtatttgatgaagatggtaactttttcctaacttagttaactattaaaaaaaattttgaaaagcaaggtgattgaaggattgtgatgacaatctctttgcagcagctatgtatggtttatgtgaagtatccccacttattcttgtggagcaggtttggtgagacagcaataaccaaatgacatgccaatattactggtgcaactggtattctacaaatgcataaggaacacatagacgacttccttttaggataaaatgatgcttctttcactaccttttgtggtagctgtggcttccaatagcaactgtttgacagttatataaatcttgcatgtgtattcttagtttgtgtcccttaagtactacttaattctcaagtagtaatgttattcttatacccttcagcgttctattttgattcaaaacaattgattcaaaacaattttgaatcaattttctattttgattcaaaacaattgataattctgtaaaaaaacataaacactgaattcttcagtgaaccaaagcaacaaataatagagaaaacttcttgaaactggagtgtgggaaaacttcttaacagaactaagagttaaaggtagtgagaagtgtgtggtgtgtgaattctttagtggtaaggggaaatgtgggctaaatccttttctttcatgaaactctcattctattttatatttctggtttgttcttgttcccatgtgagaaaacatacagtttctgaaaattcaaaatggtcatcaatgctttggactttacataattatgtattagagaaggtgcaactgtacattacttaatatactatgaacataatagaataacaaaaaaagataacaaagagatgcaaacttctggataaatcagataaatggtgctacagaggaatttagttatttcagcttaattatttgtaaaaataataatcagtgactaggtaaagatactgaaactcaagaaaaatatcttgacccatttatgtctagtgttccattattggaacgctaagcttatgggagttatttagagcctactgctcaaggtcatcaccaaggtctggttgcaaaaattcaaaaaattgcaacctcaggcataaatggcttaagcccaagagatggcactgaccataaatggtggcttgtgtgtgaagggtttggacttcaagatatactaacacctagaaaactaaaagtgcaattgacccccaattactattttagtttgaggtatcaagggcatttgccaatctcttatatgtagcttctagagttgtgctgtccaatattatatccactagccaacgtggcttttgaaattaaaattaattaaaattaaattaaaaatgtaattcttcagtcacaccagccacatttcaaaggctcaatagccacgcctggcttgtggctaccatattggataacaagaaacacttccgtggttgaagaaaattttaatggacaatgctgtgtttcatttgaattcgttgtccttgaagaaaagggaagaagaggaaagaaacaagatttggtagctcttgggcatatccaagcatttttgattttagagaggccctatggagtaatgaaaaaaatacaagctgacacagctttaaatccccactgtgttatcttgggaaaatcacttcaacctccttgagtctcaatttgcaattttggaaaagaaaaacaatttttgtcctgtctttcttgcaagattattatgcaacctgattaaatgtacagatgtgcagactcttaaaaaccttatgttaatgtaacccatataaagtacgacttttggtcgagtaccagcacaaatttgcattcaaaggaagaatagttcatcagtgcaaaaagcgttcaaaggtaatcagttcatcacgtatcttgagaaaaagagaatgcattcaaaacacaaagcaaaattgcttcagtttcttttctgcccatctgaatatttcctttagtatttgtcccacatgacatccatcccatgtatttatccactctttcacaacattgcctatgaacatccttcaactggctcagttctttattgcatagagccacttagcttctctagtttcttatgatttcctattttacacttaacagcaaaaggaggcttccatttagaaggcactatctcaaacataaataatttcatatttattttatcactgtaacactaaggagctatggcattaaaatataaaactatttggaacttaatgtaaacctttgcacatgcagactatataaagggaataaaattattttaaattatgctaatatccagatacatattctaaggttagtatcatttatcagtttttcgcaacagattcttatgttacatcttcatgagggagtataaatttgatcacgtccctagtgtctattgcccacttgagaaaggttttgccaggatccacagatcgcttcaagatgctttcgtttatgataggaaattaatatttaaataagactaattgaaaactagattatctggttctaatttcttcctcctgtgaaatgttcttttggtttgtatttctttaggtattttccaagttactgctgcttttacttcacgacctccaaccccacttttgttatcagcgtcatatgccagagtcatggcagatccagcctggacaacatagtgagacccatctctatcaaatatacatatatatatatatatatacacacacacacacacacacacaaatatacatatatatcaaatatatatgtatatttgatagagatgatagcaattatgtgtgtgtgtgtgtgtgtgtgtgtgtgtgtgttagccaagtgtggtttctcatgcctgtagtcccagctactttggaggctgaagtgtaagagttgcttgagcccatgagttagaggctgctgtgagctatgatcatgccactgcactccagcctgggcaacagagcaaaaccccatctctaaataaaaaaaaagaatcgtgagacatcatgtaatccaacctcttaatgttacagataagtaaactgaggcccaaagagatatagtaatagtcccagtgtcagtaaactgggtcttgaacttaaatgtttgtttcagttctcattgccttcatctcttaattgtcggcacttaaggccaaccaagcagcttagacagcgcagtccactcaacggtaactttatttgctatattgacaatctgctctgttctgtaatatagaacattggatcaatctttatctttttgctgacttaaggaggctgctattgttgcaatatccagagatttcaagttctagccattgcggggtctttgtggtgttttcaatttctcctctctccacccctgcccccatctgtggccatctaagttagcaatacaatttattttggccatttaaaatttttctgcctttgttttatttcttcccaaatatatttgaaaatgaatgatctatatagctgattttctgaccacatatataattgcaatttttatttgctcttcaaactattacaacatttttgtccttataaggttttttgggcagataatgcgaggtctgtggtgttaccttttatatactcctattaccttatgtttgtgaagcattttacattttacagagcactttgattcatctccctatttgttcatttatttaactgttcagttcactgaaatatttattgaacacctactggaaccaagtgactgtgctagtaacttgtgatatacagtagtgagagtccaggcatgtaaccgatcattataatacaataacatccctaaaccagactttacaagtagataggatcaacaatactctatcaattttcaactccaattttctattctacttaaaatgggaactagaaactgtttgcctgaagaatgtgtctgaaacataatatatcactgcatgtctgtgctgtagacctgttaattttatctgtgagaaaaaaagttactcaaaattctccctgacctaagaatactttctagttcactgcagtcttactgaccagatgcaacagttgaagtttgatttctcgacccaatatttctattgggttttgaattattaatatcactgttttgaggtattcagaaacaccagtgtatcaaaaaagcatttgcactttaggtgtgtgtggtggttatgtcatttattagaccatcccagacataagacaatcagggaaatcagaaaactccagcctcaaatgtgtctataatttcctgttctaccattgtcatatcataacatggtattacttcttaaggttttgattaagttgatctagcctcaacttaaattgtaatacatctgcctaattattgtctggaataacttttcaaccatccaatgcccactgctctcacaatgattattgtagagaagtaaaatggtaattattcaagtaaagtcacataatttctggagtcagtttttcataacaagtttatggaatacatcatcattggcttcttcataatatatttattatgagtgaccaaattttgcctggaggagcaaaatgctcaaaacttgttattataggttaatttccagctcactgttgacactgaaagattctgtgttactttaaacccaggataaaaggctggaaaaaaaattaaatgtaagtcataaactagtactcagcttttcctagtttctaaggcttattaacatttgcaaattactcaataaatgtctttcataatggaataacataaaagcttttgatttggcagatagtgatattttatttattttcattctggttgaaaaaaatctcagtggcttctcttcattccacgagaattttgatttttaacagcagtctctctttttctcagcattgcaaatatatatgtatatatacattcatgaccaaagtatcgcttactgaccatgcagctgtaaaccttctgtgcctatcaaacaaatacatagcatgaaactaattttagaagtttcatgggggaattttaggggaaagtataaacctaagagtgagtgaatggagatgattcatggaaaaaaaaataaaaatctaaatgtgctattaggcagagttattaacttcttttagttgttgtttgagatggggttttgctcttgttacccaggctggagtgcaatggcgtgatctcgtctcactgcaacctccgcctcccaggttcaagcgattctcctgcctcagccgcccaagtagctgggattacaggcatatgccactacagccggctaattttgtatttttagtagagacggggtttctccatgctggtcaggctggtccccagctcccgacctcaggtgatccgcccacctccgcctcccaaagtgctggaattacaggcctgagccaccgtgcctggccgagttattaacttcttaagagcaatgtgctaataaatactcattgatgaccagctcaaatttaggtcattcagacatccagacactggggcacatattctgcaagcaatgctgagacccctgacatagagaaagcaaaggatatgcctatgattagtctaaaatgcagccatcaccccccatacctcttctatggcattcatcctaacatcatggaggcctttgtcctagagaattatgtgacttgccctagagaattagtgaatgaccaaaaagagactttccatttatcttcctttgacttaaaaggcatgaaaataaggcaaaaaaatcaataaaataattttcctgaggaaaggttaagagatggcactttcctttccgggcccagagctggatttctctgagatttgaccatctcaggactcagacagactccagtgctattttctggacatttgtggtgaagcctcagccaccatgttcaaggtggtttgaatgaaaacatactcagattgtcacatttatagcagggaaataaaaactcaaattaggcatcctgcagcaggctactctgaaaataacattaggcaacatcagagcttcacttgcaaagaaatgttaaaatcattttagggaaatcagtgaagtctctttagaaacagacatcttgtgtatggcgtaacccagtcttggggccctcacggagaagagggggaagtcttttcattgattggtcaaaacaaatctctcatttgcctgatttgaagcatttcaacagtgcctggagagtacattattttcaggggaaaaaaaggagagagtcttttttatatgccagctgggatcatgggaacttcgaatgccaggaatttactactgtttctggtaattctgtgtgtagtcatttgaaatgttgaagtgtgaaaagagaagaaattgggcacttcttgcggcgggggagggggggggggcggtggctttccagattttatgccagttgcaccagcatgcagaatatttgtaatgcatttcaaagtggatataatggcaccctttgtcagaatcacaaagctcactgcggcactgctacaagaggacactgaggaaaatctggccctatgaacctagtcaaccccaagcaaaaagaatgactatgtgtgtgagtgcagcacatggccagttcgtttctcactgttttggaaagccctgtgtgccaaaccaaggacgtgtctttcagggaaaggttaattttccgaagtttattaaaatagaacttggaaaaccaagcattttgaatttattccagtcctctgggcatcattcctatttcttctgccatgtcaaggagaaattccaagcctgcattctgtcatgctaaaataaccagcccatacttctcggtgaccttctgttgaacgtacctgagcctgcaaatgtaaaaatgattgtatctgaatctgcactaatggtgtctgagagcaaaaagagtgtgacctctattggaaacctttgttcaaattcaataattcagagatgctacatacttctgcaagcttcctgattatgttcactgtaatattaatgacctaagtttgaatgtatttccttacagtccattaatttgacatccatcttttacctggggattattacaattgcaataagtcattaatgttttcttcacacagcttcttaaaccaagtttctctgcagctctttcggttctgcttacagtgtgtgggaaatctgatttttttcccctagtaatagtttgataagaaatttagtgtattgactgcctcagtgacacaatttatctttaaaggtgtggaagctggtggggaccaaatgttacctgtgtttttgctgttgattgctattttcagaagcaaaccatgtttttcacttacagtaggagtcaacaaatttgggattttagaagggggaggagggagctatttgtgtaagactgctgtcatatttgactacatattaaaaacagtaaatgagcattttgttttaatttcttaaataccttgtctttcaacatacgttttgtttcctttcttccattagtgttcaaaaggttctacccattgtggaagaaattctgtgtgcagaattcagaggcacaaggctgatggcaagatagaaagttattttgcttctaaacccaccccgatgtggaaactgatactagctagagggagctgtagaaaacaaagatttcaggattgcacagtgtgtgggcaatgggatggagactttttcccctattcccagccacagtgcccaagcgttcaagtctcctggatcagacagatgggattttagctgctgctttaaatcctagtgctggaataagtcaaggtacttcagttcagctcttgcctctgtcactaatcttgctttatgaactcctttgattttctgaataagttccagaaggttctctattattctgtccttcttccaaactggaaatggctgtatctaattctcaggatattttggatgtgtgcctcaggtaatttatgtggaatgtgtaaagcaagatgtctccaattctgaatattccttccccttttcccaatcctccactcttggactacctttataacaacaccgagtacgcacagacctgaacccatgcccaagaagcacacacaatgactggagctgtcgggaattcctgtcagtggcattccctgagcactggctctgtacaactcaattataattttttaagaatcatacctctgtatagatcttttggactgtactgattaaactttgatattgtggagtaaattcagaagtgcaattttaaa

SEQ ID NO: 166799 - DNA, 773 bp, Homo sapiens
  Payload ID: 12838
  Gene Symbol: PMF1-BGLAP
  Gene Name: PMF1-BGLAP readthrough
  ENST ID: ENST00000320139
  CDS Start-End: 8-535
cttcaacatggccgaagcaagtagcgccaatctaggcagcggctgtgaggaaaaaaggcatgaggggtcgtcttcggaatctgtgccacccggcactaccatttcgagggtgaagctcctcgacaccatggtggacacttttcttcagaagctggtcgccgccggcagctaccagagattcactgactgctataagtgcttctaccagttgcagcctgcgatgacacagcaaatctatgacaagtttatagctcagttgcagacatctatccgggaggaaatctctgacatcaaagaggaggggaacctagaagctgtcttgaatgccttggataaaattgtggaagaaggcaaagtccgcaaagagccagcctggtgcgaagcccagcggtgcagagtccagcaaaggtgcagcctttgtgtccaagcaggagggcagcgaggtagtgaagagacccaggcgctacctgtatcaatggctgggagccccagtcccctacccggatcccctggagcccaggagggaggtgtgtgagctcaatccggactgtgacgagttggctgaccacatcggctttcaggaggcctatcggcgcttctacggcccggtctagggtgtcgctctgctggcctggccggcaaccccagttctgctcctctccaggcacccttctttcctcttccccttgcccttgccctgacctcccagccctatggatgtggggtccccatcatcccagctgctcccaaataaactccagaagaggaatctg

SEQ ID NO: 166800 - DNA, 852 bp, Homo sapiens
  Payload ID: 12838
  Gene Symbol: PMF1-BGLAP
  Gene Name: PMF1-BGLAP readthrough
  ENST ID: ENST00000368276
  CDS Start-End: 10-672
aacttcaacatggccgaagcaagtagcgccaatctaggcagcggctgtgaggaaaaaaggcatgaggggtcgtcttcggaatctgtgccacccggcactaccatttcgagggtgaagctcctcgacaccatggtggacacttttcttcagaagctggtcgccgccggcagctaccagagattcactgactgctataagtgcttctaccagttgcagcctgcgatgacacagcaaatctatgacaagtttatagctcagttgcagacatctatccgggaggaaatctctgacatcaaagaggaggggaacctagaagctgtcttgaatgccttggataaaattgtggaagaaggcaaagtccgcaaagagccagcctgcaacgggacaccctgcggcgccatgtgcagaaacaggaggccgagaaccagcagctggcagatgccgtcctggcagggcggaggcaggtggaggagctgcagctacaggtccaggcccagcagcaggcctggcaggtgcgaagcccagcggtgcagagtccagcaaaggtgcagcctttgtgtccaagcaggagggcagcgaggtagtgaagagacccaggcgctacctgtatcaatggctgggagccccagtcccctacccggatcccctggagcccaggagggaggtgtgtgagctcaatccggactgtgacgagttggctgaccacatcggctttcaggaggcctatcggcgcttctacggcccggtctagggtgtcgctctgctggcctggccggcaaccccagttctgctcctctccaggcacccttctttcctcttccccttgcccttgccctgacctcccagccctat

SEQ ID NO: 166801 - DNA, 655 bp, Homo sapiens
  Payload ID: 12838
  Gene Symbol: PMF1-BGLAP
  Gene Name: PMF1-BGLAP readthrough
  ENST ID: ENST00000567140
  CDS Start-End: 8-436
cttcaacatggccgaagcaagtagcgccaatctaggcagcggctgtgaggaaaaaaggcatgaggggtcgtcttcggaatctgtgccacccggcactaccatttcgagggtgaagctcctcgacaccatggtggacacttttcttcagaagctggtcgccgccggcaggcgccccagcgggatcccagagaaggatctgcacagtgttatggcaccctacttcctgcagcaacgggacaccctgcggcgccatgtgcagaaacaggaggccgagaaccagcagctggcagatgccgtcctggcagggcggaggcaggtggaggagctgcagctacaggtccaggcccagcagcaggcctggcaggtgcgaagcccagcggtgcagagtccagcaaaggtgcagcctttgtgtccaagcaggagggcagcgaggtagtgaagagacccaggcgctacctgtatcaatggctgggagccccagtcccctacccggatcccctggagcccaggagggaggtgtgtgagctcaatccggactgtgacgagttggctgaccacatcggctttcaggaggcctatcggcgcttctacggcccggtctagggtgtcgctctgctggcctggccggcaaccccagttctgctcctctccaggc

SEQ ID NO: 166802 - DNA, 1007 bp, Homo sapiens
  Payload ID: 12838
  Gene Symbol: PMF1-BGLAP
  Gene Name: PMF1-BGLAP readthrough
  ENST ID: ENST00000490491
  CDS Start-End: 35-670
ccgggccagttagatttggaggttcaacttcaacatggccgaagcaagtagcgccaatctaggcagcggctgtgaggaaaaaaggcatgaggggtcgtcttcggaatctgtgccacccggcactaccatttcgagggtgaagctcctcgacaccatggtggacacttttcttcagaagctggtcgccgccggcagctaccagagattcactgactgctataagtgcttctaccagttgcagcctgcgatgacacagcaaatctatgacaagtttatagctcagttgcagacatctatccgggaggaaatctctgacatcaaagaggaggggaacctagaagctgtcttgaatgccttggataaaattgtggaagaaggcaaagtccgcaaagagccagcctggcgccccagcgggatcccagagaaggatctgcacagtgttatggcaccctacttcctgcagcaacgggacaccctgcggcgccatgtgcagaaacaggaggccgagaaccagcagctggcagatgccgtcctggcagggcggaggcaggtggaggagctgcagctacaggtccaggcccagcagcaggcctggcaggtgcgaagcccagcggtgcagagtccagcaaaggtgcagcctttgtgtccaagcaggagggcagcgaggtagtgaagagacccaggcgctacctgtatcaatggctgggagccccagtcccctacccggatcccctggagcccaggagggaggtgtgtgagctcaatccggactgtgacgagttggctgaccacatcggctttcaggaggcctatcggcgcttctacggcccggtctagggtgtcgctctgctggcctggccggcaaccccagttctgctcctctccaggcacccttctttcctcttccccttgcccttgccctgacctcccagccctatggatgtggggtccccatcatcccagctgctcccaaataaactccagaagaggaatctgtgggcctgtga

SEQ ID NO: 166803 - DNA, 2667 bp, Homo sapiens
  Payload ID: 12839
  Gene Symbol: PRAM1
  Gene Name: PML-RARA regulated adaptor molecule 1
  Uniprot ID: Q96QH2
  ENST ID: ENST00000423345
  CDS Start-End: 522-2534
aagcttgggacagtagcaggcaggacaggaattcaagcgaaatagaagtgcccagcaggggccggggcagtggctcacacctgtaatcccagcactttggtaggccgaggcggaccgatcccttgaggtcaggagtttgagaccagcctgcccaacatggtgaaaccccttctctactaaagatacgaaaagtagccaggagcggtggtgcgcgcctgtaatcccagctactcaggaggttgatgcaaaagaattgcctgaacccgggaggcagaggttgcagtgagccgagatggcaccatggcactccagcctgggcgacagagcaagactcagtctcaaaaaaaaagaagtggctggcaggatctggagacggactggagcctccccacctccttcccttcctcctctgccctcccccgccccacctctagcagcccccaccctgtgtgctgaccgtggagcagaagccacagtcacttcctgaaggcagcggccccagctcgggtcccactcatcccatggcccatcacctgcctgcagccatggagagccatcaggacttccggagcatcaaagcaaagttccaggcctctcagccggagcccagcgacctgcccaaaaaacctccgaagcctgagtttggtaaactgaagaagttctcccagcctgagctaagcgagcaccccaagaaggccccgctgcctgagtttggtgcagtgtccttgaagcccccgccgcctgaggtcactgacctccccaagaagcccccgccgcctgaggtcactgacctccccaagaagcccccgccgcctgaggtcactgacctccccaagaagcccccgccgcctgaggtcactgacctccccaagaagccgtccaaactggagttgagtgacctctccaagaagttcccacagctgggggccactccgtttccaaggaagcccctgcagcctgaggtcggtgaggcccctttgaaggcctcgctgccggagcctggtgcgccggcccggaaacccctgcagcccgacgaactcagtcaccccgccagacccccctccgaacccaaatccggcgcattccccaggaagctctggcaacccgaggccggtgaggctaccccgaggtccccgcagcctgagttgagtacctttcccaagaagcctgcgcagcctgagttcaacgtgtaccccaaaaagcctccgcagcctcaggtcggtggcctccctaagaagtccgtgccgcagcctgagttcagcgaggccgctcagactcccctctggaagcctcagtccagcgagccgaagcgcgactccagcgcctttcccaaaaaggcctcccagcctccgctgagtgactttcccaagaagcctccgcagcctgagcttggggacctcaccaggacctcctcagagcccgaagtcagcgtgcttcccaagaggccgcggccggccgaattcaaagcgctctccaagaagcccccgcagcccgagctgggcggcctccccaggacctcctcagagcccgagttcaactcactccccaggaagctgctgcagccggagcgccgggggccaccccgcaagttctcacagcctgagcccagcgctgtcctcaagagacacccgcagcctgagttcttcggtgatctccctcgaaagcctccactccccagctccgcttccgagagctcactgcctgcggccgtggccggcttcagctcccggcacccgctcagccctgggtttggagcggctgggacaccccgctggaggtcaggaggcctggttcacagtggaggggccaggccaggcctcagacccagccatccaccccggcggaggcctctgccccctgccagcagcctgggacaccctccagccaagcccccgctgcccccggggcccgtggatatgcagagctttcggagaccctctgcagcatccatagatctacggaggacccgctcggccgctgggctccacttccaggaccgacagcctgaagacatcccgcaggtcccagatgagatctacgagctgtatgacgatgtggaacccagagatgactccagccccagccccaagggcagagatgaagcgccctcagttcagcaagccgccaggaggccaccacaagacccagcgctcaggaaggagaaggatccccagccacagcagttgccacccatggacccaaagttgctgaagcagctgaggaaggcagagaaggccgagagggagttccggaagaagttcaagtttgaaggggagatcgtggttcacacgaagatgatgatcgaccccaacgctaagacacgtcgcgggggtggcaagcacctcgggatccggcgcggggagatcctggaggtgatcgagttcaccagcaatgaggagatgctgtgccgggaccccaaaggcaaatatggctacgtgcccagaacagcgctcctgcccctggagacggaggtgtacgatgatgtcgacttctgcgatcccctggaaaaccaaccactccccctgggacggtaagaccggtaggcgtggggccaggacagccagccagcccagcgcccgctcacccaggagccctggatcccggcgcgggaaagtcacagagctgcctgggcttgtacctggccacataaagccccagtttaaagca

SEQ ID NO: 166804 - DNA, 583 bp, Homo sapiens
  Payload ID: 12839
  Gene Symbol: PRAM1
  Gene Name: PML-RARA regulated adaptor molecule 1
  ENST ID: ENST00000600262
  CDS Start-End: 44-583
acttcctgaaggcagcggccccagctcgggtcccactcatcccatggcccatcacctgcctgcagccatggagagccatcaggacttccggagcatcaaagcaaagttccaggcctctcagccggagcccagcgacctgcccaaaaaacctccgaagcctgagtttggtaaactgaagaagttctcccagcctgagctaagcgagcaccccaagaaggccccgctgcctgagtttggtgcagtgtccttgaagcccccgccgcctgaggtcactgacctccccaagaagcccccgccgcctgaggtcactgacctccccaagaagccgtccaaactggagttgagtgacctctccaagaagttcccacagctgggggccactccgtttccaaggaagcccctgcagcctgaggtcggtgaggcccctttgaaggcctcgctgccggagcctggtgcgccggcccggaaacccctgcagcccgacgaactcagtcaccccgccagacccccctccgaacccaaatccggcgcattccccaggaagctctggcaacccgaggccggtgaggctaccccgaggtcc

SEQ ID NO: 166805 - DNA, 3012 bp, Homo sapiens
  Payload ID: 12840
  Gene Symbol: PMS1
  Gene Name: PMS1 homolog 1, mismatch repair system component
  ENST ID: ENST00000342075
  CDS Start-End: 126-452
gtgctgggtgcgggtgcgggtgcggggttgggcctgcgcatcgggtgagacgctggctgcttgcggctagtggatggtaattgcctgcctcgcgctagcaggaagctgctctgttaaaagcgaaaatgaaacaattgcctgcggcaacagttcgactcctttcaagttctcagatcatcacttcggtggtcagtgttgtaaaagagcttattgaaaactccttggatgctggtgccacaagcgtagatgttaaactggagaactatggatttgataaaattgaggtgcgagataacggggagggtatcaaggctgttgatgcacctgtaatggcaatgaagtactacacctcaaaaataaatagtcatgaagatcttgaaaatttgacaacttacggttttcgtggagaagccttggggtcaatttgttgtatagctgaggtacaactgtaactgctttaagattatttaagaatctacctgtaagaaagcagttttactcaactgcaaaaaaatgtaaagatgaaataaaaaagatccaagatctcctcatgagctttggtatccttaaacctgacttaaggattgtctttgtacataacaaggcagttatttggcagaaaagcagagtatcagatcacaagatggctctcatgtcagttctggggactgctgttatgaacaatatggaatcctttcagtaccactctgaagaatctcagatttatctcagtggatttcttccaaagtgtgatgcagaccactctttcactagtctttcaacaccagaaagaagtttcatcttcataaacagtcgaccagtacatcaaaaagatatcttaaagttaatccgacatcattacaatctgaaatgcctaaaggaatctactcgtttgtatcctgttttctttctgaaaatcgatgttcctacagctgatgttgatgtaaatttaacaccagataaaagccaagtattattacaaaataaggaatctgttttaattgctcttgaaaatctgatgacgacttgttatggaccattacctagtacaaattcttatgaaaataataaaacagatgtttccgcagctgacatcgttcttagtaaaacagcagaaacagatgtgctttttaataaagtggaatcatctggaaagaattattcaaatgttgatacttcagtcattccattccaaaatgatatgcataatgatgaatctggaaaaaacactgatgattgtttaaatcaccagataagtattggtgactttggttatggtcattgtagtagtgaaatttctaacattgataaaaacactaagaatgcatttcaggacatttcaatgagtaatgtatcatgggagaactctcagacggaatatagtaaaacttgttttataagttccgttaagcacacccagtcagaaaatggcaataaagaccatatagatgagagtggggaaaatgaggaagaagcaggtcttgaaaactcttcggaaatttctgcagatgagtggagcaggggaaatatacttaaaaattcagtgggagagaatattgaacctgtgaaaattttagtgcctgaaaaaagtttaccatgtaaagtaagtaataataattatccaatccctgaacaaatgaatcttaatgaagattcatgtaacaaaaaatcaaatgtaatagataataaatctggaaaagttacagcttatgatttacttagcaatcgagtaatcaagaaacccatgtcagcaagtgctctttttgttcaagatcatcgtcctcagtttctcatagaaaatcctaagactagtttagaggatgcaacactacaaattgaagaactgtggaagacattgagtgaagaggaaaaactgaaatatgaagagaaggctactaaagacttggaacgatacaatagtcaaatgaagagagccattgaacaggagtcacaaatgtcactaaaagatggcagaaaaaagataaaacccaccagcgcatggaatttggcccagaagcacaagttaaaaacctcattatctaatcaaccaaaacttgatgaactccttcagtcccaaattgaaaaaagaaggagtcaaaatattaaaatggtacagatccccttttctatgaaaaacttaaaaataaattttaagaaacaaaacaaagttgacttagaagagaaggatgaaccttgcttgatccacaatctcaggtttcctgatgcatggctaatgacatccaaaacagaggtaatgttattaaatccatatagagtagaagaagccctgctatttaaaagacttcttgagaatcataaacttcctgcagagccactggaaaagccaattatgttaacagagagtctttttaatggatctcattatttagacgttttatataaaatgacagcagatgaccaaagatacagtggatcaacttacctgtctgatcctcgtcttacagcgaatggtttcaagataaaattgataccaggagtttcaattactgaaaattacttggaaatagaaggaatggctaattgtctcccattctatggagtagcagatttaaaagaaattcttaatgctatattaaacagaaatgcaaaggaagtttatgaatgtagacctcgcaaagtgataagttatttagagggagaagcagtgcgtctatccagacaattacccatgtacttatcaaaagaggacatccaagacattatctacagaatgaagcaccagtttggaaatgaaattaaagagtgtgttcatggtcgcccattttttcatcatttaacctatcttccagaaactacatgattaaatatgtttaagaagattagttaccattgaaattggttctgtcataaaacagcatgagtctggttttaaattatctttgtattatgtgtcacatggttattttttaaatgaggattcactgacttgtttttatattgaaaaaagttccacgtattgtagaaaacgtaaataaactaatatagactatt

SEQ ID NO: 166806 - DNA, 948 bp, Homo sapiens
  Payload ID: 12840
  Gene Symbol: PMS1
  Gene Name: PMS1 homolog 1, mismatch repair system component
  ENST ID: ENST00000374826
  CDS Start-End: 107-604
gtgcggggttgggcctgcgcatcgggtgagacgctggctgcttgcggctagtggatggtaattgcctgcctcgcgctagcaggaagctgctctgttaaaagcgaaaatgaaacaattgcctgcggcaacagttcgactcctttcaagttctcagatcatcacttcggtggtcagtgttgtaaaagagcttattgaaaactccttggatgctggtgccacaagcgtagatgttaaactggagaactatggatttgataaaattgaggtgcgagataacggggagggtatcaaggctgttgatgcacctgtaatggcaatgaagtactacacctcaaaaataaatagtcatgaagatcttgaaaatttgacaacttacggttttcgtggagaagccttggggtcaatttgttgtatagctgaggttttaattacaacaagaacggctgctgataattttagcacccagtatgttttagatggcagtggccacatactttctcagaaaccttcacatcttggtcaagggtctcactctgtcacacaggctggactgcagtggcatcatcttggttcactgcaacctctgcctcccaggctcaagtgatcctcccacctcagcctcctcagtagctgggactacaggtgcataccaccacacccggctaatttttgtatttttagtagagacagggttttgctgtgttgcccagctggcctcgaactcctgagcccaagcgatacacctgccttggcctcccagagtgctgagattacagatgtgagccactgtgttcagctgataagtgtttaaatttctctaaaaactatttacttataaaggtaaaaaagatctctttaggcttcagtttcacatatctcctttaatctttttttaataatttctagtgatgggatgattaagagactattaaagctattacctcttta

SEQ ID NO: 166807 - DNA, 1882 bp, Homo sapiens
  Payload ID: 12840
  Gene Symbol: PMS1
  Gene Name: PMS1 homolog 1, mismatch repair system component
  ENST ID: ENST00000409985
  CDS Start-End: 165-710
agtgccgcgctctctgcacccgctctgccgcgcgcgtgcgtgctgggtgcgggtgcgggtgcggggttgggcctgcgcatcgggtgagacgctggctgcttgcggctagtggatggtaattgcctgcctcgcgctagcaggaagctgctctgttaaaagcgaaaatgaaacaattgcctgcggcaacagttcgactcctttcaagttctcagatcatcacttcggtggtcagtgttgtaaaagagcttattgaaaactccttggatgctggtgccacaagcgtagatgttaaactggagaactatggatttgataaaattgaggtgcgagataacggggagggtatcaaggctgttgatgcacctgtaatggcaatgaagtactacacctcaaaaataaatagtcatgaagatcttgaaaatttgacaacttacggttttcgtggagaagccttggggtcaatttgttgtatagctgaggttttaattacaacaagaacggctgctgataattttagcacccagtatgttttagatggcagtggccacatactttctcagaaaccttcacatcttggtcaaggtaagaaagtagctttgtatacaaacattctttaccttttctgtcttaattgttggtttaaaaaaaaaaagttactcggtgaatacaaatatattgctttgggcttggtcctgataaaggctagttaacttccaagtaaacattcagcctttattctagccaccaatttcttaaatatttagaattgttctcaaaaggaactgtatgagagactggacacttccatggactagttactcctctgtaaaaactaagagtatttattttaccagtgctggattaccagtgtcatcttcatatatgaagaagattaaaattttattgaaacatataaaacataattgatttggtaatagtggaaataaacgataccatcaagatatgattaaataatttaaaatctatttgttaattgatggaaaacttcaaacatgcataagaagttactgtacttatcactcagtttcaataatttatcaattcattgctaaagttctttcatgtaataccctcgcccatttcttccctttctatattactttgaagcaaatacgtattgtttctacttgtaatgtagttagtgttttatatacttttatgtaatattattacattttaattgatatcttatgttttttattttattttattttattttcctgagacagggtctcactctgtcacacaggctggactgcagtggcatcatcttggttcactgcaacctctgcctcccaggctcaagtgatcctcccacctcagcctcctcagtagctgggactacaggtgcataccaccacacccggctaatttttgtatttttagtagagacagggttttgctgtgttgcccagctggcctcgaactcctgagcccaagcgatacacctgccttggcctcccagagtgctgagattacagatgtgagccactgtgttcagctgataagtgtttaaatttctctaaaaactatttacttataaaggtaaaaaagatctctttaggcttcagtttcacatatctcctttaatctttttttaataatttctagtgatgggatgattaagagactattaaagctattacctctttagagtcatgttcaaaataattattagatctgaaaagggacttgtgggttttgttgttgttgtttatccttctgcttctccaatttgtgttgtaaattcatgtttaattttgtgttccctcattgcagtttatcaaagtacattctgtatattttctgtggtttttttccttcagttttaatattaaattattggattctttttttcaaa

SEQ ID NO: 166808 - DNA, 2795 bp, Homo sapiens
  Payload ID: 12840
  Gene Symbol: PMS1
  Gene Name: PMS1 homolog 1, mismatch repair system component
  Uniprot ID: P54277
  ENST ID: ENST00000409823
  CDS Start-End: 114-2795
ggtgcgggtgcggggttgggcctgcgcatcgggtgagacgctggctgcttgcggctagtggatggtaattgcctgcctcgcgctagcaggaagctgctctgttaaaagcgaaaatgaaacaattgcctgcggcaacagttcgactcctttcaagttctcagatcatcacttcggtggtcagtgttgtaaaagagcttattgaaaactccttggatgctggtgccacaagcgtagatgttaaactggagaactatggatttgataaaattgaggtgcgagataacggggagggtatcaaggctgttgatgcacctgtaatggcaatgaagtactacacctcaaaaataaatagtcatgaagatcttgaaaatttgacaacttacggttttcgtggagaagccttggggtcaatttgttgtatagctgaggttttaattacaacaagaacggctgctgataattttagcacccagtatgttttagatggcagtggccacatactttctcagaaaccttcacatcttggtcaaggtacaactgtaactgctttaagattatttaagaatctacctgtaagaaagcagttttactcaactgcaaaaaaatgtaaagatgaaataaaaaagatccaagatctcctcatgagctttggtatccttaaacctgacttaaggattgtctttgtacataacaagatttatctcagtggatttcttccaaagtgtgatgcagaccactctttcactagtctttcaacaccagaaagaagtttcatcttcataaacagtcgaccagtacatcaaaaagatatcttaaagttaatccgacatcattacaatctgaaatgcctaaaggaatctactcgtttgtatcctgttttctttctgaaaatcgatgttcctacagctgatgttgatgtaaatttaacaccagataaaagccaagtattattacaaaataaggaatctgttttaattgctcttgaaaatctgatgacgacttgttatggaccattacctagtacaaattcttatgaaaataataaaacagatgtttccgcagctgacatcgttcttagtaaaacagcagaaacagatgtgctttttaataaagtggaatcatctggaaagaattattcaaatgttgatacttcagtcattccattccaaaatgatatgcataatgatgaatctggaaaaaacactgatgattgtttaaatcaccagataagtattggtgactttggttatggtcattgtagtagtgaaatttctaacattgataaaaacactaagaatgcatttcaggacatttcaatgagtaatgtatcatgggagaactctcagacggaatatagtaaaacttgttttataagttccgttaagcacacccagtcagaaaatggcaataaagaccatatagatgagagtggggaaaatgaggaagaagcaggtcttgaaaactcttcggaaatttctgcagatgagtggagcaggggaaatatacttaaaaattcagtgggagagaatattgaacctgtgaaaattttagtgcctgaaaaaagtttaccatgtaaagtaagtaataataattatccaatccctgaacaaatgaatcttaatgaagattcatgtaacaaaaaatcaaatgtaatagataataaatctggaaaagttacagcttatgatttacttagcaatcgagtaatcaagaaacccatgtcagcaagtgctctttttgttcaagatcatcgtcctcagtttctcatagaaaatcctaagactagtttagaggatgcaacactacaaattgaagaactgtggaagacattgagtgaagaggaaaaactgaaatatgaagagaaggctactaaagacttggaacgatacaatagtcaaatgaagagagccattgaacaggagtcacaaatgtcactaaaagatggcagaaaaaagataaaacccaccagcgcatggaatttggcccagaagcacaagttaaaaacctcattatctaatcaaccaaaacttgatgaactccttcagtcccaaattgaaaaaagaaggagtcaaaatattaaaatggtacagatccccttttctatgaaaaacttaaaaataaattttaagaaacaaaacaaagttgacttagaagagaaggatgaaccttgcttgatccacaatctcaggtttcctgatgcatggctaatgacatccaaaacagaggtaatgttattaaatccatatagagtagaagaagccctgctatttaaaagacttcttgagaatcataaacttcctgcagagccactggaaaagccaattatgttaacagagagtctttttaatggatctcattatttagacgttttatataaaatgacagcagatgaccaaagatacagtggatcaacttacctgtctgatcctcgtcttacagcgaatggtttcaagataaaattgataccaggagtttcaattactgaaaattacttggaaatagaaggaatggctaattgtctcccattctatggagtagcagatttaaaagaaattcttaatgctatattaaacagaaatgcaaaggaagtttatgaatgtagacctcgcaaagtgataagttatttagagggagaagcagtgcgtctatccagacaattacccatgtacttatcaaaagaggacatccaagacattatctacagaatgaagcaccagtttggaaatgaaattaaagagtgtgttcatggtcgcccattttttcatcatttaacctatcttccagaaactacatga

SEQ ID NO: 166809 - DNA, 1668 bp, Homo sapiens
  Payload ID: 12840
  Gene Symbol: PMS1
  Gene Name: PMS1 homolog 1, mismatch repair system component
  Uniprot ID: P54277
  ENST ID: ENST00000409593
  CDS Start-End: 1-1668
atgagctttggtatccttaaacctgacttaaggattgtctttgtacataacaagatttatctcagtggatttcttccaaagtgtgatgcagaccactctttcactagtctttcaacaccagaaagaagtttcatcttcataaacagtcgaccagtacatcaaaaagatatcttaaagttaatccgacatcattacaatctgaaatgcctaaaggaatctactcgtttgtatcctgttttctttctgaaaatcgatgttcctacagctgatgttgatgtaaatttaacaccagataaaagccaagtattattacaaaataaggaatctgttttaattgctcttgaaaatctgatgacgacttgttatggaccattacctagtacaaattcttatgaaaataataaaacagatgtttccgcagctgacatcgttcttagtaaaacagcagaaacagatgtgctttttaataaagtggaatcatctggaaagaattattcaaatgttgatacttcagtcattccattccaaaatgatatgcataatgatgaatctggaaaaaacactgatgattgtttaaatcaccagataagtattggtgactttggttatggtcattgtagtagtgaaatttctaacattgataaaaacactaagaatgcatttcaggacatttcaatgagtaatgtatcatgggagaactctcagacggaatatagtaaaacttgttttataagttccgttaagcacacccagtcagaaaatggcaataaagaccatatagatgagagtggggaaaatgaggaagaagcaggtcttgaaaactcttcggaaatttctgcagatgagtggagcaggggaaatatacttaaaaattcagtgggagagaatattgaacctgtgaaaattttagtgcctgaaaaaagtttaccatgtaaagtaagtaataataattatccaatccctgaacaaatgaatcttaatgaagattcatgtaacaaaaaatcaaatgtaatagataataaatctggaaaagttacagcttatgatttacttagcaatcgagtaatcaagaaacccatgtcagcaagtgctctttttgttcaagatcatcgtcctcagtttctcatagaaaatcctaagactagtttagaggatgcaacactacaaattgaagaactgtggaagacattgagtgaagaggaaaaactgaatctttttaatggatctcattatttagacgttttatataaaatgacagcagatgaccaaagatacagtggatcaacttacctgtctgatcctcgtcttacagcgaatggtttcaagataaaattgataccaggagtttcaattactgaaaattacttggaaatagaaggaatggctaattgtctcccattctatggagtagcagatttaaaagaaattcttaatgctatattaaacagaaatgcaaaggaagtttatgaatgtagacctcgcaaagtgataagttatttagagggagaagcagtgcgtctatccagacaattacccatgtacttatcaaaagaggacatccaagacattatctacagaatgaagcaccagtttggaaatgaaattaaagagtgtgttcatggtcgcccattttttcatcatttaacctatcttccagaaactacatga

SEQ ID NO: 166810 - DNA, 2153 bp, Homo sapiens
  Payload ID: 12840
  Gene Symbol: PMS1
  Gene Name: PMS1 homolog 1, mismatch repair system component
  ENST ID: ENST00000424307
  CDS Start-End: 21-2153
ctgctctgttaaaagcgaaaatgaaacaattgcctgcggcaacagttcgactcctttcaagttctcagatcatcacttcggtggtcagtgttgtaaaagagcttattgaaaactccttggatgctggtgccacaagcgtagatgttaaactggttttaattacaacaagaacggctgctgataattttagcacccagtatgttttagatggcagtggccacatactttctcagaaaccttcacatcttggtcaaggtacaactgtaactgctttaagattatttaagaatctacctgtaagaaagcagttttactcaactgcaaaaaaatgtaaagatgaaataaaaaagatccaagatctcctcatgagctttggtatccttaaacctgacttaaggattgtctttgtacataacaaggcagttatttggcagaaaagcagagtatcagatcacaagatggctctcatgtcagttctggggactgctgttatgaacaatatggaatcctttcagtaccactctgaagaatctcagatttatctcagtggatttcttccaaagtgtgatgcagaccactctttcactagtctttcaacaccagaaagaagtttcatcttcataaacagtcgaccagtacatcaaaaagatatcttaaagttaatccgacatcattacaatctgaaatgcctaaaggaatctactcgtttgtatcctgttttctttctgaaaatcgatgttcctacagctgatgttgatgtaaatttaacaccagataaaagccaagtattattacaaaataaggaatctgttttaattgctcttgaaaatctgatgacgacttgttatggaccattacctagtacaaattcttatgaaaataataaaacagatgtttccgcagctgacatcgttcttagtaaaacagcagaaacagatgtgctttttaataaagtggaatcatctggaaagaattattcaaatgttgatacttcagtcattccattccaaaatgatatgcataatgatgaatctggaaaaaacactgatgattgtttaaatcaccagataagtattggtgactttggttatggtcattgtagtagtgaaatttctaacattgataaaaacactaagaatgcatttcaggacatttcaatgagtaatgtatcatgggagaactctcagacggaatatagtaaaacttgttttataagttccgttaagcacacccagtcagaaaatggcaataaagaccatatagatgagagtggggaaaatgaggaagaagcaggtcttgaaaactcttcggaaatttctgcagatgagtggagcaggggaaatatacttaaaaattcagtgggagagaatattgaacctgtgaaaattttagtgcctgaaaaaagtttaccatgtaaagtaagtaataataattatccaatccctgaacaaatgaatcttaatgaagattcatgtaacaaaaaatcaaatgtaatagataataaatctggaaaagttacagcttatgatttacttagcaatcgagtaatcaagaaacccatgtcagcaagtgctctttttgttcaagatcatcgtcctcagtttctcatagaaaatcctaagactagtttagaggatgcaacactacaaattgaagaactgtggaagacattgagtgaagaggaaaaactgaaatatgaagagaaggctactaaagacttggaacgatacaatagtcaaatgaagagagccattgaacaggagtcacaaatgtcactaaaagatggcagaaaaaagataaaacccaccagcgcatggaatttggcccagaagcacaagttaaaaacctcattatctaatcaaccaaaacttgatgaactccttcagtcccaaattgaaaaaagaaggagtcaaaatattaaaatggtacagatccccttttctatgaaaaacttaaaaataaattttaagaaacaaaacaaagttgacttagaagagaaggatgaaccttgcttgatccacaatctcaggtttcctgatgcatggctaatgacatccaaaacagaggtaatgttattaaatccatatagagtagaagaagccctgctatttaaaagacttcttgagaatcataaacttcctgcagagccactg

SEQ ID NO: 166811 - DNA, 331 bp, Homo sapiens
  Payload ID: 12840
  Gene Symbol: PMS1
  Gene Name: PMS1 homolog 1, mismatch repair system component
  ENST ID: ENST00000420421
  CDS Start-End: 111-331
gatctattttcatctgtcattattattgccatttgtcctgttggtcaggaatgcttaacaattcttacaagttgcatttttatcttctagctgctctgttaaaagcgaaaatgaaacaattgcctgcggcaacagttcgactcctttcaagttctcagatcatcacttcggtggtcagtgttgtaaaagagcttattgaaaactccttggatgctggtgccacaagcgtagatgttaaactggagaactatggatttgataaaattgaggtgcgagataacggggagggtatcaaggctgttgatgcacctgtaatggcaatgaagtacta

SEQ ID NO: 166812 - DNA, 881 bp, Homo sapiens
  Payload ID: 12840
  Gene Symbol: PMS1
  Gene Name: PMS1 homolog 1, mismatch repair system component
  ENST ID: ENST00000452382
  CDS Start-End: 84-881
gaaggtagagcaaaaatgatacaacacccaagaatcgtactagctaccatttctcttcctgtctttatcttggagttctgtccatgatcctaaattctctaagatatgaagagaaggctactaaagacttggaacgatacaatagtcaaatgaagagagccattgaacaggagtcacaaatgtcactaaaagatggcagaaaaaagataaaacccaccagcgcatggaatttggcccagaagcacaagttaaaaacctcattatctaatcaaccaaaacttgatgaactccttcagtcccaaattgaaaaaagaaggagtcaaaatattaaaatggtacagatccccttttctatgaaaaacttaaaaataaattttaagaaacaaaacaaagttgacttagaagagaaggatgaaccttgcttgatccacaatctcaggtttcctgatgcatggctaatgacatccaaaacagaggtaatgttattaaatccatatagagtagaagaagccctgctatttaaaagacttcttgagaatcataaacttcctgcagagccactggaaaagccaattatgttaacagagagtctttttaatggatctcattatttagacgttttatataaaatgacagcagatgaccaaagatacagtggatcaacttacctgtctgatcctcgtcttacagcgaatggtttcaagataaaattgataccaggagtttcaattactgaaaattacttggaaatagaaggaatggctaattgtctcccattctatggagtagcagatttaaaagaaattcttaatgctatattaaacagaaatgcaaaggaagtttatgaatgtagacctcgcaaagtgataagttatttagag

SEQ ID NO: 166813 - DNA, 3234 bp, Homo sapiens
  Payload ID: 12840
  Gene Symbol: PMS1
  Gene Name: PMS1 homolog 1, mismatch repair system component
  ENST ID: ENST00000432292
  CDS Start-End: 772-3042
ggcaagacaacgaggatttgcgtagggggcgagcctctgaggccacttggctcttacggccacgcagggcgccgcagatgcagccggagcccgcttttccctctcaggacgacccctaggccgccagcagttccctaccgacgaaggcgactgtacagcgtccaccgcgttcgtgcccacttacccgccgccccactccgggccgccggctcgcagcaggaccagcccggctgctacggccgcggatacacgccctcaggcccggcgctgcgcagcttgcggaagctttcccggacagactcgctgccagcggattggctgcgagcagcgccaatctcacgttgcccccgggcgaggcgggactcagtgccgcgctctctgcacccgctctgccgcgcgcgtgcgtgctgggtgcgggtgcgggtgcggggttgggcctgcgcatcgggtgagacgctggctgcttgcggctagtggatggtaattgcctgcctcgcgctagcaggaagctgctctgttaaaagcgaaaatgaaacaattgcctgcggcaacagttcgactcctttcaagttctcagatcatcacttcggtggtcagtgttgtaaaagagcttattgaaaactccttggatgctggtgccacaagcgtagatgttaaactggtacaactgtaactgctttaagattatttaagaatctacctgtaagaaagcagttttactcaactgcaaaaaaatgtaaagatgaaataaaaaagatccaagatctcctcatgagctttggtatccttaaacctgacttaaggattgtctttgtacataacaaggcagttatttggcagaaaagcagagtatcagatcacaagatggctctcatgtcagttctggggactgctgttatgaacaatatggaatcctttcagtaccactctgaagaatctcagatttatctcagtggatttcttccaaagtgtgatgcagaccactctttcactagtctttcaacaccagaaagaagtttcatcttcataaacagtcgaccagtacatcaaaaagatatcttaaagttaatccgacatcattacaatctgaaatgcctaaaggaatctactcgtttgtatcctgttttctttctgaaaatcgatgttcctacagctgatgttgatgtaaatttaacaccagataaaagccaagtattattacaaaataaggaatctgttttaattgctcttgaaaatctgatgacgacttgttatggaccattacctagtacaaattcttatgaaaataataaaacagatgtttccgcagctgacatcgttcttagtaaaacagcagaaacagatgtgctttttaataaagtggaatcatctggaaagaattattcaaatgttgatacttcagtcattccattccaaaatgatatgcataatgatgaatctggaaaaaacactgatgattgtttaaatcaccagataagtattggtgactttggttatggtcattgtagtagtgaaatttctaacattgataaaaacactaagaatgcatttcaggacatttcaatgagtaatgtatcatgggagaactctcagacggaatatagtaaaacttgttttataagttccgttaagcacacccagtcagaaaatggcaataaagaccatatagatgagagtggggaaaatgaggaagaagcaggtcttgaaaactcttcggaaatttctgcagatgagtggagcaggggaaatatacttaaaaattcagtgggagagaatattgaacctgtgaaaattttagtgcctgaaaaaagtttaccatgtaaagtaagtaataataattatccaatccctgaacaaatgaatcttaatgaagattcatgtaacaaaaaatcaaatgtaatagataataaatctggaaaagttacagcttatgatttacttagcaatcgagtaatcaagaaacccatgtcagcaagtgctctttttgttcaagatcatcgtcctcagtttctcatagaaaatcctaagactagtttagaggatgcaacactacaaattgaagaactgtggaagacattgagtgaagaggaaaaactgaaatatgaagagaaggctactaaagacttggaacgatacaatagtcaaatgaagagagccattgaacaggagtcacaaatgtcactaaaagatggcagaaaaaagataaaacccaccagcgcatggaatttggcccagaagcacaagttaaaaacctcattatctaatcaaccaaaacttgatgaactccttcagtcccaaattgaaaaaagaaggagtcaaaatattaaaatggtacagatccccttttctatgaaaaacttaaaaataaattttaagaaacaaaacaaagttgacttagaagagaaggatgaaccttgcttgatccacaatctcaggtttcctgatgcatggctaatgacatccaaaacagaggtaatgttattaaatccatatagagtagaagaagccctgctatttaaaagacttcttgagaatcataaacttcctgcagagccactggaaaagccaattatgttaacagagagtctttttaatggatctcattatttagacgttttatataaaatgacagcagatgaccaaagatacagtggatcaacttacctgtctgatcctcgtcttacagcgaatggtttcaagataaaattgataccaggagtttcaattactgaaaattacttggaaatagaaggaatggctaattgtctcccattctatggagtagcagatttaaaagaaattcttaatgctatattaaacagaaatgcaaaggaagtttatgaatgtagacctcgcaaagtgataagttatttagagggagaagcagtgcgtctatccagacaattacccatgtacttatcaaaagaggacatccaagacattatctacagaatgaagcaccagtttggaaatgaaattaaagagtgtgttcatggtcgcccattttttcatcatttaacctatcttccagaaactacatgattaaatatgtttaagaagattagttaccattgaaattggttctgtcataaaacagcatgagtctggttttaaattatctttgtattatgtgtcacatggttattttttaaatgaggattcactgacttgtttttatattgaaaaaagttccacgtattgtagaaaacgtaaataaactaatatagactattc

SEQ ID NO: 166814 - DNA, 2576 bp, Homo sapiens
  Payload ID: 12840
  Gene Symbol: PMS1
  Gene Name: PMS1 homolog 1, mismatch repair system component
  Uniprot ID: P54277
  ENST ID: ENST00000447232
  CDS Start-End: 71-2383
gctgcttgcggctagtggatggtaattgcctgcctcgcgctagcaggaagctgctctgttaaaagcgaaaatgaaacaattgcctgcggcaacagttcgactcctttcaagttctcagatcatcacttcggtggtcagtgttgtaaaagagcttattgaaaactccttggatgctggtgccacaagcgtagatgttaaactggagaactatggatttgataaaattgaggtgcgagataacggggagggtatcaaggctgttgatgcacctgtaatggcaatgaagtactacacctcaaaaataaatagtcatgaagatcttgaaaatttgacaacttacggttttcgtggagaagccttggggtcaatttgttgtatagctgaggttttaattacaacaagaacggctgctgataattttagcacccagtatgttttagatggcagtggccacatactttctcagaaaccttcacatcttggtcaaggtacaactgtaactgctttaagattatttaagaatctacctgtaagaaagcagttttactcaactgcaaaaaaatgtaaagatgaaataaaaaagatccaagatctcctcatgagctttggtatccttaaacctgacttaaggattgtctttgtacataacaaggcagttatttggcagaaaagcagagtatcagatcacaagatggctctcatgtcagttctggggactgctgttatgaacaatatggaatcctttcagtaccactctgaagaatctcagatttatctcagtggatttcttccaaagtgtgatgcagaccactctttcactagtctttcaacaccagaaagaagtttcatcttcataaacagtcgaccagtacatcaaaaagatatcttaaagttaatccgacatcattacaatctgaaatgcctaaaggaatctactcgtttgtatcctgttttctttctgaaaatcgatgttcctacagctgatgttgatgtaaatttaacaccagataaaagccaagtattattacaaaataaggaatctgttttaattgctcttgaaaatctgatgacgacttgttatggaccattacctagtacaaattcttatgaaaataataaaacagatgtttccgcagctgacatcgttcttagtaaaacagcagaaacagatgtgctttttaataaagtggaatcatctggaaagaattattcaaatgttgatacttcagtcattccattccaaaatgatatgcataatgatgaatctggaaaaaacactgatgattgtttaaatcaccagataagtattggtgactttggttatggtcattgtagtagtgaaatttctaacattgataaaaacactaagaatgcatttcaggacatttcaatgagtaatgtatcatgggagaactctcagacggaatatagtaaaacttgttttataagttccgttaagcacacccagtcagaaaatggcaataaagaccatatagatgagagtggggaaaatgaggaagaagcaggtcttgaaaactcttcggaaatttctgcagatgagtggagcaggggaaatatacttaaaaattcagtgggagagaatattgaacctgtgaaaattttagtgcctgaaaaaagtttaccatgtaaagtaagtaataataattatccaatccctgaacaaatgaatcttaatgaagattcatgtaacaaaaaatcaaatgtaatagataataaatctggaaaagttacagcttatgatttacttagcaatcgagtaatcaagaaacccatgtcagcaagtgctctttttgttcaagatcatcgtcctcagtttctcatagaaaatcctaagactagtttagaggatgcaacactacaaattgaagaactgtggaagacattgagtgaagaggaaaaactgaatctttttaatggatctcattatttagacgttttatataaaatgacagcagatgaccaaagatacagtggatcaacttacctgtctgatcctcgtcttacagcgaatggtttcaagataaaattgataccaggagtttcaattactgaaaattacttggaaatagaaggaatggctaattgtctcccattctatggagtagcagatttaaaagaaattcttaatgctatattaaacagaaatgcaaaggaagtttatgaatgtagacctcgcaaagtgataagttatttagagggagaagcagtgcgtctatccagacaattacccatgtacttatcaaaagaggacatccaagacattatctacagaatgaagcaccagtttggaaatgaaattaaagagtgtgttcatggtcgcccattttttcatcatttaacctatcttccagaaactacatgattaaatatgtttaagaagattagttaccattgaaattggttctgtcataaaacagcatgagtctggttttaaattatctttgtattatgtgtcacatggttattttttaaatgaggattcactgacttgtttttatattgaaaaaagttccacgtattgtagaaaacgtaaataaactaatatagactattca

SEQ ID NO: 166815 - DNA, 3018 bp, Homo sapiens
  Payload ID: 12840
  Gene Symbol: PMS1
  Gene Name: PMS1 homolog 1, mismatch repair system component
  ENST ID: ENST00000418224
  CDS Start-End: 530-2533
ggcaagacaacgaggatttgcgtagggggcgagcctctgaggccacttggctcttacggccacgcagggcgccgcagatgcagccggagcccgcttttccctctcaggacgacccctaggccgccagcagttccctaccgacgaaggcgactgtacagcgtccaccgcgttcgtgcccacttacccgccgccccactccgggccgccggctcgcagcaggaccagcccggctgctacggccgcggatacacgccctcaggcccggcgctgcgcagcttgcggaagctttcccggacagactcgctgccagcggattggctgcgagcagcgccaatctcacgttgcccccgggcgaggcgggactcagtgccgcgctctctgcacccgctctgccgcgcgcgtgcgtgctgggtgcgggtgcgggtgcggggttgggcctgcgcatcgggtgagacgctggctgcttgcggctagtggatggtaattgcctgcctcgcgctagcaggaagctgctctgttaaaagcgaaaatgaaacaattgcctgcggcaacagttcgactcctttcaagttctcagatcatcacttcggtggtcagtgttgtaaaagagcttattgaaaactccttggatgctggtgccacaagcgtagatgttaaactggagaactatggatttgataaaattgaggtgcgagataacggggagggtatcaaggctgttgatgcacctgtaatggcaatgaagtactacacctcaaaaataaatagtcatgaagatcttgaaaatttgacaacttacggttttcgtggagaagccttggggtcaatttgttgtatagctgaggttttaattacaacaagaacggctgctgataattttagcacccagtatgttttagatggcagtggccacatactttctcagaaaccttcacatcttggtcaaggtacaactgtaactgctttaagattatttaagaatctacctgtaagaaagcagttttactcaactgcaaaaaaatgtaaagatgaaataaaaaagatccaagatctcctcatgagctttggtatccttaaacctgacttaaggattgtctttgtacataacaagatttatctcagtggatttcttccaaagtgtgatgcagaccactctttcactagtctttcaacaccagaaagaagtttcatcttcataaacagtcgaccagtacatcaaaaagatatcttaaagttaatccgacatcattacaatctgaaatgcctaaaggaatctactcgtttgtatcctgttttctttctgaaaatcgatgttcctacagctgatgttgatgtaaatttaacaccagataaaagccaagtattattacaaaataaggaatctgttttaattgctcttgaaaatctgatgacgacttgttatggaccattacctagtacaaattcttatgaaaataataaaacagatgtttccgcagctgacatcgttcttagtaaaacagcagaaacagatgtgctttttaataaagtggaatcatctggaaagaattattcaaatgttgatacttcagtcattccattccaaaatgatatgcataatgatgaatctggaaaaaacactgatgattgtttaaatcaccagataagtattggtgactttggttatggtcattgtagtagtgaaatttctaacattgataaaaacactaagaatgcatttcaggacatttcaatgagtaatgtatcatgggagaactctcagacggaatatagtaaaacttgttttataagttccgttaagcacacccagtcagaaaatggcaataaagaccatatagatgagagtggggaaaatgaggaagaagcaggtcttgaaaactcttcggaaatttctgcagatgagtggagcaggggaaatatacttaaaaattcagtgggagagaatattgaacctgtgaaaattttagtgcctgaaaaaagtttaccatgtaaagtaagtaataataattatccaatccctgaacaaatgaatcttaatgaagattcatgtaacaaaaaatcaaatgtaatagataataaatctggaaaagttacagcttatgatttacttagcaatcgagtaatcaagaaacccatgtcagcaagtgctctttttgttcaagatcatcgtcctcagtttctcatagaaaatcctaagactagtttagaggatgcaacactacaaattgaagaactgtggaagacattgagtgaagaggaaaaactgaaatatgaagagaaggctactaaagacttggaacgatacaatagtcaaatgaagagagccattgaacaggagtcacaaatgtcactaaaagatggcagaaaaaagataaaacccaccagcgcatggaatttggcccagaagcacaagttaaaaacctcattatctaatcaaccaaaacttgatgaactccttcagtcccaaattgaaaaaagaaggagtcaaaatattaaaatggagtttcaattactgaaaattacttggaaatagaaggaatggctaattgtctcccattctatggagtagcagatttaaaagaaattcttaatgctatattaaacagaaatgcaaaggaagtttatgaatgtagacctcgcaaagtgataagttatttagagggagaagcagtgcgtctatccagacaattacccatgtacttatcaaaagaggacatccaagacattatctacagaatgaagcaccagtttggaaatgaaattaaagagtgtgttcatggtcgcccattttttcatcatttaacctatcttccagaaactacatgattaaatatgtttaagaagattagttaccattgaaattggttctgtcataaaacagcatgagtctggttttaaattatctttgtattatgtgtcacatggttattttttaaatgaggattcactgacttgtttttatattgaaaaaagttccacgtattgtagaaaacgtaaataaactaatatagactattc

SEQ ID NO: 166816 - DNA, 2817 bp, Homo sapiens
  Payload ID: 12840
  Gene Symbol: PMS1
  Gene Name: PMS1 homolog 1, mismatch repair system component
  ENST ID: ENST00000450931
  CDS Start-End: 199-2178
gggttgggcctgcgcatcgggtgagacgctggctgcttgcggctagtggatggcacacctgttgtccttaactgactttccgggtcatcagcacttcttcagaagtgttccttttccctcccagcaaatatggaagactgactatcctgatattcccagacattctttgctgtgatttctgctctgttaaaagcgaaaatgaaacaattgcctgcggcaacagttcgactcctttcaagttctcagatcatcacttcggtggtcagtgttgtaaaagagcttattgaaaactccttggatgctggtgccacaagcgtagatgttaaactggagaactatggatttgataaaattgaggtgcgagataacggggagggtatcaaggctgttgatgcacctgtaatggcaatgaagtactacacctcaaaaataaatagtcatgaagatcttgaaaatttgacaacttacggttttcgtggagaagccttggggtcaatttgttgtatagctgaggttttaattacaacaagaacggctgctgataattttagcacccagtatgttttagatggcagtggccacatactttctcagaaaccttcacatcttggtcaaggtacaactgtaactgctttaagattatttaagaatctacctgtaagaaagcagttttactcaactgcaaaaaaatgtaaagatgaaataaaaaagatccaagatctcctcatgagctttggtatccttaaacctgacttaaggattgtctttgtacataacaagatttatctcagtggatttcttccaaagtgtgatgcagaccactctttcactagtctttcaacaccagaaagaagtttcatcttcataaacagtcgaccagtacatcaaaaagatatcttaaagttaatccgacatcattacaatctgaaatgcctaaaggaatctactcgtttgtatcctgttttctttctgaaaatcgatgttcctacagctgatgttgatgtaaatttaacaccagataaaagccaagtattattacaaaataaggaatctgttttaattgctcttgaaaatctgatgacgacttgttatggaccattacctagtacaaattcttatgaaaataataaaacagatgtttccgcagctgacatcgttcttagtaaaacagcagaaacagatgtgctttttaataaagtggaatcatctggaaagaattattcaaatgttgatacttcagtcattccattccaaaatgatatgcataatgatgaatctggaaaaaacactgatgattgtttaaatcaccagataagtattggtgactttggttatggtcattgtagtagtgaaatttctaacattgataaaaacactaagaatgcatttcaggacatttcaatgagtaatgtatcatgggagaactctcagacggaatatagtaaaacttgttttataagttccgttaagcacacccagtcagaaaatggcaataaagaccatatagatgagagtggggaaaatgaggaagaagcaggtcttgaaaactcttcggaaatttctgcagatgagtggagcaggggaaatatacttaaaaattcagtgggagagaatattgaacctgtgaaaattttagtgcctgaaaaaagtttaccatgtaaagtaagtaataataattatccaatccctgaacaaatgaatcttaatgaagattcatgtaacaaaaaatcaaatgtaatagataataaatctggaaaagttacagcttatgatttacttagcaatcgagtaatcaagaaacccatgtcagcaagtgctctttttgttcaagatcatcgtcctcagtttctcatagaaaatcctaagactagtttagaggatgcaacactacaaattgaagaactgtggaagacattgagtgaagaggaaaaactgaaatatgaagagaaggctactaaagacttggaacgatacaatagtcaaatgaagagagccattgaacaggagtcacaaatgtcactaaaagatggcagaaaaaagataaaacccaccagcgcatggaatttggcccagaagcacaagttaaaaacctcattatctaatcaaccaaaacttgatgaactccttcagtcccaaattgaaaaaagaaggagtcaaaatattaaaatgtctttttaatggatctcattatttagacgttttatataaaatgacagcagatgaccaaagatacagtggatcaacttacctgtctgatcctcgtcttacagcgaatggtttcaagataaaattgataccaggagtttcaattactgaaaattacttggaaatagaaggaatggctaattgtctcccattctatggagtagcagatttaaaagaaattcttaatgctatattaaacagaaatgcaaaggaagtttatgaatgtagacctcgcaaagtgataagttatttagagggagaagcagtgcgtctatccagacaattacccatgtacttatcaaaagaggacatccaagacattatctacagaatgaagcaccagtttggaaatgaaattaaagagtgtgttcatggtcgcccattttttcatcatttaacctatcttccagaaactacatgattaaatatgtttaagaagattagttaccattgaaattggttctgtcataaaacagcatgagtctggttttaaattatctttgtattatgtgtcacatggttattttttaaatgaggattcactgacttgtttttatattgaaaaaagttccacgtattgtagaaaacgtaaataaactaatatagactatt

SEQ ID NO: 166817 - DNA, 3225 bp, Homo sapiens
  Payload ID: 12840
  Gene Symbol: PMS1
  Gene Name: PMS1 homolog 1, mismatch repair system component
  Uniprot ID: P54277
  ENST ID: ENST00000441310
  CDS Start-End: 234-3032
agactcgctgccagcggattggctgcgagcagcgccaatctcacgttgcccccgggcgaggcgggactcagtgccgcgctctctgcacccgctctgccgcgcgcgtgcgtgctgggtgcgggtgcgggtgcggggttgggcctgcgcatcgggtgagacgctggctgcttgcggctagtggatggtaattgcctgcctcgcgctagcaggaagctgctctgttaaaagcgaaaatgaaacaattgcctgcggcaacagttcgactcctttcaagttctcagatcatcacttcggtggtcagtgttgtaaaagagcttattgaaaactccttggatgctggtgccacaagcgtagatgttaaactggagaactatggatttgataaaattgaggtgcgagataacggggagggtatcaaggctgttgatgcacctgtaatggcaatgaagtactacacctcaaaaataaatagtcatgaagatcttgaaaatttgacaacttacggttttcgtggagaagccttggggtcaatttgttgtatagctgaggttttaattacaacaagaacggctgctgataattttagcacccagtatgttttagatggcagtggccacatactttctcagaaaccttcacatcttggtcaaggtacaactgtaactgctttaagattatttaagaatctacctgtaagaaagcagttttactcaactgcaaaaaaatgtaaagatgaaataaaaaagatccaagatctcctcatgagctttggtatccttaaacctgacttaaggattgtctttgtacataacaaggcagttatttggcagaaaagcagagtatcagatcacaagatggctctcatgtcagttctggggactgctgttatgaacaatatggaatcctttcagtaccactctgaagaatctcagatttatctcagtggatttcttccaaagtgtgatgcagaccactctttcactagtctttcaacaccagaaagaagtttcatcttcataaacagtcgaccagtacatcaaaaagatatcttaaagttaatccgacatcattacaatctgaaatgcctaaaggaatctactcgtttgtatcctgttttctttctgaaaatcgatgttcctacagctgatgttgatgtaaatttaacaccagataaaagccaagtattattacaaaataaggaatctgttttaattgctcttgaaaatctgatgacgacttgttatggaccattacctagtacaaattcttatgaaaataataaaacagatgtttccgcagctgacatcgttcttagtaaaacagcagaaacagatgtgctttttaataaagtggaatcatctggaaagaattattcaaatgttgatacttcagtcattccattccaaaatgatatgcataatgatgaatctggaaaaaacactgatgattgtttaaatcaccagataagtattggtgactttggttatggtcattgtagtagtgaaatttctaacattgataaaaacactaagaatgcatttcaggacatttcaatgagtaatgtatcatgggagaactctcagacggaatatagtaaaacttgttttataagttccgttaagcacacccagtcagaaaatggcaataaagaccatatagatgagagtggggaaaatgaggaagaagcaggtcttgaaaactcttcggaaatttctgcagatgagtggagcaggggaaatatacttaaaaattcagtgggagagaatattgaacctgtgaaaattttagtgcctgaaaaaagtttaccatgtaaagtaagtaataataattatccaatccctgaacaaatgaatcttaatgaagattcatgtaacaaaaaatcaaatgtaatagataataaatctggaaaagttacagcttatgatttacttagcaatcgagtaatcaagaaacccatgtcagcaagtgctctttttgttcaagatcatcgtcctcagtttctcatagaaaatcctaagactagtttagaggatgcaacactacaaattgaagaactgtggaagacattgagtgaagaggaaaaactgaaatatgaagagaaggctactaaagacttggaacgatacaatagtcaaatgaagagagccattgaacaggagtcacaaatgtcactaaaagatggcagaaaaaagataaaacccaccagcgcatggaatttggcccagaagcacaagttaaaaacctcattatctaatcaaccaaaacttgatgaactccttcagtcccaaattgaaaaaagaaggagtcaaaatattaaaatggtacagatccccttttctatgaaaaacttaaaaataaattttaagaaacaaaacaaagttgacttagaagagaaggatgaaccttgcttgatccacaatctcaggtttcctgatgcatggctaatgacatccaaaacagaggtaatgttattaaatccatatagagtagaagaagccctgctatttaaaagacttcttgagaatcataaacttcctgcagagccactggaaaagccaattatgttaacagagagtctttttaatggatctcattatttagacgttttatataaaatgacagcagatgaccaaagatacagtggatcaacttacctgtctgatcctcgtcttacagcgaatggtttcaagataaaattgataccaggagtttcaattactgaaaattacttggaaatagaaggaatggctaattgtctcccattctatggagtagcagatttaaaagaaattcttaatgctatattaaacagaaatgcaaaggaagtttatgaatgtagacctcgcaaagtgataagttatttagagggagaagcagtgcgtctatccagacaattacccatgtacttatcaaaagaggacatccaagacattatctacagaatgaagcaccagtttggaaatgaaattaaagagtgtgttcatggtcgcccattttttcatcatttaacctatcttccagaaactacatgattaaatatgtttaagaagattagttaccattgaaattggttctgtcataaaacagcatgagtctggttttaaattatctttgtattatgtgtcacatggttattttttaaatgaggattcactgacttgtttttatattgaaaaaagttccacgtattgtagaaaacgtaaataaactaatatagactattca

SEQ ID NO: 166818 - DNA, 831 bp, Homo sapiens
  Payload ID: 12840
  Gene Symbol: PMS1
  Gene Name: PMS1 homolog 1, mismatch repair system component
  ENST ID: ENST00000424766
  CDS Start-End: 249-831
ggctgcttgcggctagtggatggtaattgcctgcctcgcgctagcaggaaggtagtgtggtgtgactaacgggtatttattatatcctcgatggctcgagggccccgtcccctctactcgtcctggtccgggcgcgaacgctatagggcagctaagggcgctccccgcggggcgggaagcgaagccgggcttgcgggcgcgcacacgtggaacgcgttttctgagcagctgctctgttaaaagcgaaaatgaaacaattgcctgcggcaacagttcgactcctttcaagttctcagatcatcacttcggtggtcagtgttgtaaaagagcttattgaaaactccttggatgctggtgccacaagcgtagatgttaaactggagaactatggatttgataaaattgaggtgcgagataacggggagggtatcaaggctgttgatgcacctgtaatggcaatgaagtactacacctcaaaaataaatagtcatgaagatcttgaaaatttgacaacttacggttttcgtggagaagccttggggtcaatttgttgtatagctgaggttttaattacaacaagaacggctgctgataattttagcacccagtatgttttagatggcagtggccacatactttctcagaaaccttcacatcttggtcaaggtacaactgtaactgctttaagattatttaagaatctacctgtaagaaagcagttttactcaactgcaaaaaaatgtaaagatgaaataaaaaagatccaagatctcctcatgagctttggtatccttaaacctgacttaaggattgtctttgtacataacaagg

SEQ ID NO: 166819 - DNA, 570 bp, Homo sapiens
  Payload ID: 12840
  Gene Symbol: PMS1
  Gene Name: PMS1 homolog 1, mismatch repair system component
  ENST ID: ENST00000447734
  CDS Start-End: 50-193
gtaattgcctgcctcgcgctagcaggaagctgctctgttaaaagcgaaaatgaaacaattgcctgcggcaacagttcgactcctttcaagttctcagatcatcacttcggtggtcagtgttgtaaaagagcttattgaaaactccttggatgctggtgccacaagcgtagatgttaaactggtacaactgtaactgctttaagattatttaagaatctacctgtaagaaagcagttttactcaactgcaaaaaaatgtaaagatgaaataaaaaagatccaagatctcctcatgagctttggtatccttaaacctgacttaaggattgtctttgtacataacaaggcagttatttggcagaaaagcagagtatcagatcacaagatggctctcatgtcagttctggggactgctgttatgaacaatatggaatcctttcagtaccactctgaagaatctcagatttatctcagtggatttcttccaaagtgtgatgcagaccactctttcactagtctttcaacaccagaaagaagtttcatcttcataaacagtcgaccagtacatcaa

SEQ ID NO: 166820 - DNA, 560 bp, Homo sapiens
  Payload ID: 12840
  Gene Symbol: PMS1
  Gene Name: PMS1 homolog 1, mismatch repair system component
  ENST ID: ENST00000446877
  CDS Start-End: 429-560
gtgctgggtgcgggtgcgggtgcggggttgggcctgcgcatcgggtgagacgctggctgcttgcggctagtggatggtaattgcctgcctcgcgctagcaggaaggtagtgtggtgtgactaacgggtatttattatatcctcgatggctcgagggccccgtcccctctactcgtcctggtccgggcgcgaacgctatagggcagctaagggcgctccccgcggggcgggaagcgaagccgggcttgcgggcgcgcacacgtggaacgcgttttctgagcaggcacacctgttgtccttaactgactttccgggtcatcagcacttcttcagaagtgttccttttccctcccagcaaatatggaagactgactatcctgatattcccagacattctttgctgtgatttctgctctgttaaaagcgaaaatgaaacaattgcctgcggcaacagttcgactcctttcaagttctcagatcatcacttcggtggtcagtgttgtaaaagagcttattgaaaactccttggatgctggtgccacaagcgtagatgttaaactg

SEQ ID NO: 166821 - DNA, 1468 bp, Homo sapiens
  Payload ID: 12840
  Gene Symbol: PMS1
  Gene Name: PMS1 homolog 1, mismatch repair system component
  ENST ID: ENST00000618056
  CDS Start-End: 530-1276
ggcaagacaacgaggatttgcgtagggggcgagcctctgaggccacttggctcttacggccacgcagggcgccgcagatgcagccggagcccgcttttccctctcaggacgacccctaggccgccagcagttccctaccgacgaaggcgactgtacagcgtccaccgcgttcgtgcccacttacccgccgccccactccgggccgccggctcgcagcaggaccagcccggctgctacggccgcggatacacgccctcaggcccggcgctgcgcagcttgcggaagctttcccggacagactcgctgccagcggattggctgcgagcagcgccaatctcacgttgcccccgggcgaggcgggactcagtgccgcgctctctgcacccgctctgccgcgcgcgtgcgtgctgggtgcgggtgcgggtgcggggttgggcctgcgcatcgggtgagacgctggctgcttgcggctagtggatggtaattgcctgcctcgcgctagcaggaagctgctctgttaaaagcgaaaatgaaacaattgcctgcggcaacagttcgactcctttcaagttctcagatcatcacttcggtggtcagtgttgtaaaagagcttattgaaaactccttggatgctggtgccacaagcgtagatgttaaactggagaactatggatttgataaaattgaggtgcgagataacggggagggtatcaaggctgttgatgcacctgtaatggcaatgaagtactacacctcaaaaataaatagtcatgaagatcttgaaaatttgacaacttacggttttcgtggagaagccttggggtcaatttgttgtatagctgaggttttaattacaacaagaacggctgctgataattttagcacccagtatgttttagatggcagtggccacatactttctcagaaaccttcacatcttggtcaaggtacaactgtaactgctttaagattatttaagaatctacctgtaagaaagcagttttactcaactgcaaaaaaatgtaaagatgaaataaaaaagatccaagatctcctcatgagctttggtatccttaaacctgacttaaggattgtctttgtacataacaagggagaagcagtgcgtctatccagacaattacccatgtacttatcaaaagaggacatccaagacattatctacagaatgaagcaccagtttggaaatgaaattaaagagtgtgttcatggtcgcccattttttcatcatttaacctatcttccagaaactacatgattaaatatgtttaagaagattagttaccattgaaattggttctgtcataaaacagcatgagtctggttttaaattatctttgtattatgtgtcacatggttattttttaaatgaggattcactgacttgtttttatattgaaaaaagttccacgtattgtagaaaacgtaaataaactaatatagactattc

SEQ ID NO: 166822 - DNA, 3417 bp, Homo sapiens
  Payload ID: 12840
  Gene Symbol: PMS1
  Gene Name: PMS1 homolog 1, mismatch repair system component
  ENST ID: ENST00000624204
  CDS Start-End: 955-3225
ggcaagacaacgaggatttgcgtagggggcgagcctctgaggccacttggctcttacggccacgcagggcgccgcagatgcagccggagcccgcttttccctctcaggacgacccctaggccgccagcagttccctaccgacgaaggcgactgtacagcgtccaccgcgttcgtgcccacttacccgccgccccactccgggccgccggctcgcagcaggaccagcccggctgctacggccgcggatacacgccctcaggcccggcgctgcgcagcttgcggaagctttcccggacagactcgctgccagcggattggctgcgagcagcgccaatctcacgttgcccccgggcgaggcgggactcagtgccgcgctctctgcacccgctctgccgcgcgcgtgcgtgctgggtgcgggtgcgggtgcggggttgggcctgcgcatcgggtgagacgctggctgcttgcggctagtggatggtaattgcctgcctcgcgctagcaggaagctgctctgttaaaagcgaaaatgaaacaattgcctgcggcaacagttcgactcctttcaagttctcagatcatcacttcggtggtcagtgttgtaaaagagcttattgaaaactccttggatgctggtgccacaagcgtagatgttaaactggagaactatggatttgataaaattgaggtgcgagataacggggagggtatcaaggctgttgatgcacctgtaatggcaatgaagtactacacctcaaaaataaatagtcatgaagatcttgaaaatttgacaacttacggttttcgtggagaagccttggggtcaatttgttgtatagctgaggtacaactgtaactgctttaagattatttaagaatctacctgtaagaaagcagttttactcaactgcaaaaaaatgtaaagatgaaataaaaaagatccaagatctcctcatgagctttggtatccttaaacctgacttaaggattgtctttgtacataacaaggcagttatttggcagaaaagcagagtatcagatcacaagatggctctcatgtcagttctggggactgctgttatgaacaatatggaatcctttcagtaccactctgaagaatctcagatttatctcagtggatttcttccaaagtgtgatgcagaccactctttcactagtctttcaacaccagaaagaagtttcatcttcataaacagtcgaccagtacatcaaaaagatatcttaaagttaatccgacatcattacaatctgaaatgcctaaaggaatctactcgtttgtatcctgttttctttctgaaaatcgatgttcctacagctgatgttgatgtaaatttaacaccagataaaagccaagtattattacaaaataaggaatctgttttaattgctcttgaaaatctgatgacgacttgttatggaccattacctagtacaaattcttatgaaaataataaaacagatgtttccgcagctgacatcgttcttagtaaaacagcagaaacagatgtgctttttaataaagtggaatcatctggaaagaattattcaaatgttgatacttcagtcattccattccaaaatgatatgcataatgatgaatctggaaaaaacactgatgattgtttaaatcaccagataagtattggtgactttggttatggtcattgtagtagtgaaatttctaacattgataaaaacactaagaatgcatttcaggacatttcaatgagtaatgtatcatgggagaactctcagacggaatatagtaaaacttgttttataagttccgttaagcacacccagtcagaaaatggcaataaagaccatatagatgagagtggggaaaatgaggaagaagcaggtcttgaaaactcttcggaaatttctgcagatgagtggagcaggggaaatatacttaaaaattcagtgggagagaatattgaacctgtgaaaattttagtgcctgaaaaaagtttaccatgtaaagtaagtaataataattatccaatccctgaacaaatgaatcttaatgaagattcatgtaacaaaaaatcaaatgtaatagataataaatctggaaaagttacagcttatgatttacttagcaatcgagtaatcaagaaacccatgtcagcaagtgctctttttgttcaagatcatcgtcctcagtttctcatagaaaatcctaagactagtttagaggatgcaacactacaaattgaagaactgtggaagacattgagtgaagaggaaaaactgaaatatgaagagaaggctactaaagacttggaacgatacaatagtcaaatgaagagagccattgaacaggagtcacaaatgtcactaaaagatggcagaaaaaagataaaacccaccagcgcatggaatttggcccagaagcacaagttaaaaacctcattatctaatcaaccaaaacttgatgaactccttcagtcccaaattgaaaaaagaaggagtcaaaatattaaaatggtacagatccccttttctatgaaaaacttaaaaataaattttaagaaacaaaacaaagttgacttagaagagaaggatgaaccttgcttgatccacaatctcaggtttcctgatgcatggctaatgacatccaaaacagaggtaatgttattaaatccatatagagtagaagaagccctgctatttaaaagacttcttgagaatcataaacttcctgcagagccactggaaaagccaattatgttaacagagagtctttttaatggatctcattatttagacgttttatataaaatgacagcagatgaccaaagatacagtggatcaacttacctgtctgatcctcgtcttacagcgaatggtttcaagataaaattgataccaggagtttcaattactgaaaattacttggaaatagaaggaatggctaattgtctcccattctatggagtagcagatttaaaagaaattcttaatgctatattaaacagaaatgcaaaggaagtttatgaatgtagacctcgcaaagtgataagttatttagagggagaagcagtgcgtctatccagacaattacccatgtacttatcaaaagaggacatccaagacattatctacagaatgaagcaccagtttggaaatgaaattaaagagtgtgttcatggtcgcccattttttcatcatttaacctatcttccagaaactacatgattaaatatgtttaagaagattagttaccattgaaattggttctgtcataaaacagcatgagtctggttttaaattatctttgtattatgtgtcacatggttattttttaaatgaggattcactgacttgtttttatattgaaaaaagttccacgtattgtagaaaacgtaaataaactaatatagactattc

SEQ ID NO: 166823 - DNA, 2855 bp, Homo sapiens
  Payload ID: 12841
  Gene Symbol: PMS2
  Gene Name: PMS1 homolog 2, mismatch repair system component
  Uniprot ID: P54278
  ENST ID: ENST00000265849
  CDS Start-End: 107-2695
ggagcacaacgtcgaaagcagccaatgggagttcaggaggcggagcgcctgtgggagccctggagggaactttcccagtccccgaggcggatcgggtgttgcatccatggagcgagctgagagctcgagtacagaacctgctaaggccatcaaacctattgatcggaagtcagtccatcagatttgctctgggcaggtggtactgagtctaagcactgcggtaaaggagttagtagaaaacagtctggatgctggtgccactaatattgatctaaagcttaaggactatggagtggatcttattgaagtttcagacaatggatgtggggtagaagaagaaaacttcgaaggcttaactctgaaacatcacacatctaagattcaagagtttgccgacctaactcaggttgaaacttttggctttcggggggaagctctgagctcactttgtgcactgagcgatgtcaccatttctacctgccacgcatcggcgaaggttggaactcgactgatgtttgatcacaatgggaaaattatccagaaaaccccctacccccgccccagagggaccacagtcagcgtgcagcagttattttccacactacctgtgcgccataaggaatttcaaaggaatattaagaaggagtatgccaaaatggtccaggtcttacatgcatactgtatcatttcagcaggcatccgtgtaagttgcaccaatcagcttggacaaggaaaacgacagcctgtggtatgcacaggtggaagccccagcataaaggaaaatatcggctctgtgtttgggcagaagcagttgcaaagcctcattccttttgttcagctgccccctagtgactccgtgtgtgaagagtacggtttgagctgttccgatgctctgcataatcttttttacatctcaggtttcatttcacaatgcacgcatggagttggaaggagttcaacagacagacagtttttctttatcaaccggcggccttgtgacccagcaaaggtctgcagactcgtgaatgaggtctaccacatgtataatcgacaccagtatccatttgttgttcttaacatttctgttgattcagaatgcgttgatatcaatgttactccagataaaaggcaaattttgctacaagaggaaaagcttttgttggcagttttaaagacctctttgataggaatgtttgatagtgatgtcaacaagctaaatgtcagtcagcagccactgctggatgttgaaggtaacttaataaaaatgcatgcagcggatttggaaaagcccatggtagaaaagcaggatcaatccccttcattaaggactggagaagaaaaaaaagacgtgtccatttccagactgcgagaggccttttctcttcgtcacacaacagagaacaagcctcacagcccaaagactccagaaccaagaaggagccctctaggacagaaaaggggtatgctgtcttctagcacttcaggtgccatctctgacaaaggcgtcctgagacctcagaaagaggcagtgagttccagtcacggacccagtgaccctacggacagagcggaggtggagaaggactcggggcacggcagcacttccgtggattctgaggggttcagcatcccagacacgggcagtcactgcagcagcgagtatgcggccagctccccaggggacaggggctcgcaggaacatgtggactctcaggagaaagcgcctaaaactgacgactctttttcagatgtggactgccattcaaaccaggaagataccggatgtaaatttcgagttttgcctcagccaactaatctcgcaaccccaaacacaaagcgttttaaaaaagaagaaattctttccagttctgacatttgtcaaaagttagtaaatactcaggacatgtcagcctctcaggttgatgtagctgtgaaaattaataagaaagttgtgcccctggacttttctatgagttctttagctaaacgaataaagcagttacatcatgaagcacagcaaagtgaaggggaacagaattacaggaagtttagggcaaagatttgtcctggagaaaatcaagcagccgaagatgaactaagaaaagagataagtaaaacgatgtttgcagaaatggaaatcattggtcagtttaacctgggatttataataaccaaactgaatgaggatatcttcatagtggaccagcatgccacggacgagaagtataacttcgagatgctgcagcagcacaccgtgctccaggggcagaggctcatagcacctcagactctcaacttaactgctgttaatgaagctgttctgatagaaaatctggaaatatttagaaagaatggctttgattttgttatcgatgaaaatgctccagtcactgaaagggctaaactgatttccttgccaactagtaaaaactggaccttcggaccccaggacgtcgatgaactgatcttcatgctgagcgacagccctggggtcatgtgccggccttcccgagtcaagcagatgtttgcctccagagcctgccggaagtcggtgatgattgggactgctcttaacacaagcgagatgaagaaactgatcacccacatgggggagatggaccacccctggaactgtccccatggaaggccaaccatgagacacatcgccaacctgggtgtcatttctcagaactgaccgtagtcactgtatggaataattggttttatcgcagatttttatgttttgaaagacagagtcttcactaaccttttttgttttaaaatgaacctgctacttaaaaaaaatacacatcacacccatttaaaagtgatcttgagaaccttttcaaaccaga

SEQ ID NO: 166824 - DNA, 1386 bp, Homo sapiens
  Payload ID: 12841
  Gene Symbol: PMS2
  Gene Name: PMS1 homolog 2, mismatch repair system component
  Uniprot ID: P54278
  ENST ID: ENST00000382321
  CDS Start-End: 1-1386
atggagcgagctgagagctcgagtacagaacctgctaaggccatcaaacctattgatcggaagtcagtccatcagatttgctctgggcaggtggtactgagtctaagcactgcggtaaaggagttagtagaaaacagtctggatgctggtgccactaatattgatctaaagcttaaggactatggagtggatcttattgaagtttcagacaatggatgtggggtagaagaagaaaacttcgaaggcttaactctgaaacatcacacatctaagattcaagagtttgccgacctaactcaggttgaaacttttggctttcggggggaagctctgagctcactttgtgcactgagcgatgtcaccatttctacctgccacgcatcggcgaaggttggaactcgactgatgtttgatcacaatgggaaaattatccagaaaaccccctacccccgccccagagggaccacagtcagcgtgcagcagttattttccacactacctgtgcgccataaggaatttcaaaggaatattaagaaggagtatgccaaaatggtccaggtcttacatgcatactgtatcatttcagcaggcatccgtgtaagttgcaccaatcagcttggacaaggaaaacgacagcctgtggtatgcacaggtggaagccccagcataaaggaaaatatcggctctgtgtttgggcagaagcagttgcaaagcctcattccttttgttcagctgccccctagtgactccgtgtgtgaagagtacggtttgagctgttccgatgctctgcataatcttttttataaaacgatgtttgcagaaatggaaatcattggtcagtttaacctgggatttataataaccaaactgaatgaggatatcttcatagtggaccagcatgccacggacgagaagtataacttcgagatgctgcagcagcacaccgtgctccaggggcagaggctcatagcacctcagactctcaacttaactgctgttaatgaagctgttctgatagaaaatctggaaatatttagaaagaatggctttgattttgttatcgatgaaaatgctccagtcactgaaagggctaaactgatttccttgccaactagtaaaaactggaccttcggaccccaggacgtcgatgaactgatcttcatgctgagcgacagccctggggtcatgtgccggccttcccgagtcaagcagatgtttgcctccagagcctgccggaagtcggtgatgattgggactgctcttaacacaagcgagatgaagaaactgatcacccacatgggggagatggaccacccctggaactgtccccatggaaggccaaccatgagacacatcgccaacctgggtgtcatttctcagaactga

SEQ ID NO: 166825 - DNA, 2730 bp, Homo sapiens
  Payload ID: 12841
  Gene Symbol: PMS2
  Gene Name: PMS1 homolog 2, mismatch repair system component
  ENST ID: ENST00000441476
  CDS Start-End: 303-2573
agccaatgggagttcaggaggcggagcgcctgtgggagccctggagggaactttcccagtccccgaggcggatcgggtgttgcatccatggagcgagctgagagctcgagtacagaacctgctaaggccatcaaacctattgatcggaagtcagtccatcagatttgctctgggcaggtggtactgagtctaagcactgcggtaaaggagttagtagaaaacagtctggatgctggtgccactaatattgatctaaagcttaaggactatggagtggatcttattgaagtttcagacaatggatgtggggtagaagaagaaaacttcgaaggcttaacgatgtcaccatttctacctgccacgcatcggcgaaggttggaactcgactgatgtttgatcacaatgggaaaattatccagaaaaccccctacccccgccccagagggaccacagtcagcgtgcagcagttattttccacactacctgtgcgccataaggaatttcaaaggaatattaagaaggagtatgccaaaatggtccaggtcttacatgcatactgtatcatttcagcaggcatccgtgtaagttgcaccaatcagcttggacaaggaaaacgacagcctgtggtatgcacaggtggaagccccagcataaaggaaaatatcggctctgtgtttgggcagaagcagttgcaaagcctcattccttttgttcagctgccccctagtgactccgtgtgtgaagagtacggtttgagctgttccgatgctctgcataatcttttttacatctcaggtttcatttcacaatgcacgcatggagttggaaggagttcaacagacagacagtttttctttatcaaccggcggccttgtgacccagcaaaggtctgcagactcgtgaatgaggtctaccacatgtataatcgacaccagtatccatttgttgttcttaacatttctgttgattcagaatgcgttgatatcaatgttactccagataaaaggcaaattttgctacaagaggaaaagcttttgttggcagttttaaagacctctttgataggaatgtttgatagtgatgtcaacaagctaaatgtcagtcagcagccactgctggatgttgaaggtaacttaataaaaatgcatgcagcggatttggaaaagcccatggtagaaaagcaggatcaatccccttcattaaggactggagaagaaaaaaaagacgtgtccatttccagactgcgagaggccttttctcttcgtcacacaacagagaacaagcctcacagcccaaagactccagaaccaagaaggagccctctaggacagaaaaggggtatgctgtcttctagcacttcaggtgccatctctgacaaaggcgtcctgagacctcagaaagaggcagtgagttccagtcacggacccagtgaccctacggacagagcggaggtggagaaggactcggggcacggcagcacttccgtggattctgaggggttcagcatcccagacacgggcagtcactgcagcagcgagtatgcggccagctccccaggggacaggggctcgcaggaacatgtggactctcaggagaaagcgcctaaaactgacgactctttttcagatgtggactgccattcaaaccaggaagataccggatgtaaatttcgagttttgcctcagccaactaatctcgcaaccccaaacacaaagcgttttaaaaaagaagaaattctttccagttctgacatttgtcaaaagttagtaaatactcaggacatgtcagcctctcaggttgatgtagctgtgaaaattaataagaaagttgtgcccctggacttttctatgagttctttagctaaacgaataaagcagttacatcatgaagcacagcaaagtgaaggggaacagaattacaggaagtttagggcaaagatttgtcctggagaaaatcaagcagccgaagatgaactaagaaaagagataagtaaaacgatgtttgcagaaatggaaatcattggtcagtttaacctgggatttataataaccaaactgaatgaggatatcttcatagtggaccagcatgccacggacgagaagtataacttcgagatgctgcagcagcacaccgtgctccaggggcagaggctcatagcacctcagactctcaacttaactgctgttaatgaagctgttctgatagaaaatctggaaatatttagaaagaatggctttgattttgttatcgatgaaaatgctccagtcactgaaagggctaaactgatttccttgccaactagtaaaaactggaccttcggaccccaggacgtcgatgaactgatcttcatgctgagcgacagccctggggtcatgtgccggccttcccgagtcaagcagatgtttgcctccagagcctgccggaagtcggtgatgattgggactgctcttaacacaagcgagatgaagaaactgatcacccacatgggggagatggaccacccctggaactgtccccatggaaggccaaccatgagacacatcgccaacctgggtgtcatttctcagaactgaccgtagtcactgtatggaataattggttttatcgcagatttttatgttttgaaagacagagtcttcactaaccttttttgttttaaaatgaacctgctacttaaaaaaaatacacatcacacccatttaaaagtgatcttgagaaccttttcaaacc

SEQ ID NO: 166826 - DNA, 5112 bp, Homo sapiens
  Payload ID: 12842
  Gene Symbol: PNISR
  Gene Name: PNN-interacting serine/arginine-rich protein
  Uniprot ID: Q8TF01
  ENST ID: ENST00000369239
  CDS Start-End: 206-2623
atcttgtcttgttcccgaagaagtagaagcatcgaaagcgttggagaggtgttaccggaacggcggcgacaagggtgttcccgaactagagtggggcatacataatcttgctgctatgcttcgaagctgtagtctgaatcaacctaagttttaaacagaaggtgaacctctgagatagaaaatcaagtatattttaaaagaagggatgtgggatcaaggaggacagccttggcagcagtggcccttgaaccagcaacaatggatgcagtcattccagcaccaacaggatccaagccagattgattgggctgcattggcccaagcttggattgcccaaagagaagcttcaggacagcaaagcatggtagaacaaccaccaggaatgatgccaaatggacaagatatgtctacaatggaatctggtccaaacaatcatgggaatttccaaggggattcaaacttcaacagaatgtggcaaccagaatggggaatgcatcagcaacccccacacccccctccagatcagccatggatgccaccaacaccaggcccaatggacattgttcctccttctgaagacagcaacagtcaggacagtggggaatttgcccctgacaacaggcatatatttaaccagaacaatcacaactttggtggaccacccgataattttgcagtggggccagtgaaccagtttgactatcagcatggggctgcttttggtccaccgcaaggtggatttcatcctccttattggcaaccaggacctccaggacctccagcacctccccagaatcgaagagaaaggccatcatcattcagggatcgtcagcgttcacctattgcacttcctgtgaagcaggagcctccacaaattgacgcagtaaaacgcaggactcttcccgcttggattcgcgaaggtcttgaaaaaatggaacgtgaaaagcagaagaaattggagaaagaaagaatggaacaacaacgttcacaattgtccaaaaaagaaaaaaaggccacagaagatgctgaaggaggggatggccctcgtttacctcagagaagtaaatttgatagtgatgaggaagaagaagacactgaaaatgttgaggctgcaagtagtgggaaagtcaccagaagtccatccccagttcctcaagaagagcacagtgaccctgagatgactgaagaggagaaagagtatcaaatgatgttgctgacaaaaatgcttctaacagaaattctgctggatgtcacagatgaagaaatttattacgtagccaaagatgcacaccgcaaagcaacgaaagctcctgcaaaacagctggcacagtccagtgcactggcttccctcactggactcggtggactgggtggttatggatcaggagacagtgaagatgagaggagtgacagaggatctgagtcatctgacactgatgatgaagaattacggcatcgaatccggcaaaaacaggaagctttttggagaaaagaaaaagaacagcagctattacatgataaacagatggaagaagaaaagcagcaaacagaaagggttacaaaagagatgaatgaatttatccataaagagcaaaatagtttatcactactagaagcaagagaagcagacggtgatgtggttaatgaaaagaagagaactccaaatgaaaccacatcagttttagaaccaaaaaaagagcataaagaaaaagaaaaacaaggaaggagtaggtcgggaagttctagtagtggtagttccagtagcaatagcagaactagtagtactagtagtactgtctctagctcttcatacagttctagctcaggtagtagtcgtacttcttctcggtcttcttctcctaaaaggaaaaagagacacagtaggagtagatctccaacaatcaaagctagacgtagcaggagtagaagctattctcgcagaattaaaatagagagcaatagggctagggtaaagattagagatagaaggagatctaatagaaatagcattgaaagagaaagacgacgaaatcggagtccttcccgagagagacgtagaagtagaagtcgctcaagggatagacgaaccaatcgtgccagtcgcagtaggagtcgagataggcgtaaaattgatgatcaacgtggaaatcttagtgggaacagtcataagcataaaggtgaggctaaagaacaagagaggaaaaaggagaggagtcgaagtatagataaagataggaaaaagaaagacaaagaaagggaacgtgaacaggataaaagaaaagagaaacaaaaaagggaagaaaaagattttaagttcagtagtcaggatgatagattaaaaaggaaacgagaaagtgaaagaacattttctaggagtggttctatatctgttaaaatcataagacatgattctagacaggatagtaagaaaagtactaccaaagatagtaaaaaacattcaggctctgattctagtggaaggagcagttctgagtctccaggaagtagcaaagaaaagaaggctaagaagcctaaacatagtcgatcgcgatccgtggagaaatctcaaaggtctggtaagaaggcaagccgcaaacacaagtctaagtcccgatcaaggtagtatactttttaaagtattttgtctgatttttaaaaaaaattgactgaatttattcaaagttgaaagtgtcctttctctctctctttaataaactcagtttggtacttgataaataatcatagtcttaaatgttagaaatcctatataatattatttatttaaaattgcagatttttaatttaaaatacatttttatttttaaattttgtcttttcccttttttttcagatcaacaacccctccccgtcgtaaacgctgaggaatgatgtggcaagaatgccatgatgttctttaaaaaaattccatgagttttaagggcttgtctcattatagaggcacattgtggctgtgtaggtgaaaccagaatcttttttttttttaatctgtaaataggtgtactttttccaatgctgctccaagttacttaataggatttctttgtattacgtttttttcaaaaaatatagtgcataataagactataaacatgccattctctttcagctgtaatgttcttaaaattattcttgaatgtactgtgatgtcaataaagctctttagttcatttttgttaaactcttgcaccttaattttatggttttaatctaaggaacgtacttttataaaaaggcagctggaattttgtataacaggttttaaaggtaccttctctcacctcccccaaagaaaatggtttttacttaatagtttgtcaaagtttgtaaattgtacccatggacttttgccagattccaactttaagggtatgaaagagggctagaaatagacctttacttttcatttggaagtatttgacaactttctaaacttttcttcctattttggggattttcaagtaatatattctctgtgtgtataacgtgtggttcactcctgtaaaatgaaattgctggaatcaatcaagccagtgcaccagtagagttatttgtaaggaacgattgtgtttgacagtaatagtcaagtctggaactatattctacagtcacccacttctgttttagaagcattttgaaacactttttggggttatagaaataagactcatgattcaatatatttatttatatttttaaagtataatatgacctcaaatcaatggaggaatgctgtattatgcaggtttgtgtcaatttcctgacattaaaattgtctgattttgtccgtttcttaaaattatgattagtgagtggtctaacagtttaaggcattgataacttacaagtagaatggggctctcaaagcattttaactcagttgctttagggtccatttttttatgtaatcacttactcagtgataaatgaatctctgaaaacaaatgcttttacattttaatttaaaaagaaaacaggtgcaggccacagaaaagttttaaagtatgccttcttaccagcaatagttcattttaaaaatcatgccagatttttgccaagatcagtgtttcctcaacatgaagatagaaatagatttgtatagtgtgctcttgtacctctacatagattattatataattttgagcagttacacatttatctaaaggaaataaatcaactgtgaataaatgcatgtttaccaaaatggctgtttacagtgcatttagttctgatatttataaagatgacatttcacagaataactttaaaatagtttgaaattctatatagtttagacatcgatcacatctggagacaaaataaaatgtgcaatattttttatgtaggcgagctaacacagtgtacctaattgcagaattatctgattaatttgtaatagataagttgtataacattttcatatcttaaaatgttttttagatcaatcttgaagtgaaatattttcaaaataaaattctacagaaaaattctgttggctatgatatgcacatttttgggcaagttatgaactagagccaaaagtagtatttgacagttttatttactctgccgtaatttgcaagcttatcagttaagtctgtagtttttttaaaagccgtcatgatatttgtgattattagtacataaaccagtgttataatttgatatttgggtttttcagacttttagtggcagatttagagaattctttattttcttgacatgtgatatagtatttatttaccttgagtggtaaggttttataaggtagggtttccatgatttaggatgtgaatgcaaaaacttacacataagttaattagatgtataatttggttatgaaatcttttctaaaataataccaccagaaaattaacagatcaaatttttgagacaatccttggtctggattggttaatgaaaatgtcttgtttaagaggttctattaaaaaatatttctagtgtattagtcataattgtttttgtggagtgggggtaaaccacaccattaagggaataaaatgtaatttgaaagaggtgattataagatttgtttcaggccccaaaatataaataaaaattggtgtggaatct

SEQ ID NO: 166827 - DNA, 3142 bp, Homo sapiens
  Payload ID: 12842
  Gene Symbol: PNISR
  Gene Name: PNN-interacting serine/arginine-rich protein
  Uniprot ID: Q8TF01
  ENST ID: ENST00000438806
  CDS Start-End: 149-2566
ccgggtgagacaaatcgggcgccatcttgtcttgttcccgaagaagtagaagcatcgaaagcgttggagaggtgttaccggaacggcggcgacaagggtgttcccgaactagagtggatagaaaatcaagtatattttaaaagaagggatgtgggatcaaggaggacagccttggcagcagtggcccttgaaccagcaacaatggatgcagtcattccagcaccaacaggatccaagccagattgattgggctgcattggcccaagcttggattgcccaaagagaagcttcaggacagcaaagcatggtagaacaaccaccaggaatgatgccaaatggacaagatatgtctacaatggaatctggtccaaacaatcatgggaatttccaaggggattcaaacttcaacagaatgtggcaaccagaatggggaatgcatcagcaacccccacacccccctccagatcagccatggatgccaccaacaccaggcccaatggacattgttcctccttctgaagacagcaacagtcaggacagtggggaatttgcccctgacaacaggcatatatttaaccagaacaatcacaactttggtggaccacccgataattttgcagtggggccagtgaaccagtttgactatcagcatggggctgcttttggtccaccgcaaggtggatttcatcctccttattggcaaccaggacctccaggacctccagcacctccccagaatcgaagagaaaggccatcatcattcagggatcgtcagcgttcacctattgcacttcctgtgaagcaggagcctccacaaattgacgcagtaaaacgcaggactcttcccgcttggattcgcgaaggtcttgaaaaaatggaacgtgaaaagcagaagaaattggagaaagaaagaatggaacaacaacgttcacaattgtccaaaaaagaaaaaaaggccacagaagatgctgaaggaggggatggccctcgtttacctcagagaagtaaatttgatagtgatgaggaagaagaagacactgaaaatgttgaggctgcaagtagtgggaaagtcaccagaagtccatccccagttcctcaagaagagcacagtgaccctgagatgactgaagaggagaaagagtatcaaatgatgttgctgacaaaaatgcttctaacagaaattctgctggatgtcacagatgaagaaatttattacgtagccaaagatgcacaccgcaaagcaacgaaagctcctgcaaaacagctggcacagtccagtgcactggcttccctcactggactcggtggactgggtggttatggatcaggagacagtgaagatgagaggagtgacagaggatctgagtcatctgacactgatgatgaagaattacggcatcgaatccggcaaaaacaggaagctttttggagaaaagaaaaagaacagcagctattacatgataaacagatggaagaagaaaagcagcaaacagaaagggttacaaaagagatgaatgaatttatccataaagagcaaaatagtttatcactactagaagcaagagaagcagacggtgatgtggttaatgaaaagaagagaactccaaatgaaaccacatcagttttagaaccaaaaaaagagcataaagaaaaagaaaaacaaggaaggagtaggtcgggaagttctagtagtggtagttccagtagcaatagcagaactagtagtactagtagtactgtctctagctcttcatacagttctagctcaggtagtagtcgtacttcttctcggtcttcttctcctaaaaggaaaaagagacacagtaggagtagatctccaacaatcaaagctagacgtagcaggagtagaagctattctcgcagaattaaaatagagagcaatagggctagggtaaagattagagatagaaggagatctaatagaaatagcattgaaagagaaagacgacgaaatcggagtccttcccgagagagacgtagaagtagaagtcgctcaagggatagacgaaccaatcgtgccagtcgcagtaggagtcgagataggcgtaaaattgatgatcaacgtggaaatcttagtgggaacagtcataagcataaaggtgaggctaaagaacaagagaggaaaaaggagaggagtcgaagtatagataaagataggaaaaagaaagacaaagaaagggaacgtgaacaggataaaagaaaagagaaacaaaaaagggaagaaaaagattttaagttcagtagtcaggatgatagattaaaaaggaaacgagaaagtgaaagaacattttctaggagtggttctatatctgttaaaatcataagacatgattctagacaggatagtaagaaaagtactaccaaagatagtaaaaaacattcaggctctgattctagtggaaggagcagttctgagtctccaggaagtagcaaagaaaagaaggctaagaagcctaaacatagtcgatcgcgatccgtggagaaatctcaaaggtctggtaagaaggcaagccgcaaacacaagtctaagtcccgatcaaggtagtatactttttaaagtattttgtctgatttttaaaaaaaattgactgaatttattcaaagttgaaagtgtcctttctctctctctttaataaactcagtttggtacttgataaataatcatagtcttaaatgttagaaatcctatataatattatttatttaaaattgcagatttttaatttaaaatacatttttatttttaaattttgtcttttcccttttttttcagatcaacaacccctccccgtcgtaaacgctgaggaatgatgtggcaagaatgccatgatgttctttaaaaaaattccatgagttttaagggcttgtctcattatagaggcacattgtggctgtgtaggtgaaaccagaatcttttttttttttaatctgtaaataggtgtactttttccaatgctgctccaagttacttaataggatttctttgtattacgtttttttcaaaaaatatagtgcataataagactataaacatgccattctctttcagctgtaatgttcttaaaattattcttgaatgtactgtgatgtcaataaagctctttagttcatttttgttaaa

SEQ ID NO: 166828 - DNA, 2422 bp, Homo sapiens
  Payload ID: 12842
  Gene Symbol: PNISR
  Gene Name: PNN-interacting serine/arginine-rich protein
  Uniprot ID: Q8TF01
  ENST ID: ENST00000478777
  CDS Start-End: 206-1447
atcttgtcttgttcccgaagaagtagaagcatcgaaagcgttggagaggtgttaccggaacggcggcgacaagggtgttcccgaactagagtggggcatacataatcttgctgctatgcttcgaagctgtagtctgaatcaacctaagttttaaacagaaggtgaacctctgagatagaaaatcaagtatattttaaaagaagggatgtgggatcaaggaggacagccttggcagcagtggcccttgaaccagcaacaatggatgcagtcattccagcaccaacaggatccaagccagattgattgggctgcattggcccaagcttggattgcccaaagagaagcttcaggacagcaaagcatggtagaacaaccaccaggaatgatgccaaatggacaagatatgtctacaatggaatctggtccaaacaatcatgggaatttccaaggggattcaaacttcaacagaatgtggcaaccagaatggggaatgcatcagcaacccccacacccccctccagatcagccatggatgccaccaacaccaggcccaatggacattgttcctccttctgaagacagcaacagtcaggacagtggggaatttgcccctgacaacaggcatatatttaaccagaacaatcacaactttggtggaccacccgataattttgcagtggggccagtgaaccagtttgactatcagcatggggctgcttttggtccaccgcaaggtggatttcatcctccttattggcaaccaggacctccaggacctccagcacctccccagaatcgaagagaaaggccatcatcattcagggatcgtcagcgttcacctattgcacttcctgtgaagcaggagcctccacaaattgacgcagtaaaacgcaggactcttcccgcttggattcgcgaaggtcttgaaaaaatggaacgtgaaaagcagaagaaattggagaaagaaagaatggaacaacaacgttcacaattgtccaaaaaagaaaaaaaggccacagaagatgctgaaggaggggatggccctcgtttacctcagagaagtaaatttgatagtgatgaggaagaagaagacactgaaaatgttgaggctgcaagtagtgggaaagtcaccagaagtccatccccagttcctcaagaagagcacagtgaccctgagatgactgaagaggagaaagagtatcaaatgatgttgctgacaaaaatgcttctaacagaaattctgctggatgtcacagatgaagaaatttattacgtagccaaagatgcacaccgcaaagcaacgaaaggtatattttggtgtttctggttttgcttttcctggggtattttggttctgatgactattttggcctttttttgttgtccttgttggatttctaccagatatttgaatattctcttgcatgttttaactcttaaagattagattcgtagacaccatattaaagctatacaaatatttttgttttatctgacctacatgagtacaaattagcaatcatgctgttttcctctaaaatgtattgtggaaaattccaggtgttcagtttatttcacctgattttttttaatagataacatggcattgttgtgtgacttctgatacagtttattttgactaatgaattttgaattatctacctacaatttttagtttaccacttatctcttacagaagcaagtgatttcctacccctagatttttagtaacaccttaaaaatgtattgaaaacaaaaattaagttacatgtcataatctcagaagtagacatacagatatacctgtcaacattttttctcattataaaccaatttcagctcacatcagagttataatttcaaagccagacatgatactggtttaaaatgaatgttatgtttttaatgtttcttctctccccaaaaagcagcaatagtagtagatttaacaataccatagactcatgactatgaaatcgtggctatttgtgttaacatgttgttcctgttgttgatgtgatacaaagctcctgcaaaacagctggcacagtccagtgcactggcttccctcactggactcggtggactgggtggttatggatcaggagacagtgaagatgagaggagtgacagaggatctgagtcatctgacactgatgatgaagaattacggcatcgaatccggcaaaaacaggaagctttttggagaaaagaaaaagaacagcagctattacatgataaacagatggaagaagaaaagcagcaaacagaaagggttacaaaagagatgaatgaatttatccataaagagcaaaatagtttatcactactagaagcaagagaagcagacggtgatgtggttaatgaaaagaagagaactccaaatgaaaccacatcagttttagaaccaaaaaaagagcat

SEQ ID NO: 166829 - DNA, 1898 bp, Homo sapiens
  Payload ID: 12843
  Gene Symbol: POC1A
  Gene Name: POC1 centriolar protein A
  Uniprot ID: Q8NBT0
  ENST ID: ENST00000296484
  CDS Start-End: 41-1264
aacggccaccgcagctgccttcggcgccgccagccccgccatggctgcgccctgcgcggaggacccctcgctggaaaggcattttaagggccaccgagatgcagttacctgtgtggacttcagtatcaacacaaagcagctggccagtggctccatggactcatgcctcatggtctggcacatgaagccgcagtcacgcgcctaccgcttcactggccacaaggatgccgtcacctgtgtgaacttctctccttcgggacacctgcttgcttccggctcccgagacaagactgtccgcatctgggtacccaatgtcaaaggtgagtccactgtgtttcgtgcacacacagccacagtgaggagtgtccacttctgcagtgatggccagtccttcgtgacagcctctgacgacaagacagtcaaagtgtgggcaactcatcgccagaaattcctgttctccctgagccagcatatcaactgggtccgctgtgccaagttctcccccgacgggcggctcatcgtgtctgccagtgatgacaagactgttaagctgtgggacaagagcagccgggaatgtgtccactcgtattgtgagcatggcggctttgtcacctatgtggacttccaccccagtgggacgtgcattgccgctgccggcatggacaacacagtgaaggtgtgggacgtgcggactcaccggctgctgcagcattatcagttgcacagtgcagcagtgaacgggctctctttccacccgtcgggaaactacctgatcacagcctccagtgactcaaccctgaagatcctggacctgatggagggccggctgctctacacactccacgggcatcagggaccagccaccactgttgccttttcaagaacgggggagtattttgcttctggaggctctgatgaacaagtgatggtttggaagagtaactttgatattgttgatcatggagaagtcacgaaagtgccgaggcccccagccacactggccagctccatggggaatctgccagaagtggacttccctgtccccccaggcagaggcaggagtgtggagtctgtgcagagccagccccaggagcccgtgagtgtgccccagacactgactagcacgctggagcacattgtgggccagctggatgtcctcactcagacagtctccattctggagcagcggttgacactgacagaagacaagctgaagcagtgtctggagaaccagcagctaatcatgcagagagcaacaccatgatcaggggagcaggaatcaggagctcggtggatttgcaggtggcaggccagggatttgtaccatgggacttgggtaaataaaggggactgaactctgtgggaatcacatccatactggagccctggatttttgcagttctgccctccaccttgctatctgcaccaggaggctctccacctggcagccagaggtccccagtgggccgggctcacacacaaatgatgcttcagacccgaatgagaggaccacattttgcttaatgtaaaggagccacttgaaaatgtctgctccttcggggtcctgagattgtggctccccctctggaggaggtggctccacgatgccttgattttcactcatcatttggacatgtgactggcttttcctacctctgccatggtgtagaaattgattgcacattgattggatgagccgggggttttctctaaatctgactaaaggcccaaagtgggcccatctgagtcaggtttgttgagaacaagccctctcaagtgggtggtggcttttcagtggccctgatttctgttccacacgtgttcactggagccaggtgacttcctccttgcgtgagtgagggcacaggaatctcaaaattaaacctgacttcattgca

SEQ ID NO: 166830 - DNA, 1999 bp, Homo sapiens
  Payload ID: 12843
  Gene Symbol: POC1A
  Gene Name: POC1 centriolar protein A
  Uniprot ID: Q8NBT0
  ENST ID: ENST00000394970
  CDS Start-End: 319-1398
gggctggtggggtgaacccttcatcctgggtcttttaatttctcaggcggaacgagtggcggcggacagaggcttttggctgcgctgtctgtgggttgtctgggcttggggaactgggcacggagaccgtggcgccggccgccggtcatacagctctgcttccagtcgtcgggcaaaaagctgaggcgcttctcctttaattgcggtgggcggggcgtgccgacgcggcccgcgttgctattggtggccgttgggggcgcggaaactgaacgggccgcaacggccaccgcagctgccttcggcgccgccagccccgccatggctgcgccctgcgcggaggacccctcgctggaaaggcattttaagggccaccgagatgcagttacctgtgtggacttcagtatcaacacaaagcagctggccagtggctccatggactcatgcctcatggtctggcacatgaagccgcagtcacgcgcctaccgcttcactggccacaaggatgccgtcacctgtgtgaacttctctccttcgggacacctgcttgcttccggctcccgagacaagactgtccgcatctgggtacccaatgtcaaaggtgagtccactgtgtttcgtgcacacacagccacagtgaggagtgtccacttctgcagtgatggccagtccttcgtgacagcctctgacgacaagacagtcaaagtgtgggcaactcatcgccagaaattcctgttctccctgagccagcatatcaactgggtccgctgtgccaagttctcccccgacgggcggctcatcgtgtctgccagtgatgacaagactgttaagctgtgggacaagagcagccgggaatgtgtccactcgtattgtgagcatggcggctttgtcacctatgtggacttccaccccagtgggacgtgcattgccgctgccggcatggacaacacagtgaaggtgtgggacgtgcggactcaccggctgctgcagcattatcagttgcacagtgcagcagtgaacgggctctctttccacccgtcgggaaactacctgatcacagcctccagtgactcaaccctgaagatcctggacctgatggagggccggctgctctacacactccacgggcatcagggaccagccaccactgttgccttttcaagaacgggggagtattttgcttctggaggctctgatgaacaagtgatggtttggaagagtaactttgatattgttgatcatggagaagtcacgaaagtgccgaggcccccagccacactggccagctccatggggaatctgacagtctccattctggagcagcggttgacactgacagaagacaagctgaagcagtgtctggagaaccagcagctaatcatgcagagagcaacaccatgatcaggggagcaggaatcaggagctcggtggatttgcaggtggcaggccagggatttgtaccatgggacttgggtaaataaaggggactgaactctgtgggaatcacatccatactggagccctggatttttgcagttctgccctccaccttgctatctgcaccaggaggctctccacctggcagccagaggtccccagtgggccgggctcacacacaaatgatgcttcagacccgaatgagaggaccacattttgcttaatgtaaaggagccacttgaaaatgtctgctccttcggggtcctgagattgtggctccccctctggaggaggtggctccacgatgccttgattttcactcatcatttggacatgtgactggcttttcctacctctgccatggtgtagaaattgattgcacattgattggatgagccgggggttttctctaaatctgactaaaggcccaaagtgggcccatctgagtcaggtttgttgagaacaagccctctcaagtgggtggtggcttttcagtggccctgatttctgttccacacgtgttcactggagccaggtgacttcctccttgcgtgagtgagggcac

SEQ ID NO: 166831 - DNA, 1760 bp, Homo sapiens
  Payload ID: 12843
  Gene Symbol: POC1A
  Gene Name: POC1 centriolar protein A
  Uniprot ID: Q8NBT0
  ENST ID: ENST00000474012
  CDS Start-End: 218-1327
ccgcagctgccttcggcgccgccagccccgccatggctgcgccctgcgcggaagagtgctggccctggggaagccccttcctcacccaggcttcacacatttgaccctggctctctctcaggaggacccctcgctggaaaggcattttaagggccaccgagatgcagttacctgtgtggacttcagtatcaacacaaagcagctggccagtggctccatggactcatgcctcatggtctggcacatgaagccgcagtcacgcgcctaccgcttcactggccacaaggatgccgtcacctgtgtgaacttctctccttcgggacacctgcttgcttccggctcccgagacaagactgtccgcatctgggtacccaatgtcaaaggtgagtccactgtgtttcgtgcacacacagccacagtgaggagtgtccacttctgcagtgatggccagtccttcgtgacagcctctgacgacaagacagtcaaagtgtgggcaactcatcgccagaaattcctgttctccctgagccagcatatcaactgggtccgctgtgccaagttctcccccgacgggcggctcatcgtgtctgccagtgatgacaagactgttaagctgtgggacaagagcagccgggaatgtgtccactcgtattgtgagcatggcggctttgtcacctatgtggacttccaccccagtgggacgtgcattgccgctgccggcatggacaacacagtgaaggtgtgggacgtgcggactcaccggctgctgcagcattatcagttgcacagtgcagcagtgaacgggctctctttccacccgtcgggaaactacctgatcacagcctccagtgactcaaccctgaagatcctggacctgatggagggccggctgctctacacactccacgggcatcagggaccagccaccactgttgccttttcaagaacgggggagtattttgcttctggaggctctgatgaacaagtgatggtttggaagagtaactttgatattgttgatcatggagaagtcacgaaagtgccgaggcccccagccacactggccagctccatggggaatctgccagaagtggacttccctgtccccccaggcagaggcaggagtgtggagtctgtgcagagccagccccaggagcccgtgagtgtgccccagacactgactagcacgctggagcacattgtgggccagctggatgtcctcactcagacagtctccattctggagcagcggttgacactgacagaagacaagctgaagcagtgtctggagaaccagcagctaatcatgcagagagcaacaccatgatcaggggagcaggaatcaggagctcggtggatttgcaggtggcaggccagggatttgtaccatgggacttgggtaaataaaggggactgaactctgtgggaatcacatccatactggagccctggatttttgcagttctgccctccaccttgctatctgcaccaggaggctctccacctggcagccagaggtccccagtgggccgggctcacacacaaatgatgcttcagacccgaatgagaggaccacattttgcttaatgtaaaggagccacttgaaaatgtctgctccttcggggtcctgagattgtggctccccctctggaggaggtggctccacgatgccttgattttcactcatcatttggacatgtgactggcttttcctacctctgccatggtgtagaaattgattgcacattgattggatgagc

SEQ ID NO: 166832 - DNA, 3001 bp, Homo sapiens
  Payload ID: 12844
  Gene Symbol: POC1B
  Gene Name: POC1 centriolar protein B
  Uniprot ID: Q8TC44
  ENST ID: ENST00000313546
  CDS Start-End: 130-1566
gaccgggaggcgctgccgctctgggcagacggttccgggagccgcacggtcccctctccttccccatcctctcccctcccctctccgggttcccccacccacaggagccttgggccgaccactcccccgatggcctcagccacggaggaccccgttctggagcgttatttcaaaggccacaaagctgcgatcacctccttggacctcagccccaacggcaagcaacttgctactgcttcttgggatacctttctcatgctatggaatttcaagccacatgctagagcttacagatatgtgggtcacaaggatgttgtaaccagcgtgcagttttctccacatggaaacttattggcgtctgcctcacgagacagaaccgtgagactctggattcctgataagagaggaaaattctcagaatttaaagctcatacagctccagttcgaagtgtagacttttcagctgatggccagtttctagctacagcttctgaagacaaatccataaaagtatggagcatgtatcgccagcgcttcctgtattccttgtatcgacatacacactgggtacgctgtgccaaattttcacccgatggaagactaattgtgtcatgtagtgaggataaaactattaaaatttgggataccacaaataagcaatgtgttaataacttctcagattccgttggatttgcaaattttgtggactttaaccctagtggtacatgcatagcttcagcaggttctgatcaaactgtgaaagtctgggatgtaagagtgaacaaattactacagcattaccaagttcacagcggtggagttaattgcatatcattccatccttcgggtaactatctcatcacagcttcttcagatggtacccttaagattctggacctcttagaaggaaggctcatctatacacttcaaggacatacgggacctgtctttactgtttcattttcaaaaggtggagagctatttgcatcaggaggtgcagacacacaggtcttattatggaggactaactttgatgaattgcattgtaaaggtcttaccaaaagaaatctcaaaagattacattttgattcaccaccacatcttcttgatatctacccaagaacaccacatccccatgaggaaaaagttgagactgtagaaattaatccaaagcttgaggtaatcgatttgcagatctctactccccctgttatggatatcctttcttttgattctaccacaacaacagaaaccagtggtaggactctgccagacaagggtgaagaggcctgtggatatttcttgaacccttccttaatgtcaccagaatgtttgccaacaaccacgaaaaagaaaacagaagacatgagtgacctcccctgtgaaagtcaaaggagcatacctctcgctgtgactgatgctttagagcatattatggaacaactcaatgttttgacacagactgtttcaatcttggagcagcgactgactttgacagaggataagctgaaagactgccttgaaaatcagcaaaagcttttcagtgctgtccaacagaaaagctgaataaaaaattcattttcatttgttgggcagaggcccaataaatgaacaaatgtacatacactcaggaaggtagtacaagatactccatacaacacaaccatgtgctatttatcatggcatttcttaaaagggtgagcaacagaacaaaaggcagaaaaggcatacctaaggactaatttaaacacatatcaatgtgaaggactaatttaaattactatcatttatgattgcagtaataaagtgataagcattcaagcaactctgtattttccccatattattttaaatgtccattttcatttataggccaaatcctgccaggaaagtaaccagatctctggatttcactgttaagtcatttcagattgaccatattcagacagtcatggggtgaaataattcacttacctccaaaatagcatcctatatgccaataatgagttattgatctgactagttgtatgtctttctgttcaaaatagaaattatcctttcttactaatgccttgaaagaatgaacaaataaaaattcccagaccacagaatttccacagcaagaatacacttattttaattaacaatagcacagatatagcatagggcagtgggttttttagttaatttatggcgtactttgtttatccattggccaacctgaaggaaatgaaactcacctatctttctatcacagatgaatgtgctagatgaatgatttgggttgtatctgatcatggttcacaaaaattatgttagtgtgttttcagtatgctaaaaagtcagagtgatacaaaagtgatatttaaaaatatacacacatgtatgtacacatgcttcagaaatattgttgcttagggtgatttgggcagctaaatagtaagtactttttaaaatttttgcatcatcatcttcctatttaatgaattgtgatttaaaacaaaatgaaaataagccaggtattctaaaagatcctggatacaaattaagaattttgctttattttaaaccaaattgagattaaattgaagaaaagcaagcaaattaatttcagcttgattatcaacctgtatcaagaacaaaaatgggaggaggtgtccacatttatggtgtgtataggtaacatggggaaaatgctattctgtgttttggaaaagaagaaatagtgccgtcctatttatttctatatttagaaatttttctcaaagaaatttcaattgtatctatgagatgggtttctaagtatcttattgtgtgttataagtgccttttaatatcatactaagtgtgagcttctggacattttcaagagcttacaaaaactaagtggcattgtatttttataaccccattgagaagactaagtaagaaatgaaatgtcctatcaattttattttgtcatgcttcaaacaataaagacatttctgctttaaaagaaaaa

SEQ ID NO: 166833 - DNA, 3096 bp, Homo sapiens
  Payload ID: 12844
  Gene Symbol: POC1B
  Gene Name: POC1 centriolar protein B
  ENST ID: ENST00000393179
  CDS Start-End: 615-1661
tctcggagggtttccgtggagcgcctgcgtcagaatcacctaggaagtattaaaaaaaaaaaaagtaccaaagccgaggcgcatcctcgcacctgcctgccttgggccagcgggcggggcccgggaacgtgcatttcaaaggggccgcggttcctgcgatgcgctggactctgggaagcgcgaacagagcgttttgcgggctctgcggggagagctggcgccggcgtctccctgtagcaggactgggcgccgcgcccgtgggtgggctgctgcccggccccgccgcccagccaagccgccgcctgggtggccattcccaagccggactccggggaagtggcagcgtggatcccagccgccagaattcgaggtctgcggcggctttcaaaacttgacaactttcctttccaggaggaccccgttctggagcgttatttcaaaggccacaaagctgcgatcacctccttggacctcagccccaacggcaagcaacttggagaggaaaattctcagaatttaaagctcatacagctccagttcgaagtgtagacttttcagctgatggccagtttctagctacagcttctgaagacaaatccataaaagtatggagcatgtatcgccagcgcttcctgtattccttgtatcgacatacacactgggtacgctgtgccaaattttcacccgatggaagactaattgtgtcatgtagtgaggataaaactattaaaatttgggataccacaaataagcaatgtgttaataacttctcagattccgttggatttgcaaattttgtggactttaaccctagtggtacatgcatagcttcagcaggttctgatcaaactgtgaaagtctgggatgtaagagtgaacaaattactacagcattaccaagttcacagcggtggagttaattgcatatcattccatccttcgggtaactatctcatcacagcttcttcagatggtacccttaagattctggacctcttagaaggaaggctcatctatacacttcaaggacatacgggacctgtctttactgtttcattttcaaaaggtggagagctatttgcatcaggaggtgcagacacacaggtcttattatggaggactaactttgatgaattgcattgtaaaggtcttaccaaaagaaatctcaaaagattacattttgattcaccaccacatcttcttgatatctacccaagaacaccacatccccatgaggaaaaagttgagactgtagaaattaatccaaagcttgaggtaatcgatttgcagatctctactccccctgttatggatatcctttcttttgattctaccacaacaacagaaaccagtggtaggactctgccagacaagggtgaagaggcctgtggatatttcttgaacccttccttaatgtcaccagaatgtttgccaacaaccacgaaaaagaaaacagaagacatgagtgacctcccctgtgaaagtcaaaggagcatacctctcgctgtgactgatgctttagagcatattatggaacaactcaatgttttgacacagactgtttcaatcttggagcagcgactgactttgacagaggataagctgaaagactgccttgaaaatcagcaaaagcttttcagtgctgtccaacagaaaagctgaataaaaaattcattttcatttgttgggcagaggcccaataaatgaacaaatgtacatacactcaggaaggtagtacaagatactccatacaacacaaccatgtgctatttatcatggcatttcttaaaagggtgagcaacagaacaaaaggcagaaaaggcatacctaaggactaatttaaacacatatcaatgtgaaggactaatttaaattactatcatttatgattgcagtaataaagtgataagcattcaagcaactctgtattttccccatattattttaaatgtccattttcatttataggccaaatcctgccaggaaagtaaccagatctctggatttcactgttaagtcatttcagattgaccatattcagacagtcatggggtgaaataattcacttacctccaaaatagcatcctatatgccaataatgagttattgatctgactagttgtatgtctttctgttcaaaatagaaattatcctttcttactaatgccttgaaagaatgaacaaataaaaattcccagaccacagaatttccacagcaagaatacacttattttaattaacaatagcacagatatagcatagggcagtgggttttttagttaatttatggcgtactttgtttatccattggccaacctgaaggaaatgaaactcacctatctttctatcacagatgaatgtgctagatgaatgatttgggttgtatctgatcatggttcacaaaaattatgttagtgtgttttcagtatgctaaaaagtcagagtgatacaaaagtgatatttaaaaatatacacacatgtatgtacacatgcttcagaaatattgttgcttagggtgatttgggcagctaaatagtaagtactttttaaaatttttgcatcatcatcttcctatttaatgaattgtgatttaaaacaaaatgaaaataagccaggtattctaaaagatcctggatacaaattaagaattttgctttattttaaaccaaattgagattaaattgaagaaaagcaagcaaattaatttcagcttgattatcaacctgtatcaagaacaaaaatgggaggaggtgtccacatttatggtgtgtataggtaacatggggaaaatgctattctgtgttttggaaaagaagaaatagtgccgtcctatttatttctatatttagaaatttttctcaaagaaatttcaattgtatctatgagatgggtttctaagtatcttattgtgtgttataagtgccttttaatatcatactaagtgtgagcttctggacattttcaagagcttacaaaaactaagtggcattgtatttttataaccccattgagaagactaagtaagaaatgaaatgtcctatcaattttattttgtcatgcttcaaacaataaagacatttctgctttaaaagaaaaa

SEQ ID NO: 166834 - DNA, 1392 bp, Homo sapiens
  Payload ID: 12844
  Gene Symbol: POC1B
  Gene Name: POC1 centriolar protein B
  ENST ID: ENST00000547496
  CDS Start-End: 106-258
gcagacggttccgggagccgcacggtcccctctccttccccatcctctcccctcccctctccgggttcccccacccacaggagccttgggccgaccactcccccgatggcctcagccacggaggaccccgttctggagcgttatttcaaaggccacaaagctgcgatcacctccttggacctcagccccaacggcaagcaacttggagaggaaaattctcagaatttaaagctcatacagctccagttcgaagtgtagacttttcagctgatggccagtttctagctacagcttctgaagacaaatccataaaagtatggagcatgtatcgccagcgcttcctgtattccttgtatcgacatacacactgggtacgctgtgccaaattttcacccgatggaagactaattgtgtcatgtagtgaggataaaactattaaaatttgggataccacaaataagcaatgtgttaataacttctcagattccgttggatttgcaaattttgtggactttaaccctagtggtacatgcatagcttcagcaggttctgatcaaactgtgaaagtctgggatgtaagagtgaacaaattactacagcattaccaagttcacagcggtggagttaattgcatatcattccatccttcgggtaactatctcatcacagcttcttcagatggtacccttaagattctggacctcttagaaggaaggctcatctatacacttcaaggacatacgggacctgtctttactgtttcattttcaaaaggtggagagctatttgcatcaggaggtgcagacacacaggtcttattatggaggactaactttgatgaattgcattgtaaaggtcttaccaaaagaaatctcaaaagattacattttgattcaccaccacatcttcttgatatctacccaagaacaccacatccccatgaggaaaaagttgagactgtagaagatttttttcttcatcttttgagattaatccaaagcttgaggtaatcgatttgcagatctctactccccctgttatggatatcctttcttttgattctaccacaacaacagaaaccagtggtaggactctgccagacaagggtgaagaggcctgtggatatttcttgaacccttccttaatgtcaccagaatgtttgccaacaaccacgaaaaagaaaacagaagacatgagtgacctcccctgtgaaagtcaaaggagcatacctctcgctgtgactgatgctttagagcatattatggaacaactcaatgttttgacacagactgtttcaatcttggagcagcgactgactttgacagaggataagctgaaagactgccttgaaaatcagcaaaagcttttcagtgctgtccaacagaaaagctg

SEQ ID NO: 166835 - DNA, 2038 bp, Homo sapiens
  Payload ID: 12844
  Gene Symbol: POC1B
  Gene Name: POC1 centriolar protein B
  Uniprot ID: Q8TC44
  ENST ID: ENST00000549035
  CDS Start-End: 471-1781
aaaaaaaaaaaagtaccaaagccgaggcgcatcctcgcacctgcctgccttgggccagcgggcggggcccgggaacgtgcatttcaaaggggccgcggttcctgcgatgcgctggactctgggaagcgcgaacagagcgttttgcgggctctgcggggagagctggcgccggcgtctccctgtagcaggactgggcgccgcgcccgtgggtgggctgctgcccggccccgccgcccagccaagccgccgcctgggtggccattcccaagccggactccggggaagtggcagcgtggatcccagccgccagaattcgaggtctgcggcggctttcaaaacttgacaactttcctttccaggaggaccccgttctggagcgttatttcaaaggccacaaagctgcgatcacctccttggacctcagccccaacggcaagcaacttgctactgcttcttgggatacctttctcatgctatggaatttcaagccacatgctagagcttacagatatgtgggtcacaaggatgttgtaaccagcgtgcagttttctccacatggaaacttattggcgtctgcctcacgagacagaaccgtgagactctggattcctgataagagaggaaaattctcagaatttaaagctcatacagctccagttcgaagtgtagacttttcagctgatggccagtttctagctacagcttctgaagacaaatccataaaagtatggagcatgtatcgccagcgcttcctgtattccttgtatcgacatacacactgggtacgctgtgccaaattttcacccgatggaagactaattgtgtcatgtagtgaggataaaactattaaaatttgggataccacaaataagcaatgtgttaataacttctcagattccgttggatttgcaaattttgtggactttaaccctagtggtacatgcatagcttcagcaggttctgatcaaactgtgaaagtctgggatgtaagagtgaacaaattactacagcattaccaagttcacagcggtggagttaattgcatatcattccatccttcgggtaactatctcatcacagcttcttcagatggtacccttaagattctggacctcttagaaggaaggctcatctatacacttcaaggacatacgggacctgtctttactgtttcattttcaaaaggtggagagctatttgcatcaggaggtgcagacacacaggtcttattatggaggactaactttgatgaattgcattgtaaaggtcttaccaaaagaaatctcaaaagattacattttgattcaccaccacatcttcttgatatctacccaagaacaccacatccccatgaggaaaaagttgagactgtagaaattaatccaaagcttgaggtaatcgatttgcagatctctactccccctgttatggatatcctttcttttgattctaccacaacaacagaaaccagtggtaggactctgccagacaagggtgaagaggcctgtggatatttcttgaacccttccttaatgtcaccagaatgtttgccaacaaccacgaaaaagaaaacagaagacatgagtgacctcccctgtgaaagtcaaaggagcatacctctcgctgtgactgatgctttagagcatattatggaacaactcaatgttttgacacagactgtttcaatcttggagcagcgactgactttgacagaggataagctgaaagactgccttgaaaatcagcaaaagcttttcagtgctgtccaacagaaaagctgaataaaaaattcattttcatttgttgggcagaggcccaataaatgaacaaatgtacatacactcaggaaggtagtacaagatactccatacaacacaaccatgtgctatttatcatggcatttcttaaaagggtgagcaacagaacaaaaggcagaaaaggcatacctaaggactaatttaaacacatatcaatgtgaaggactaatttaaattactatcatttatgattgcagtaataaagtgataagcattcaagc

SEQ ID NO: 166836 - DNA, 550 bp, Homo sapiens
  Payload ID: 12844
  Gene Symbol: POC1B
  Gene Name: POC1 centriolar protein B
  ENST ID: ENST00000546830
  CDS Start-End: 106-381
gcagacggttccgggagccgcacggtcccctctccttccccatcctctcccctcccctctccgggttcccccacccacaggagccttgggccgaccactcccccgatggcctcagccacggaggaccccgttctggagcgttatttcaaaggccacaaagctgcgatcacctccttggacctcagccccaacggcaagcaacttgctactgcttcttgggatacctttctcatgctatggaatttcaagccacatgctagagcttacagatatgtgggtcacaaggatgttgtaaccagcgtgcagttttctccacatggaaacttattggcgtctgcctcacgagacagaaccgtgagactctggattcctgataagtaagagaaacaaagaaacacttgatatcctttggatttggaaatgtgaaagaaagctgaccctggctgctgctcatgcactgctgcctgcactgttattctcagtcacataaaaggcatgctgcccttgtggagaggaaaattctcagaatttaaagctcatacagctccag

SEQ ID NO: 166837 - DNA, 473 bp, Homo sapiens
  Payload ID: 12844
  Gene Symbol: POC1B
  Gene Name: POC1 centriolar protein B
  ENST ID: ENST00000547274
  CDS Start-End: 126-278
gggaggcgctgccgctctgggcagacggttccgggagccgcacggtcccctctccttccccatcctctcccctcccctctccgggttcccccacccacaggagccttgggccgaccactcccccgatggcctcagccacggaggaccccgttctggagcgttatttcaaaggccacaaagctgcgatcacctccttggacctcagccccaacggcaagcaacttggagaggaaaattctcagaatttaaagctcatacagctccagttcgaagtgtagacttttcagctgatggccagtttctagctacagcttctgaagacaaatccataaaagtatggagcatgtatcgccagcgcttcctgtattccttgtatcgacatacacactgggtacgctgtgccaattagaacaagagagtttagaccaatgtctggagggcctgattgaccaccaaggcccagcctcccagag

SEQ ID NO: 166838 - DNA, 829 bp, Homo sapiens
  Payload ID: 12844
  Gene Symbol: POC1B
  Gene Name: POC1 centriolar protein B
  ENST ID: ENST00000548715
  CDS Start-End: 103-255
gacggttccgggagccgcacggtcccctctccttccccatcctctcccctcccctctccgggttcccccacccacaggagccttgggccgaccactcccccgatggcctcagccacggaggaccccgttctggagcgttatttcaaaggccacaaagctgcgatcacctccttggacctcagccccaacggcaagcaacttggagaggaaaattctcagaatttaaagctcatacagctccagttcgaagtgtagacttttcagctgatggccagtttctagctacagcttctgaagacaaatccataaaagtatggagcatgtatcgccagcgcttcctgtattccttgtatcgacatacacactgggtacgctgtgccaagtcttattatggaggactaactttgatgaattgcattgtaaaggtcttaccaaaagaaatctcaaaagattacattttgattcaccaccacatcttcttgatatctacccaagaacaccacatccccatgaggaaaaagttgagactgtagaaattaatccaaagcttgaggtaatcgatttgcagatctctactccccctgttatggatatcctttcttttgattctaccacaacaacagaaaccagtggtaggactctgccagacaagggtgaagaggcctgtggatatttcttgaacccttccttaatgtcaccagaatgtttgccaacaaccacgaaaaagaaaacagaagacatgagtgacctcccctgtgaaagtcaaaggagcatacctctcgctgtgactgatgctttagagcatattatggaacaactcaatgttttg

SEQ ID NO: 166839 - DNA, 581 bp, Homo sapiens
  Payload ID: 12844
  Gene Symbol: POC1B
  Gene Name: POC1 centriolar protein B
  ENST ID: ENST00000549504
  CDS Start-End: 205-486
ggaggaccccgttctggagcgttatttcaaaggccacaaagctgcgatcacctccttggacctcagccccaacggcaagcaacttggagaggaaaattctcagaatttaaagctcatacagctccagttcgaagtgtagacttttcagctgatggccagtttctagctacagcttctgaagacaaatccataaaagtatggagcatgtatcgccagcgcttcctgtattccttgtatcgacatacacactgggtacgctgtgccaaggacctgtctttactgtttcattttcaaaaggtggagagctatttgcatcaggaggtgcagacacacaggtcttattatggaggactaactttgatgaattgcattgtaaaggtcttaccaaaagaaatctcaaaagattacattttgattcaccaccacatcttcttgatatctacccaagaacaccacatccccatgaggaaaaagttgagactgtagaaacaacagaaaccagtggtaggactctgccagacaagggtgaagaggcctgtggatatttcttgaacccttccttaatgtcaccagaatgtttg

SEQ ID NO: 166840 - DNA, 2207 bp, Homo sapiens
  Payload ID: 12845
  Gene Symbol: POC1B-GALNT4
  Gene Name: POC1B-GALNT4 readthrough
  ENST ID: ENST00000547474
  CDS Start-End: 368-496
atcgatcacaggctcacaacgcccttccattcatcgctcttattccagtcctggttactaccccacttcctgacatcaaaccagggagaacgcgagtgttagttaacatggcttggtgtgtggccacagctgacccggcgcatacctcccgtcctctctttacagggctggcggtgtctcggggctcggctggccatgcctggagcgcggggtttgactgggccgccgttgttgtagtgaccgggaggcgctgccgctctgggcagacggttccgggagccgcacggtcccctctccttccccatcctctcccctcccctctccgggttcccccacccacaggagccttgggccgaccactcccccgatggcctcagccacggaggaccccgttctggagcgttatttcaaaggccacaaagctgcgatcacctccttggacctcagccccaacggcaagcaacttggaaagggacaggcggatatcaagaattgaccccatcagatcacctaccatggctggaggactgtttgctgtcagcaagaaatattttcagtaccttggaacgtatgacacaggaatggaagtgtggggaggtgaaaaccttgagctgtcttttagggtgtggcagtgtggtggcaaattggagatccacccgtgttcccacgtgggccatgtgttccccaagcgggcaccatatgctcgccccaatttcctacagaatactgctcgggcagcagaagtttggatggatgaatacaaagagcacttctacaatagaaaccctccagcaagaaaagaagcttatggtgatatttctgaaagaaaattactacgagagcggttgagatgcaagagctttgactggtatttgaaaaacgtttttcctaatttacatgttccagaggatagaccaggctggcatggggctattcgcagtagagggatctcgtctgaatgtttagattataattctcctgacaacaaccccacaggtgctaacctttcactgtttggatgccatggtcaaggaggcaatcaattctttgaatatacttcaaacaaagaaataaggtttaattctgtgacagagttatgtgcagaggtacctgagcaaaaaaattatgtgggaatgcaaaattgtcccaaagatgggttccctgtaccagcaaacattatttggcattttaaagaagatggaactatttttcacccacactcaggactgtgtcttagtgcttatcggacaccggagggccgacctgatgtacaaatgagaacttgtgatgctctagataaaaatcaaatttggagttttgagaaatagagcacaacagcactttcgtcatgagctgacagtagtgtcaagaaagtcaaagagccttaagagcctcagtgaagattgtattttattttatcaaaagccacctagcagtcatctgtggagcactggaaagctggggttcattttggtatatcacactgaaactgggtacccagagtgctgctgtttaatatttcacaatgccttacttattggttgttttatataagagttttgtcaatatggtctcttcttaaaagaagttgactatgaattgaaacacacaaaacatttaagtgccagacttaatattaaagaatgtaaaggtccaagtaaaatgaggtatgatttatgttgatgtgtaagttcaccgcacatcccactttttaacaaaactcatgaatgtgcagtttgagccattgctattttgattacatagaatttgtatttcttttttagccagcacattaaattttagattttattttttaatctaatttttttctaatcaaaaagaaaattgagcttaaggcaaaaggcctggttttagagatatgtgtaattggaagagggcatttgtttgagtgtgagtttggaggcctttttaacatgcagacatacccatatttaaatgaaatggggagatatttacattccgtactttgtaaacttgagctattggacttcactgatgtatatattaatacctcagattcctctgattttgtaagctgtcttctctgtgaacgtgtttgtgtgtgtagggcattttctgattgcacttccttaagttatgaatgtactagaaagggactcatccagaatactatgcctccctttgttaatgcttaatcatttaaagtaaacacaattgaagcctct

SEQ ID NO: 166841 - DNA, 5436 bp, Homo sapiens
  Payload ID: 12845
  Gene Symbol: POC1B-GALNT4
  Gene Name: POC1B-GALNT4 readthrough
  ENST ID: ENST00000548729
  CDS Start-End: 304-2031
acttcctgacatcaaaccagggagaacgcgagtgttagttaacatggcttggtgtgtggccacagctgacccggcgcatacctcccgtcctctctttacagggctggcggtgtctcggggctcggctggccatgcctggagcgcggggtttgactgggccgccgttgttgtagtgaccgggaggcgctgccgctctgggcagacggttccgggagccgcacggtcccctctccttccccatcctctcccctcccctctccgggttcccccacccacaggagccttgggccgaccactcccccgatggcctcagccacggaggaccccgttctggagcgttatttcaaaggccacaaagctgcgatcacctccttggacctcagccccaacggcaagcaacttggagccggccgtgccagggagctggggtcaagaaggctctcagacctccagaaaaatacggaggatttgtctcgaccgctttataagaagccccctgcagattcccgtgcacttggggagtgggggaaagccagcaaactccagctcaacgaggatgaactgaagcagcaagaagaactcattgagagatacgccatcaatatttacctcagtgacaggatttccctgcatcgacacatagaggataaaagaatgtatgagtgtaagtcccagaagttcaactataggacacttcctaccacctctgttatcattgctttctataacgaagcctggtcgactttgctccgtaccattcacagtgttttagaaacttctcctgcagttcttttgaaagagatcatcttggtggatgacttgagtgacagagtttatttgaagacacaacttgaaacttacatcagcaatcttgatagagtacgcttgattaggaccaataagcgagaggggctggttagggcccgtctgattggggccactttcgccactggggacgtcctcactttcctggattgtcactgtgagtgtaattccggttggctggaaccgcttttggaaaggattgggagagatgaaacagcagttgtgtgtcctgttatagacacaattgattggaatacttttgaattctatatgcagataggggagcccatgattggtgggtttgactggcgtttaacatttcagtggcattctgtccccaaacaggaaagggacaggcggatatcaagaattgaccccatcagatcacctaccatggctggaggactgtttgctgtcagcaagaaatattttcagtaccttggaacgtatgacacaggaatggaagtgtggggaggtgaaaaccttgagctgtcttttagggtgtggcagtgtggtggcaaattggagatccacccgtgttcccacgtgggccatgtgttccccaagcgggcaccatatgctcgccccaatttcctacagaatactgctcgggcagcagaagtttggatggatgaatacaaagagcacttctacaatagaaaccctccagcaagaaaagaagcttatggtgatatttctgaaagaaaattactacgagagcggttgagatgcaagagctttgactggtatttgaaaaacgtttttcctaatttacatgttccagaggatagaccaggctggcatggggctattcgcagtagagggatctcgtctgaatgtttagattataattctcctgacaacaaccccacaggtgctaacctttcactgtttggatgccatggtcaaggaggcaatcaattctttgaatatacttcaaacaaagaaataaggtttaattctgtgacagagttatgtgcagaggtacctgagcaaaaaaattatgtgggaatgcaaaattgtcccaaagatgggttccctgtaccagcaaacattatttggcattttaaagaagatggaactatttttcacccacactcaggactgtgtcttagtgcttatcggacaccggagggccgacctgatgtacaaatgagaacttgtgatgctctagataaaaatcaaatttggagttttgagaaatagagcacaacagcactttcgtcatgagctgacagtagtgtcaagaaagtcaaagagccttaagagcctcagtgaagattgtattttattttatcaaaagccacctagcagtcatctgtggagcactggaaagctggggttcattttggtatatcacactgaaactgggtacccagagtgctgctgtttaatatttcacaatgccttacttattggttgttttatataagagttttgtcaatatggtctcttcttaaaagaagttgactatgaattgaaacacacaaaacatttaagtgccagacttaatattaaagaatgtaaaggtccaagtaaaatgaggtatgatttatgttgatgtgtaagttcaccgcacatcccactttttaacaaaactcatgaatgtgcagtttgagccattgctattttgattacatagaatttgtatttcttttttagccagcacattaaattttagattttattttttaatctaatttttttctaatcaaaaagaaaattgagcttaaggcaaaaggcctggttttagagatatgtgtaattggaagagggcatttgtttgagtgtgagtttggaggcctttttaacatgcagacatacccatatttaaatgaaatggggagatatttacattccgtactttgtaaacttgagctattggacttcactgatgtatatattaatacctcagattcctctgattttgtaagctgtcttctctgtgaacgtgtttgtgtgtgtagggcattttctgattgcacttccttaagttatgaatgtactagaaagggactcatccagaatactatgcctccctttgttaatgcttaatcatttaaagtaaacacaattgaagcctctctgaagttaaacccaactatgtttattaaaatgtgtgaaactgaaagtgggctaggttctaccaaggctgtggaactctcctacgagttctgctgatcaggaaatttaagaatttatcttaaaaatgcaaggaaaaaagactgccttggcaattgtgaatggtgctttcaatctcctagcaccgagcctggcacttaggcagctttcagtaagtgggtgaatgaatgactgaatgaatgaatgaatggctcagctgaggaatgtaactttggtcaagttattatgatgtgtttgggcttagttttctcattggtaaaatgtgggtgctggattggatcttaaagatcccttccagctctgaaatgctgattgtacagtatattcttcccagattgactcactgtgcaatctttacaatactttttatcttttcacttttgacataggtaatgttgttgagcagttgagcaatgttcagtccagttgtgaagctggagaagagaaatgggttttaaaaattaagtgaggggaggccgggtgcggtggctcacgcatgtaatcccagcactttgggaggccaaggcaggtggatcacgaggtcaggagatccagaccatcctggctaacatggtgaaacctcgtctctactaaaaatacaaaaaattagccagctgtggtggcgggcgcctgtagtcccagctactcaggaggctgaggcaggagaatggcgtgaacctgtgaggcagagcttacagtgagccgagatcgtgccactgcactccagcctgggcgacagagcaagactctgtctcaaaaaaaaaaaataataataaaataagtgagctgaactcacctgaagtggtttacttctgtgggttaagaagttctagtcagtgttcatagtcgtttcgttttgataattgttgaaccaattttgtttttaaaacctttagactctgaaagtaatattttgactaagaatgtaaatatttccaaactaaattactcgggaagtaaacgctttttttaaaagtatttttactggttttataccaatattatatgcagaaatcacaggatgaatttagaattaaatctcaattagttcactttggcctagatttatgaaaaatgcatgcctcgtaaagagtccactgtattcacgagtaaagttgcttttagtgttcacttgatgacttggagagtaggaattttgcaaaatctgaatttaaggaaattctttaggataaccatttcaaaaaataaaattgctatgcaatcttgaatattttctcttttgcctcgtaaaatgaaaatgcattcacagtttctgtaaattatttagcagccttaaagtttatcaaaaaattgtccagattccacgtgcagcatgcttggccctgcatttaatttaagaaggattaataataatgctctgaatttttcgaaagggattctcctaaacccacccacttctcttgcccaggctgctttttaaaaatatttttttattttttacttatttttaaattttctctttttatttatttttggttttcttgttagccacctgttatatgggagaacgaaaattgttatattttgaaagtacttattacattatttttattttagtatcttgatgctcctgtcaaaagggaaatgaggcttttaaaaataaagtaccttaattctttattgactttttgccctaaattgctaggtgtgacccagcaatcttttaggaagagattttacagtggtgctttatttatatcaataatccagtatagttaggctgttcattcctcataatagagtacataacagaaaagtgggactttcacattttcatatttaggcacgttccaatttaattccaaaaatactctgtaattctacatctaaaaaaaccgattccctaattcgaatttattggtaccaaagctctctttggctatagacaattaagagttgaccttttaagttaatgtatatgcttaaaaacagttttaggaaaatatttggtagacaaagagtttcaactttaaatgttcactatgtcatttagtgtccaactttacggataggttgactatctaaataggcatttttagtcattaaaaaaaatctagtcaccaggaggatccctataactcaaaataacttgtttgtaaaagaaaatttgtttacttacccattagtaagttcctgcatattcattataagatggcaaatcaaacttttctaggatgaagacagcttatttttaagttgtatagtcttagttggtttagggtctcaattttaattaataaaatacttggtttttatttgcttgtccttttgaattcctgttttaataattttaaaatgagcacaaagaacgttgaagttcagattaatctcttctgaatgatgtttttttcctctgtgatgagttgtttctgacttttttccttttgtatttgtaatgttgattaagatgtaaaataaaaagtgtgcctgattatttttgcaaataga

SEQ ID NO: 166842 - DNA, 1728 bp, Homo sapiens
  Payload ID: 12846
  Gene Symbol: POC5
  Gene Name: POC5 centriolar protein
  Uniprot ID: Q8NA72
  ENST ID: ENST00000446329
  CDS Start-End: 72-1724
tgaggtttggtctctgttgtcacaacattcagtacaatctgctgcccaggacctggacattgacagataaaatgaagtgggaagaatatgaagaactgcttcattatgctatagtgactccaaatattgaaccctgtgcttcacagtcatctcatcctaagggagaattggtgccagatgtcagaatttctacaattcatgatattcttcatagtcaaggaaataactctgaagtaagagaaactgcaatagaagttggaaaaggatgtgatttccatatttcaagtcattcaaagacagatgagtcatcaccagtgttatcgccaaggaagccttctcacccagtcatggattttttcagttcacatcttttagctgactcttcctcaccagcaacaaattctagtcatacagatgcccatgaaatacttgtgagcgattttcttgtttctgatgaaaaccttcagaagatggaaaatgtgcttgatctttggagttcaggtcttaagacaaacatcatatctgaactaagtaaatggagacttaattttattgactggcaccgaatggaaatgagaaaagagaaagaaaaacatgcagcacatttaaaacaactgtgtaatcagatcaatgaattgaaggagctgcaaaaaacctttgaaatctccattgggagaaaagatgaggtgatttctagcttgtctcatgccataggcaagcaaaaggaaaagatagagttgatgagaacattcttccactggcgaatcggccatgtcagagccagacaggatgtttatgaaggtaaactagctgaccagtactaccagagaactttactgaagaaagtctggaaagtctggcgttccgtagtgcaaaagcagtggaaagatgtggtagaaagagcttgtcaagcaagagctgaagaagtttgtatccagatttccaatgattatgaagccaaagttgctatgttatctggagctttggaaaatgcaaaagctgagattcaaagaatgcaacatgaaaaagagcactttgaagattccatgaaaaaagctttcatgaggggtgtatgtgcattaaatcttgaagccatgactatatttcaaaacagaaatgatgcagggatagactccacaaataataaaaaggaagagtatggtcctggtgttcaaggaaaagaacattctgctcatttggatccttcagctcctccgatgcccttaccagttacatcaccactgctgccatccccaccagccgccgtcggaggagccagcgcgactgccgttccctcagctgcttcgatgacttctaccagggctgcttccgcatcttctgttcacgttcctgtttctgctcttggtgcaggatctgcagctactgctgcatcagaagaaatgtatgtgccaagagttgtaacctctgcacaacagaaagcaggaagaactattacagcccggatcacaggaagatgtgattttgcttcaaaaaatagaattagcagcagtttagctataatgggagtttctcctcccatgagctcagttgttgtggaaaaacatcatccagtcacagtgcaaaccattcctcaagcaactgcagcaaaatatccccggaccattcatcctgaaagtagtacctcagcttccagatcacttggaaccagatcagctcacacccagtctctcacaagtgttcattccataaaagtggttgactaaagtg

SEQ ID NO: 166843 - DNA, 2229 bp, Homo sapiens
  Payload ID: 12846
  Gene Symbol: POC5
  Gene Name: POC5 centriolar protein
  Uniprot ID: Q8NA72
  ENST ID: ENST00000428202
  CDS Start-End: 191-1918
tgaaacaaaggaccaatgcccagggcggtccttaattcctccctgcagtttgaaactgtcaggttgccgtctaggtagcggttgtgcttgctgaggctgcacttgctgacactgcagctgcgacgcggctaagaggcgcagagcgaggagtcgggatttggtcgcgagcggcgacgagcatttgtgcagaatgtcatcagatgaggagaaatactcacttccagttgtgcaaaatgactccagtcgaggcagttctgtctcttcgaatcttcaggaagaatatgaagaactgcttcattatgctatagtgactccaaatattgaaccctgtgcttcacagtcatctcatcctaagggagaattggtgccagatgtcagaatttctacaattcatgatattcttcatagtcaaggaaataactctgaagtaagagaaactgcaatagaagttggaaaaggatgtgatttccatatttcaagtcattcaaagacagatgagtcatcaccagtgttatcgccaaggaagccttctcacccagtcatggattttttcagttcacatcttttagctgactcttcctcaccagcaacaaattctagtcatacagatgcccatgaaatacttgtgagcgattttcttgtttctgatgaaaaccttcagaagatggaaaatgtgcttgatctttggagttcaggtcttaagacaaacatcatatctgaactaagtaaatggagacttaattttattgactggcaccgaatggaaatgagaaaagagaaagaaaaacatgcagcacatttaaaacaactgtgtaatcagatcaatgaattgaaggagctgcaaaaaacctttgaaatctccattgggagaaaagatgaggtgatttctagcttgtctcatgccataggcaagcaaaaggaaaagatagagttgatgagaacattcttccactggcgaatcggccatgtcagagccagacaggatgtttatgaaggtaaactagctgaccagtactaccagagaactttactgaagaaagtctggaaagtctggcgttccgtagtgcaaaagcagtggaaagatgtggtagaaagagcttgtcaagcaagagctgaagaagtttgtatccagatttccaatgattatgaagccaaagttgctatgttatctggagctttggaaaatgcaaaagctgagattcaaagaatgcaacatgaaaaagagcactttgaagattccatgaaaaaagctttcatgaggggtgtatgtgcattaaatcttgaagccatgactatatttcaaaacagaaatgatgcagggatagactccacaaataataaaaaggaagagtatggtcctggtgttcaaggaaaagaacattctgctcatttggatccttcagctcctccgatgcccttaccagttacatcaccactgctgccatccccaccagccgccgtcggaggagccagcgcgactgccgttccctcagctgcttcgatgacttctaccagggctgcttccgcatcttctgttcacgttcctgtttctgctcttggtgcaggatctgcagctactgctgcatcagaagaaatgtatgtgccaagagttgtaacctctgcacaacagaaagcaggaagaactattacagcccggatcacaggaagatgtgattttgcttcaaaaaatagaattagcagcagtttagctataatgggagtttctcctcccatgagctcagttgttgtggaaaaacatcatccagtcacagtgcaaaccattcctcaagcaactgcagcaaaatatccccggaccattcatcctgaaagtagtacctcagcttccagatcacttggaaccagatcagctcacacccagtctctcacaagtgttcattccataaaagtggttgactaaagtgaatatgtccatagtggggtcttttaatccctctggtcttaccaagggttagaagtcttttggttttaacttttccatattgttagaacatcatggagacatcatgttcatctgttcaaaattacaagaggctttttcaagctctaccatgctttgtaactatatgtagaaattattttaatgttattttttatttaagcaattaagtaaaacttttttaaattaaaaaagaaactggactttatttctttaatatgtttagcctgttgctgattacagcatcaaaatatataaatttattttcacta

SEQ ID NO: 166844 - DNA, 1984 bp, Homo sapiens
  Payload ID: 12846
  Gene Symbol: POC5
  Gene Name: POC5 centriolar protein
  ENST ID: ENST00000514838
  CDS Start-End: 108-1751
gtgcttgctgaggctgcacttgctgacactgcagctgcgacgcggctaagaggcgcagagcgaggagtcgggatttggtcgcgagcggcgacgagcatttgtgcagaatgtcatcagatgaggagaaatactcacttccagttgtgcaaaatgactccagtcgaggcagttctgtctcttcgaatcttcaggaagaatatgaagaactgcttcattatgctatagtgactccaaatattgaaccctgtgcttcacagtcatctcatcctaagggagaattggtgccagatgtcagaatttctacaattcatgatattcttcatagtcaagagtcatcaccagtgttatcgccaaggaagccttctcacccagtcatggattttttcagttcacatcttttagctgactcttcctcaccagcaacaaattctagtcatacagatgcccatgaaatacttgtgagcgattttcttgtttctgatgaaaaccttcagaagatggaaaatgtgcttgatctttggagttcaggtcttaagacaaacatcatatctgaactaagtaaatggagacttaattttattgactggcaccgaatggaaatgagaaaagagaaagaaaaacatgcagcacatttaaaacaactgtgtaatcagatcaatgaattgaaggagctgcaaaaaacctttgaaatctccattgggagaaaagatgaggtgatttctagcttgtctcatgccataggcaagcaaaaggaaaagatagagttgatgagaacattcttccactggcgaatcggccatgtcagagccagacaggatgtttatgaaggtaaactagctgaccagtactaccagagaactttactgaagaaagtctggaaagtctggcgttccgtagtgcaaaagcagtggaaagatgtggtagaaagagcttgtcaagcaagagctgaagaagtttgtatccagatttccaatgattatgaagccaaagttgctatgttatctggagctttggaaaatgcaaaagctgagattcaaagaatgcaacatgaaaaagagcactttgaagattccatgaaaaaagctttcatgaggggtgtatgtgcattaaatcttgaagccatgactatatttcaaaacagaaatgatgcagggatagactccacaaataataaaaaggaagagtatggtcctggtgttcaaggaaaagaacattctgctcatttggatccttcagctcctccgatgcccttaccagttacatcaccactgctgccatccccaccagccgccgtcggaggagccagcgcgactgccgttccctcagctgcttcgatgacttctaccagggctgcttccgcatcttctgttcacgttcctgtttctgctcttggtgcaggatctgcagctactgctgcatcagaagaaatgtatgtgccaagagttgtaacctctgcacaacagaaagcaggaagaactattacagcccggatcacaggaagatgtgattttgcttcaaaaaatagaattagcagcagtttagctataatgggagtttctcctcccatgagctcagttgttgtggaaaaacatcatccagtcacagtgcaaaccattcctcaagcaactgcagcaaaatatccccggaccattcatcctgaaagtagtacctcagcttccagatcacttggaaccagatcagctcacacccagtctctcacaagtgttcattccataaaagtggttgactaaagtgaatatgtccatagtggggtcttttaatccctctggtcttaccaagggttagaagtcttttggttttaacttttccatattgttagaacatcatggagacatcatgttcatctgttcaaaattacaagaggctttttcaagctctaccatgctttgtaactatatgtagaaattattttaatgttattttttatttaagcaattaagtaaaacttttttaaattaaaaaa

SEQ ID NO: 166845 - DNA, 896 bp, Homo sapiens
  Payload ID: 12846
  Gene Symbol: POC5
  Gene Name: POC5 centriolar protein
  ENST ID: ENST00000503835
  CDS Start-End: 411-896
aattcctccctgcagtttgaaactgtcaggttgccgtctaggtagcggttgtgcttgctgaggctgcacttgctgacactgcagctgcgacgcggctaagaggcgcagagcgaggagtcgggatttggtcgcgagcggcgacggaagaatatgaagaactgcttcattatgctatagtgactccaaatattgaaccctgtgcttcacagtcatctcatcctaagggagaattggtgccagatgtcagaatttctacaattcatgatattcttcatagtcaaggaaataactctgaagtaagagaaactgcaatagaagttggaaaaggatgtgatttccatatttcaagtcattcaaagacagatgagtcatcaccagtgttatcgccaaggaagccttctcacccagtcatggattttttcagttcacatcttttagctgactcttcctcaccagcaacaaattctagtcatacagatgcccatgaaatacttgtgagcgattttcttgtttctgatgaaaaccttcagaagatggaaaatgtgcttgatctttggagttcaggtcttaagacaaacatcatatctgaactaagtaaatggagacttaattttattgactggcaccgaatggaaatgagaaaagagaaagaaaaacatgcagcacatttaaaacaactgtgtaatcagatcaatgaattgaaggagctgcaaaaaacctttgaaatctccattgggagaaaagatgaggtgatttctagcttgtctcatgccataggcaagcaaaaggaaaagatagagttgatgagaacattcttccactggcgaatcggccatgtcagagccagacaggatgtttatgaaggtaaactagctgaccagtactaccagagaact

SEQ ID NO: 166846 - DNA, 443 bp, Homo sapiens
  Payload ID: 12846
  Gene Symbol: POC5
  Gene Name: POC5 centriolar protein
  ENST ID: ENST00000506164
  CDS Start-End: 347-443
tgtcaggttgccgtctaggtagcggttgtgcttgctgaggctgcacttgctgacactgcagctgcgacgcggctaagaggcgcagagcgaggagtcgggatttggtcgcgagcggcgacgagcatttgtgcagaatgtcatcagatgaggagaaatactcacttccagttgtgcaaaatgactccagtcgaggcagttctgtctcttcgaatcttcaggaaataactctgaagtaagagaaactgcaatagaagttggaaaaggatgtgatttccatatttcaagtcattcaaagacagatgagtcatcaccagtgttatcgccaaggaagccttctcacccagtcatggattttttcagttcacatcttttagctgactcttcctcaccagcaacaaattctagtcatacagatgcccatgaaatacttgtgagcgattttc

SEQ ID NO: 166847 - DNA, 401 bp, Homo sapiens
  Payload ID: 12846
  Gene Symbol: POC5
  Gene Name: POC5 centriolar protein
  ENST ID: ENST00000502826
  CDS Start-End: 250-401
ctgtcaggttgccgtctaggtagcggttgtgcttgctgaggctgcacttgctgacactgcagctgcgacgcggctaagaggcgcagagcgaggagtcgggatttggtcgcgagcggcgacggaaataactctgaagtaagagaaactgcaatagaagttggaaaaggatgtgatttccatatttcaagtcattcaaagacagatgagtcatcaccagtgttatcgccaaggaagccttctcacccagtcatggattttttcagttcacatcttttagctgactcttcctcaccagcaacaaattctagtcatacagatgcccatgaaatacttgtgagcgattttcttgtttctgatgaaaaccttcagaagatggaaaatgtgcttgatctttggagttc

SEQ ID NO: 166848 - DNA, 785 bp, Homo sapiens
  Payload ID: 12846
  Gene Symbol: POC5
  Gene Name: POC5 centriolar protein
  ENST ID: ENST00000515285
  CDS Start-End: 134-310
gtcaggttgccgtctaggtagcggttgtgcttgctgaggctgcacttgctgacactgcagctgcgacgcggctaagaggcgcagagcgaggagtcgggatttggtcgcgagcggcgacgagcatttgtgcagaatgtcatcagatgaggagaaatactcacttccagttgtgcaaaatgactccagtcgaggcagttctgtctcttcgaatcttcagaaaatattgatgaactcttcatacactctgtacaaaggcttcaaccaacacagtaagaggaagaatatgaagaactgcttcattatgctatagtgactccaaatattgaaccctgtgcttcacagtcatctcatcctaagggagaattggtgccagatgtcagaatttctacaattcatgatattcttcatagtcaaggaaataactctgaagtaagagaaactgcaatagaagttggaaaaggatgtgatttccatatttcaagtcattcaaagacagatgagtcatcaccagtgttatcgccaaggaagccttctcacccagtcatggattttttcagttcacatcttttagctgactcttcctcaccagcaacaaattctagtcatacagatgcccatgaaatacttgtgagcgattttcttgtttctgatgaaaaccttcagaagatggaaaatgtgcttgatctttggagttcaggtcttaagacaaacatcatatctgaactaagtaaatggagacttaattttattgactggcaccgaatggaaatgagaaaagagaaaga

SEQ ID NO: 166849 - DNA, 1524 bp, Homo sapiens
  Payload ID: 12846
  Gene Symbol: POC5
  Gene Name: POC5 centriolar protein
  Uniprot ID: Q8NA72
  ENST ID: ENST00000510798
  CDS Start-End: 321-1520
aacattcagtacaatctgctgcccaggacctggacattgacagataaaatgaagaagaatatgaagaactgcttcattatgctatagtgactccaaatattgaaccctgtgcttcacagtcatctcatcctaagggagaattggtgccagatgtcagaatttctacaattcatgatattcttcatagtcaaggaaataactctgaagtaagagaaactgcaatagaagttggaaaaggatgtgatttccatatttcaagtcattcaaagacagatgagtcatcaccagtgttatcgccaaggaagccttctcacccagtcatggattttttcagttcacatcttttagctgactcttcctcaccagcaacaaattctagtcatacagatgcccatgaaatacttgtgagcgattttcttgtttctgatgaaaaccttcagaagatggaaaatgtgcttgatctttggagttcaggtcttaagacaaacatcatatctgaactaagtaaatggagacttaattttattgactggcaccgaatggaaatgagaaaagagaaagaaaaacatgcagcacatttaaaacaactgtgtaatcagatcaatgaattgaaggagctgcaaaaaacctttgaaatctccattgggagaaaagatgaggtgatttctagcttgtctcatgccataggcaagcaaaaggaaaagatagagttgatgagaacattcttccactggcgaatcggccatgtcagagccagacaggatgtttatgaaggtaaactagctgaccagtactaccagagaactttactgaagaaagtctggaaagtctggcgttccgtagtgcaaaagcagtggaaagatgtggtagaaagagcttgtcaagcaagagctgaagaagtttgtatccagatttccaatgattatgaagccaaagttgctatgttatctggagctttggaaaatgcaaaagctgagattcaaagaatgcaacatgaaaaagagcactttgaagattccatgaaaaaagctttcatgaggggtgtatgtgcattaaatcttgaagccatgactatatttcaaaacagaaatgatgcagggatagactccacaaataataaaaaggaagagtatggtcctggtgttcaaggaaaagaacattctgctcatttggatccttcagctcctccgatgcccttaccagttacatcaccactgctgccatccccaccagccgccgtcggaggagccagcgcgactgccgttccctcagctgcttcgatgacttctaccagggctgcttccgcatcttctgttcacgttcctgtttctgctcttggtgcaggatctgcagctactgctgcatcagaagaaatgcaaaccattcctcaagcaactgcagcaaaatatccccggaccattcatcctgaaagtagtacctcagcttccagatcacttggaaccagatcagctcacacccagtctctcacaagtgttcattccataaaagtggttgactaaagtg

SEQ ID NO: 166850 - DNA, 2011 bp, Homo sapiens
  Payload ID: 12847
  Gene Symbol: PODXL
  Gene Name: podocalyxin-like
  Uniprot ID: O00592
  ENST ID: ENST00000322985
  CDS Start-End: 251-1831
agacgccgcccaggacgcagccgccgccgccgccgctcctctgccactggctctgcgccccagcccggctctgctgcagcggcagggaggaagagccgccgcagcgcgactcgggagccccgggccacagcctggcctccggagccacccacaggcctccccgggcggcgcccacgctcctaccgcccggacgcgcggatcctccgccggcaccgcagccacctgctcccggcccagaggcgacgacacgatgcgctgcgcgctggcgctctcggcgctgctgctactgttgtcaacgccgccgctgctgccgtcgtcgccgtcgccgtcgccgtcgccctcccagaatgcaacccagactactacggactcatctaacaaaacagcaccgactccagcatccagtgtcaccatcatggctacagatacagcccagcagagcacagtccccacttccaaggccaacgaaatcttggcctcggtcaaggcgaccacccttggtgtatccagtgactcaccggggactacaaccctggctcagcaagtctcaggcccagtcaacactaccgtggctagaggaggcggctcaggcaaccctactaccaccatcgagagccccaagagcacaaaaagtgcagacaccactacagttgcaacctccacagccacagctaaacctaacaccacaagcagccagaatggagcagaagatacaacaaactctggggggaaaagcagccacagtgtgaccacagacctcacatccactaaggcagaacatctgacgacccctcaccctacaagtccacttagcccccgacaacccacttcgacgcatcctgtggccaccccaacaagctcgggacatgaccatcttatgaaaatttcaagcagttcaagcactgtggctatccctggctacaccttcacaagcccggggatgaccaccaccctaccgtcatcggttatctcgcaaagaactcaacagacctccagtcagatgccagccagctctacggccccttcctcccaggagacagtgcagcccacgagcccggcaacggcattgagaacacctaccctgccagagaccatgagctccagccccacagcagcatcaactacccaccgataccccaaaacaccttctcccactgtggctcatgagagtaactgggcaaagtgtgaggatcttgagacacagacacagagtgagaagcagctcgtcctgaacctcacaggaaacaccctctgtgcagggggcgcttcggatgagaaattgatctcactgatatgccgagcagtcaaagccaccttcaacccggcccaagataagtgcggcatacggctggcatctgttccaggaagtcagaccgtggtcgtcaaagaaatcactattcacactaagctccctgccaaggatgtgtacgagcggctgaaggacaaatgggatgaactaaaggaggcaggggtcagtgacatgaagctaggggaccaggggccaccggaggaggccgaggaccgcttcagcatgcccctcatcatcaccatcgtctgcatggcatcattcctgctcctcgtggcggccctctatggctgctgccaccagcgcctctcccagaggaaggaccagcagcggctaacagaggagctgcagacagtggagaatggttaccatgacaacccaacactggaagtgatggagacctcttctgagatgcaggagaagaaggtggtcagcctcaacggggagctgggggacagctggatcgtccctctggacaacctgaccaaggacgacctggatgaggaggaagacacacacctctagtccggtctgccggtggcctccagcagcaccacagagctccagaccaaccaccccaagtgccgtttggatggggaagggaaagactggggagggagagtgaactccgaggggtgtcccctcccaatccccccagggccttaatttttcccttttcaacctgaacaaatcacattctgtcca

SEQ ID NO: 166851 - DNA, 2105 bp, Homo sapiens
  Payload ID: 12847
  Gene Symbol: PODXL
  Gene Name: podocalyxin-like
  Uniprot ID: O00592
  ENST ID: ENST00000378555
  CDS Start-End: 249-1925
acgccgcccaggacgcagccgccgccgccgccgctcctctgccactggctctgcgccccagcccggctctgctgcagcggcagggaggaagagccgccgcagcgcgactcgggagccccgggccacagcctggcctccggagccacccacaggcctccccgggcggcgcccacgctcctaccgcccggacgcgcggatcctccgccggcaccgcagccacctgctcccggcccagaggcgacgacacgatgcgctgcgcgctggcgctctcggcgctgctgctactgttgtcaacgccgccgctgctgccgtcgtcgccgtcgccgtcgccgtcgccctcccagaatgcaacccagactactacggactcatctaacaaaacagcaccgactccagcatccagtgtcaccatcatggctacagatacagcccagcagagcacagtccccacttccaaggccaacgaaatcttggcctcggtcaaggcgaccacccttggtgtatccagtgactcaccggggactacaaccctggctcagcaagtctcaggcccagtcaacactaccgtggctagaggaggcggctcaggcaaccctactaccaccatcgagagccccaagagcacaaaaagtgcagacaccactacagttgcaacctccacagccacagctaaacctaacaccacaagcagccagaatggagcagaagatacaacaaactctggggggaaaagcagccacagtgtgaccacagacctcacatccactaaggcagaacatctgacgacccctcaccctacaagtccacttagcccccgacaacccacttcgacgcatcctgtggccaccccaacaagctcgggacatgaccatcttatgaaaatttcaagcagttcaagcactgtggctatccctggctacaccttcacaagcccggggatgaccaccaccctactagagacagtgtttcaccatgtcagccaggctggtcttgaactcctgacctcgggtgatctgcccaccttggcctcccaaagtgctgggattacagcgtcatcggttatctcgcaaagaactcaacagacctccagtcagatgccagccagctctacggccccttcctcccaggagacagtgcagcccacgagcccggcaacggcattgagaacacctaccctgccagagaccatgagctccagccccacagcagcatcaactacccaccgataccccaaaacaccttctcccactgtggctcatgagagtaactgggcaaagtgtgaggatcttgagacacagacacagagtgagaagcagctcgtcctgaacctcacaggaaacaccctctgtgcagggggcgcttcggatgagaaattgatctcactgatatgccgagcagtcaaagccaccttcaacccggcccaagataagtgcggcatacggctggcatctgttccaggaagtcagaccgtggtcgtcaaagaaatcactattcacactaagctccctgccaaggatgtgtacgagcggctgaaggacaaatgggatgaactaaaggaggcaggggtcagtgacatgaagctaggggaccaggggccaccggaggaggccgaggaccgcttcagcatgcccctcatcatcaccatcgtctgcatggcatcattcctgctcctcgtggcggccctctatggctgctgccaccagcgcctctcccagaggaaggaccagcagcggctaacagaggagctgcagacagtggagaatggttaccatgacaacccaacactggaagtgatggagacctcttctgagatgcaggagaagaaggtggtcagcctcaacggggagctgggggacagctggatcgtccctctggacaacctgaccaaggacgacctggatgaggaggaagacacacacctctagtccggtctgccggtggcctccagcagcaccacagagctccagaccaaccaccccaagtgccgtttggatggggaagggaaagactggggagggagagtgaactccgaggggtgtcccctcccaatccccccagggccttaatttttcccttttcaacctgaacaaatcacattctgtcca

SEQ ID NO: 166852 - DNA, 6170 bp, Homo sapiens
  Payload ID: 12847
  Gene Symbol: PODXL
  Gene Name: podocalyxin-like
  ENST ID: ENST00000446198
  CDS Start-End: 205-1179
ctggctctgcgccccagcccggctctgctgcagcggcagggaggaagagccgccgcagcgcgactcgggagccccgggccacagcctggcctccggagccacccacaggcctccccgggcggcgcccacgctcctaccgcccggacgcgcggatcctccgccggcaccgcagccacctgctcccggcccagaggcgacgacacgatgcgctgcgcgctggcgctctcggcgctgctgctactgttgtcaacgccgccgctgctgccgtcgtcgccgtcgccgtcgccgtcgccctcccagaatgcaacccagactactacggactcatctaacaaaacagcaccgactccagcatccagtgtcaccatcatggctacagatacagcccagcagagcacagtccccacttccaaggccaacgaaatcttggcctcggtcaaggcgaccacccttggtgtatccagtgactcaccggggactacaaccctggctcagcaagtctcaggcccagtcaacactaccgtggctagaggaggcggctcaggcaaccctactaccaccatcgagagccccaagagcacaaaaagtgcagacaccactacagttgcaacctccacagccacagctaaacctaacaccacaagcagccagaatggagcagaagatacaacaaactctggggggaaaagcagccacagtgtgaccacagacctcacatccactaaggcagaacatctgacgacccctcaccctacaagtccacttagcccccgacaacccacttcgacgcatcctgtggccaccccaacaagctcgggacatgaccatcttatgaaaatttcaagcagttcaagcactgtggctatccctggctacaccttcacaagcccggggatgaccaccaccctaccgtcatcggttatctcgcaaagaactcaacagacctccagtcagatgccagccagctctacggccccttcctcccaggagacagtgcagcccacgagcccggcaacggcattgagaacacctaccctgccagagaccatgagctccagccccacagcagcatcaactacccaccgataccccaaaacaccttctcccactgtggctcatgagagtaactgggtaactccagcaggggtggggcaagtaggagaacccagactcgggtagaagaggctttaagacaaggttttctgttctttcctccaacgcagggcccctggctggggctttgagcagcacttacccattccctcctccctctccctggttagcctggtcctggcttgagctgccctcaagccacgcagccaggacatacctggctctggaatgggtccagccatgcctccagcttgccgtgaactctttcctatctgggtcaccccttagttggggggaaatgtcaaagattccatgactattagcccaaaccttaatctcagtggcttcttccaggcaaagtgtgaggatcttgagacacagacacagagtgagaagcagctcgtcctgaacctcacaggaaacaccctctgtgcagggggcgcttcggatgagaaattgatctcactgatatgccgagcagtcaaagccaccttcaacccggcccaagataagtgcggcatacggctggcatctgttccaggaagtcagaccgtggtcgtcaaagaaatcactattcacactaagctccctgccaaggatgtgtacgagcggctgaaggacaaatgggatgaactaaaggaggcaggggtcagtgacatgaagctaggggaccaggggccaccggaggaggccgaggaccgcttcagcatgcccctcatcatcaccatcgtctgcatggcatcattcctgctcctcgtggcggccctctatggctgctgccaccagcgcctctcccagaggaaggaccagcagcggctaacagaggagctgcagacagtggagaatggttaccatgacaacccaacactggaagtgatggagacctcttctgagatgcaggagaagaaggtggtcagcctcaacggggagctgggggacagctggatcgtccctctggacaacctgaccaaggacgacctggatgaggaggaagacacacacctctagtccggtctgccggtggcctccagcagcaccacagagctccagaccaaccaccccaagtgccgtttggatggggaagggaaagactggggagggagagtgaactccgaggggtgtcccctcccaatccccccagggccttaatttttcccttttcaacctgaacaaatcacattctgtccagattcctcttgtaaaataacccactagtgcctgagctcagtgctgctggatgatgagggagatcaagaaaaagccacgtaagggactttatagatgaactagtggaatcccttcattctgcagtgagattgccgagacctgaagagggtaagtgacttgcccaaggtcagagccacttggtgacagagccaggatgagaacaaagattccatttgcaccatgccacactgctgtgttcacatgtgccttccgtccagagcagtcccgggcaggggtgaaactccagcaggtggctgggctggaaaggagggcagggctacatcctggctcggtgggatctgacgacctgaaagtccagctcccaagttttccttctcctaccccagcctcgtgtacccatcttcccaccctctatgttcttacccctccctacactcagtgtttgttcccacttactctgtcctggggcctctgggattagcacaggttattcataaccttgaaccccttgttctggattcggattttctcacatttgcttcgtgagatgggggcttaacccacacaggtctccgtgcgtgaaccaggtctgcttaggggacctgcgtgcaggtgaggagagaaggggacactcgagtccaggctggtatctcagggcagctgatgaggggtcagcaggaacactggcccattgcccctggcactccttgcagaggccacccacgatcttctttgggcttccatttccaccagggactaaaatctgctgtagctagtgagagcagcgtgttccttttgttgttcactgctcagctgatgggagtgattccctgagacccagtatgaaagagcagtggctgcaggagaggccttcccggggccccccatcagcgatgtgtcttcagagacaatccattaaagcagccaggaaggacaggctttcccctgtatatcataggaaactcagggacatttcaagttgctgagagttttgttatagttgttttctaacccagccctccactgccaaaggccaaaagctcagacagttggcagacgtccagttagctcatctcactcactctgattctcctgtgccacaggaaaagagggcctggaaagcgcagtgcatgctgggtgcatgaagggcagcctgggggacagactgttgtgggaacgtcccactgtcctggcctggagctaggccttgctgttcctcttctctgtgagcctagtggggctgctgcggttctcttgcagtttctggtggcatctcaggggaacacaaagctatgtctattccccaatataggacttttatgggctcggcagttagctgccatgtagaaggctcctaagcagtgggcatggtgaggtttcatctgattgagaagggggaatcctgtgtggaatgttgaactttcgccatggtctccatcgttctgggcgtaaattccctgggatcaagtaggaaaatgggcagaactgcttaggggaatgaaattgccatttttcgggtgaaacgccacacctccagggtcttaagagtcaggctccggctgtagtagctctgatgaaataggctatccactcgggatggcttactttttaaaagggtagggggaggggctggggaagatctgtcctgcaccatctgcctaattccttcctcacagtctgtagccatctgatatcctaggggaaaaggaaggccaggggttcacatagggccccagcgagtttcccaggagttagagggatgcgaggctaacaagttccaaaaacatctgccccgatgctctagtgtttggaggtgggcaggatggagaacagtgcctgtttgggggaaaacaggaaatcttgttaggcttgagtgaggtgtttgcttccttcttgcccagcgctgggttctctccacccagtaggttttctgttgtggtcccgtgggagaggccagactggattattcctcctttgctgatcctgggtcacacttcaccagccagggcttttgacggagacagcaaataggcctctgcaaatcaatcaaaggctgcaaccctatggcctcttggagacagatgatgactggcaaggactagagagcaggagtgcctggccaggtcggtcctgactctcctgactctccatcgctctgtccaaggagaacccggagaggctctgggctgattcagaggttactgctttatattcgtccaaactgtgttagtctaggcttaggacagcttcagaatctgacaccttgccttgctcttgccaccaggacacctatgtcaacaggccaaacagccatgcatctataaaggtcatcatcttctgccacctttactgggttctaaatgctctctgataattcagagagcattgggtctgggaagaggtaagaggaacactagaagctcagcatgacttaaacaggttgtagcaaagacagtttatcatcagctctttcagtggtaaactgtggtttccccaagctgcacaggaggccagaaaccacaagtatgatgactaggaagcctactgtcatgagagtggggagacaggcagcaaagcttatgaaggaggtacagaatattctttgcgttgtaagacagaatacgggtttaatctagtctaggcaccagatttttttcccgcttgataaggaaagctagcagaaagtttatttaaaccacttcttgagctttatcttttttgacaatatactggagaaactttgaagaacaagttcaaactgatacatatacacatatttttttgataatgtaaatacagtgaccatgttaacctaccctgcactgctttaagtgaacatactttgaaaaagcattatgttagctgagtgatggccaagttttttctctggacaggaatgtaaatgtcttactggaaatgacaagtttttgcttgatttttttttttaaacaaaaaatgaaatataacaagacaaacttatgataaagtatttgtcttgtagatcaggtgttttgttttgtttttttaattttaaaatgcaaccctgccccctccccagcaaagtcacagctccatttcagtaaaggttggagtcaatatgctctggttggcaggcaaccctgtagtcatggagaaaggtatttcaagatctagtccaatctttttctagagaaaaagataatctgaagctcacaaagatgaagtgacttcctcaaaatcacatggttcaggacagaaacaagattaaaacctggatccacagactgtgcgcctcagaaggaataatcggtaaattaagaattgctactcgaaggtgccagaatgacacaaaggacagaattcctttcccagttgttaccctagcaaggctagggagggcatgaacacaaacataagaactggtcttctacactttctctgaatcatttaggtttaagatgtaagtgaacaattctttctttctgccaagaaacaaagttttggatgagcttttatatatggaacttactccaacaggactgagggaccaaggaaacatgatgggggaggcagagagggcaagagtaaaactgtagcatagcttttgtcacggtcactagctgatccctcaggtctgctgcaaacacagcatggaggacacagatgactctttggtgttggtctttttgtctgcagtgaatgttcaacagtttgcccaggaactgggggatcatatatgtcttagtggacaggggtctgaagtacactggaatttactgagaaacttgtttgtaaaaactatagttaataattattgcattttcttacaaaaatatattttggaaaattgtatactgtcaattaaagtgtttttgtgtaaactggttcaa

SEQ ID NO: 166853 - DNA, 2186 bp, Homo sapiens
  Payload ID: 12848
  Gene Symbol: PODXL2
  Gene Name: podocalyxin-like 2
  Uniprot ID: Q9NZ53
  ENST ID: ENST00000342480
  CDS Start-End: 40-1857
cgccgcgccgctgcggctgcaggcggcgacggctacaccatgggccggctgctgcgggccgcccggctgccgccgctgctttcgccgctgctgcttctgctggttgggggagcgttcctgggtgcctgtgtggctgggtctgatgagcctggcccagagggcctcacctccacctccctgctagacctcctgctgcccactggcttggagccactggactcagaggagcctagtgagaccatgggcctgggagctgggctgggagcccctggctcaggcttccccagcgaagagaatgaagagtctcggattctgcagccaccacagtacttctgggaagaggaggaagagctgaatgactcaagtctggacctgggacccactgcagattatgtttttcctgacttaactgagaaggcaggttccattgaagacaccagccaggctcaagagctgccaaacctcccctctcccttgcccaagatgaatctggttgagcctccctggcatatgcctcccagagaggaggaagaagaggaagaggaagaggaggagagggagaaggaagaggtagagaaacaagaggaggaggaagaggaggagctgctccctgtgaatggatcccaagaagaagccaagcctcaggtccgtgacttttctctcaccagcagcagccagaccccaggggccaccaaaagcaggcatgaagactccggggaccaggcctcatcaggtgtggaggtggagagcagcatggggcccagcttgctgctgccttcagtcaccccaactacagtgactccgggggaccaggactccaccagccaagaggcagaggccacagtgctgccagctgcagggcttggggtagagttcgaggctcctcaggaagcaagcgaggaagccactgcaggagcagctggtttgtctggccagcacgaggaggtgccggccttgccttcattccctcaaaccacagctcccagtggggccgagcacccagatgaagatccccttggctctagaacctcagcctcttccccactggcccctggagacatggaactgacaccttcctctgctaccttgggacaagaagatctcaaccagcagctcctagaagggcaggcagctgaagctcaatccaggataccctgggattctacgcaggtgatctgcaaggactggagcaatctggctgggaaaaactacatcattctgaacatgacagagaacatagactgtgaggtgttccggcagcaccgggggccacagctcctggccctggtggaagaggtgctgccccgccatggcagtggccaccatggggcctggcacatctctctgagcaagcccagcgagaaggagcagcaccttctcatgacactggtgggcgagcagggggtggtgcccactcaagatgtcctttccatgctgggtgacatccgcaggagcctggaggagattggcatccagaactattccacaaccagcagctgccaggcgcgggccagccaggtgcgcagcgactacggcacgctcttcgtggtgctggtggtcattggggccatctgcatcatcatcattgcgcttggcctgctctacaactgctggcagcgccggctgcccaagctcaagcacgtgtcgcacggcgaggagctgcgcttcgtggagaacggctgccacgacaaccccacgctggacgtggccagcgacagccagtcggagatgcaggagaagcaccccagcctgaacggcggcggggccctcaacggcccggggagctggggggcgctcatggggggcaagcgggaccccgaggactcggacgtgttcgaggaggacacgcacctgtgagcgcagccgaggcgcaggccgagtgggccgccaggaccaagcgaggtggaccccgaaacggacggcccggagcccgcaccagccccgcgcctacccgggccgcccccgcggcctggccctcggcgcgggctccttcccgcttcccccgacttcacacggcggcttcggaccaactccctcactcccgcccgaggggcaggcctcaaagcccgccttggccccgctttcccgcccctgaaccccggccccgcgggcggcgggcggcgcttcctgcgccccgggactcaattaaacccgcccggagaccacgccgggcccagcgcgtctgc

SEQ ID NO: 166854 - DNA, 3010 bp, Homo sapiens
  Payload ID: 12849
  Gene Symbol: PODN
  Gene Name: podocan
  Uniprot ID: Q7Z5L7
  ENST ID: ENST00000312553
  CDS Start-End: 8-1993
gacttgaatggaaggagcccgagcccgcggagcgcagctgagactgggggagcgcgttcggcctgtggggcgccgctcggcgccggggcgcagcaggttccgtcagccctggcgcccaggcgcatctgactcggcaccccctgcaggcaccatggcccagagccgggtgctgctgctcctgctgctgctgccgccacagctgcacctgggacctgtgcttgccgtgagggccccaggatttggccgaagtggcggccacagcctgagccccgaagagaacgaatttgcggaggaggagccggtgctggtactgagccctgaggagcccgggcctggcccagccgcggtcagctgcccccgagactgtgcctgttcccaggagggcgtcgtggactgtggcggtattgacctgcgtgagttcccgggggacctgcctgagcacaccaaccacctatctctgcagaacaaccagctggaaaagatctaccctgaggagctctcccggctgcaccggctggagacgctgaacctgcaaaacaaccgcctgacttcccgagggctcccagagaaggcgtttgagcatctgaccaacctcaattacctgtacttggccaataacaagctgaccttggcaccccgcttcctgccaaacgccctgatcagtgtggactttgctgccaactatctcaccaagatctatgggctcacctttggccagaagccaaacttgaggtctgtgtacctgcacaacaacaagctggcagacgccgggctgccggacaacatgttcaacggctccagcaacgtcgaggtcctcatcctgtccagcaacttcctgcgccacgtgcccaagcacctgccgcctgccctgtacaagctgcacctcaagaacaacaagctggagaagatccccccgggggccttcagcgagctgagcagcctgcgcgagctatacctgcagaacaactacctgactgacgagggcctggacaacgagaccttctggaagctctccagcctggagtacctggatctgtccagcaacaacctgtctcgggtcccagctgggctgccgcgcagcctggtgctgctgcacttggagaagaacgccatccggagcgtggacgcgaatgtgctgacccccatccgcagcctggagtacctgctgctgcacagcaaccagctgcgggagcagggcatccacccactggccttccagggcctcaagcggttgcacacggtgcacctgtacaacaacgcgctggagcgcgtgcccagtggcctgcctcgccgcgtgcgcaccctcatgatcctgcacaaccagatcacaggcattggccgcgaagactttgccaccacctacttcctggaggagctcaacctcagctacaaccgcatcaccagcccgcaggtgcaccgcgacgccttccgcaagctgcgcctgctgcgctcgctggacctgtcgggcaaccggctgcacacgctgccacctgggctgcctcgaaatgtccatgtgctgaaggtcaagcgcaatgagctggctgccttggcacgaggggcgctggtgggcatggctcagctgcgtgagctgtacctcaccagcaaccgactgcgcagccgagccctgggcccccgtgcctgggtggacctcgcccatctgcagctgctggacatcgccgggaatcagctcacagagatccccgaggggctccccgagtcacttgagtacctgtacctgcagaacaacaagattagtgcggtgcccgccaatgccttcgactccacgcccaacctcaaggggatctttctcaggtttaacaagctggctgtgggctccgtggtggacagtgccttccggaggctgaagcacctgcaggtcttggacattgaaggcaacttagagtttggtgacatttccaaggaccgtggccgcttggggaaggaaaaggaggaggaggaagaggaggaggaggaggaagaggaaacaagatagtgacaaggtgatgcagatgtgacctaggacgatggaccgccggactcttttctgcagcacacgcctgtgtgctgtgagccccccactctgccgtgctcacacagacacacccagctgcacacatgaggcatcccacatgacacgggctgacacagtctcatatccccaccccttcccacggcgtgtcccacggccagacacatgcacacacatcacaccctcaaacacccagctcagccacacacaactaccctccaaaccaccacagtctctgtcacacccccactaccgctgccacgccctctgaatcatgcagggaagggtctgcccctgccctggcacacacaggcacccattccctccccctgctgacatgtgtatgcgtatgcatacacaccacacacacacacatgcacaagtcatgtgcgaacagccctccaaagcctatgccacagacagctcttgccccagccagaatcagccatagcagctcgccgtctgccctgtccatctgtccgtccgttccctggagaagacacaagggtatccatgctctgtggccaggtgcctgccaccctctggaactcacaaaagctggcttttattcctttcccatcctatggggacaggagccttcaggactgctggcctggcctggcccaccctgctcctccaggtgctgggcagtcactctgctaagagtccctccctgccacgccctggcaggacacaggcacttttccaatgggcaagcccagtggaggcaggatgggagagccccctgggtgctgctggggccttggggcaggagtgaagcagaggtgatggggctgggctgagccagggaggaaggacccagctgcacctaggagacacctttgttcttcaggcctgtgggggaagttccgggtgcctttattttttattcttttctaaggaaaaaaatgataaaaatctcaaagctgatttttcttgttatagaaaaactaatataaaagcattatccctatccctgca

SEQ ID NO: 166855 - DNA, 3287 bp, Homo sapiens
  Payload ID: 12849
  Gene Symbol: PODN
  Gene Name: podocan
  Uniprot ID: Q7Z5L7
  ENST ID: ENST00000371500
  CDS Start-End: 342-2270
caaaacttgcgtcgcggagagcgcccagcttgacttgaatggaaggagcccgagcccgcggagcgcagctgagactgggggagcgcgttcggcctgtggggcgccgctcggcgccggggcgcagcagggaaggggaagctgtggtctgccctgctccacgaggcgccactggtgtgaaccgggagagcccctgggtggtcccgtcccctatccctcctttatatagaaaccttccacactgggaaggcagcggcgaggcaggagggctcatggtgagcaaggaggccggctgatctgcaggcgcacagcattccgagtttacagatttttacagataccaaatggaaggcgaggaggcagaacagcctgcctggttccgtcagccctggcgcccaggcgcatctgactcggcaccccctgcaggcaccatggcccagagccgggtgctgctgctcctgctgctgctgccgccacagctgcacctgggacctgtgcttgccgtgagggccccaggatttggccgaagtggcggccacagcctgagccccgaagagaacgaatttgcggaggaggagccggtgctggtactgagccctgaggagcccgggcctggcccagccgcggtcagctgcccccgagactgtgcctgttcccaggagggcgtcgtggactgtggcggtattgacctgcgtgagttcccgggggacctgcctgagcacaccaaccacctatctctgcagaacaaccagctggaaaagatctaccctgaggagctctcccggctgcaccggctggagacgctgaacctgcaaaacaaccgcctgacttcccgagggctcccagagaaggcgtttgagcatctgaccaacctcaattacctgtacttggccaataacaagctgaccttggcaccccgcttcctgccaaacgccctgatcagtgtggactttgctgccaactatctcaccaagatctatgggctcacctttggccagaagccaaacttgaggtctgtgtacctgcacaacaacaagctggcagacgccgggctgccggacaacatgttcaacggctccagcaacgtcgaggtcctcatcctgtccagcaacttcctgcgccacgtgcccaagcacctgccgcctgccctgtacaagctgcacctcaagaacaacaagctggagaagatccccccgggggccttcagcgagctgagcagcctgcgcgagctatacctgcagaacaactacctgactgacgagggcctggacaacgagaccttctggaagctctccagcctggagtacctggatctgtccagcaacaacctgtctcgggtcccagctgggctgccgcgcagcctggtgctgctgcacttggagaagaacgccatccggagcgtggacgcgaatgtgctgacccccatccgcagcctggagtacctgctgctgcacagcaaccagctgcgggagcagggcatccacccactggccttccagggcctcaagcggttgcacacggtgcacctgtacaacaacgcgctggagcgcgtgcccagtggcctgcctcgccgcgtgcgcaccctcatgatcctgcacaaccagatcacaggcattggccgcgaagactttgccaccacctacttcctggaggagctcaacctcagctacaaccgcatcaccagcccgcaggtgcaccgcgacgccttccgcaagctgcgcctgctgcgctcgctggacctgtcgggcaaccggctgcacacgctgccacctgggctgcctcgaaatgtccatgtgctgaaggtcaagcgcaatgagctggctgccttggcacgaggggcgctggtgggcatggctcagctgcgtgagctgtacctcaccagcaaccgactgcgcagccgagccctgggcccccgtgcctgggtggacctcgcccatctgcagctgctggacatcgccgggaatcagctcacagagatccccgaggggctccccgagtcacttgagtacctgtacctgcagaacaacaagattagtgcggtgcccgccaatgccttcgactccacgcccaacctcaaggggatctttctcaggtttaacaagctggctgtgggctccgtggtggacagtgccttccggaggctgaagcacctgcaggtcttggacattgaaggcaacttagagtttggtgacatttccaaggaccgtggccgcttggggaaggaaaaggaggaggaggaagaggaggaggaggaggaagaggaaacaagatagtgacaaggtgatgcagatgtgacctaggacgatggaccgccggactcttttctgcagcacacgcctgtgtgctgtgagccccccactctgccgtgctcacacagacacacccagctgcacacatgaggcatcccacatgacacgggctgacacagtctcatatccccaccccttcccacggcgtgtcccacggccagacacatgcacacacatcacaccctcaaacacccagctcagccacacacaactaccctccaaaccaccacagtctctgtcacacccccactaccgctgccacgccctctgaatcatgcagggaagggtctgcccctgccctggcacacacaggcacccattccctccccctgctgacatgtgtatgcgtatgcatacacaccacacacacacacatgcacaagtcatgtgcgaacagccctccaaagcctatgccacagacagctcttgccccagccagaatcagccatagcagctcgccgtctgccctgtccatctgtccgtccgttccctggagaagacacaagggtatccatgctctgtggccaggtgcctgccaccctctggaactcacaaaagctggcttttattcctttcccatcctatggggacaggagccttcaggactgctggcctggcctggcccaccctgctcctccaggtgctgggcagtcactctgctaagagtccctccctgccacgccctggcaggacacaggcacttttccaatgggcaagcccagtggaggcaggatgggagagccccctgggtgctgctggggccttggggcaggagtgaagcagaggtgatggggctgggctgagccagggaggaaggacccagctgcacctaggagacacctttgttcttcaggcctgtgggggaagttccgggtgcctttattttttattcttttctaaggaaaaaaatgataaaaatctcaaagctgatttttcttgttatagaaaaactaatataaaagcattatccctatccctgca

SEQ ID NO: 166856 - DNA, 2744 bp, Homo sapiens
  Payload ID: 12849
  Gene Symbol: PODN
  Gene Name: podocan
  Uniprot ID: Q7Z5L7
  ENST ID: ENST00000395871
  CDS Start-End: 169-1728
ttctcctgcccgcgcctggggggaccctacgcctgtgtccgaaggaggccggcgtccagcagatgctcccggggcgggtggggagtgggggaagggggcgggagagaggcggggaggagaaaacccacaacaaaacttgcgtcgcggagagcgcccagcttgacttgaatggaaggagcccgagcccgcggagcgcagctgagactgggggagcgcgttcggcctgtggggcgccgctcggcgccggggcgcagcaggttccgtcagccctggcgcccaggcgcatctgactcggcaccccctgcaggcaccatggcccagagccgggtgctgctgctcctgctgctgctgccgccacagctgcacctgggacctgtgcttgccgtgagggccccaggatttggccgaagtggcggccacagcctgagccccgaagagaacgaatttgcggaggaggagccggtgctggtactgagccctgaggagcccgggcctggcccagccgcggtcagctgcccccgagactgtgcctgttcccaggagggcgtcgtggactgtggcggtattgacctgcgtgagttcccgggggacctgcctgagcacaccaaccacctatctctgcagaacaacaagctggagaagatccccccgggggccttcagcgagctgagcagcctgcgcgagctatacctgcagaacaactacctgactgacgagggcctggacaacgagaccttctggaagctctccagcctggagtacctggatctgtccagcaacaacctgtctcgggtcccagctgggctgccgcgcagcctggtgctgctgcacttggagaagaacgccatccggagcgtggacgcgaatgtgctgacccccatccgcagcctggagtacctgctgctgcacagcaaccagctgcgggagcagggcatccacccactggccttccagggcctcaagcggttgcacacggtgcacctgtacaacaacgcgctggagcgcgtgcccagtggcctgcctcgccgcgtgcgcaccctcatgatcctgcacaaccagatcacaggcattggccgcgaagactttgccaccacctacttcctggaggagctcaacctcagctacaaccgcatcaccagcccgcaggtgcaccgcgacgccttccgcaagctgcgcctgctgcgctcgctggacctgtcgggcaaccggctgcacacgctgccacctgggctgcctcgaaatgtccatgtgctgaaggtcaagcgcaatgagctggctgccttggcacgaggggcgctggtgggcatggctcagctgcgtgagctgtacctcaccagcaaccgactgcgcagccgagccctgggcccccgtgcctgggtggacctcgcccatctgcagctgctggacatcgccgggaatcagctcacagagatccccgaggggctccccgagtcacttgagtacctgtacctgcagaacaacaagattagtgcggtgcccgccaatgccttcgactccacgcccaacctcaaggggatctttctcaggtttaacaagctggctgtgggctccgtggtggacagtgccttccggaggctgaagcacctgcaggtcttggacattgaaggcaacttagagtttggtgacatttccaaggaccgtggccgcttggggaaggaaaaggaggaggaggaagaggaggaggaggaggaagaggaaacaagatagtgacaaggtgatgcagatgtgacctaggacgatggaccgccggactcttttctgcagcacacgcctgtgtgctgtgagccccccactctgccgtgctcacacagacacacccagctgcacacatgaggcatcccacatgacacgggctgacacagtctcatatccccaccccttcccacggcgtgtcccacggccagacacatgcacacacatcacaccctcaaacacccagctcagccacacacaactaccctccaaaccaccacagtctctgtcacacccccactaccgctgccacgccctctgaatcatgcagggaagggtctgcccctgccctggcacacacaggcacccattccctccccctgctgacatgtgtatgcgtatgcatacacaccacacacacacacatgcacaagtcatgtgcgaacagccctccaaagcctatgccacagacagctcttgccccagccagaatcagccatagcagctcgccgtctgccctgtccatctgtccgtccgttccctggagaagacacaagggtatccatgctctgtggccaggtgcctgccaccctctggaactcacaaaagctggcttttattcctttcccatcctatggggacaggagccttcaggactgctggcctggcctggcccaccctgctcctccaggtgctgggcagtcactctgctaagagtccctccctgccacgccctggcaggacacaggcacttttccaatgggcaagcccagtggaggcaggatgggagagccccctgggtgctgctggggccttggggcaggagtgaagcagaggtgatggggctgggctgagccagggaggaaggacccagctgcacctaggagacacctttgttcttcaggcctgtgggggaagttccgggtgcctttattttttattcttttctaaggaaaaaaatgataaaaatctcaaagctgatttttcttgttatagaaaaactaatataaaagcattatccctatccctgc

SEQ ID NO: 166857 - DNA, 3065 bp, Homo sapiens
  Payload ID: 12849
  Gene Symbol: PODN
  Gene Name: podocan
  Uniprot ID: Q7Z5L7
  ENST ID: ENST00000618387
  CDS Start-End: 121-2049
gacttgaatggaaggagcccgagcccgcggagcgcagctgagactgggggagcgcgttcggcctgtggggcgccgctcggcgccggggcgcagcagtttacagatttttacagataccaaatggaaggcgaggaggcagaacagcctgcctggttccgtcagccctggcgcccaggcgcatctgactcggcaccccctgcaggcaccatggcccagagccgggtgctgctgctcctgctgctgctgccgccacagctgcacctgggacctgtgcttgccgtgagggccccaggatttggccgaagtggcggccacagcctgagccccgaagagaacgaatttgcggaggaggagccggtgctggtactgagccctgaggagcccgggcctggcccagccgcggtcagctgcccccgagactgtgcctgttcccaggagggcgtcgtggactgtggcggtattgacctgcgtgagttcccgggggacctgcctgagcacaccaaccacctatctctgcagaacaaccagctggaaaagatctaccctgaggagctctcccggctgcaccggctggagacgctgaacctgcaaaacaaccgcctgacttcccgagggctcccagagaaggcgtttgagcatctgaccaacctcaattacctgtacttggccaataacaagctgaccttggcaccccgcttcctgccaaacgccctgatcagtgtggactttgctgccaactatctcaccaagatctatgggctcacctttggccagaagccaaacttgaggtctgtgtacctgcacaacaacaagctggcagacgccgggctgccggacaacatgttcaacggctccagcaacgtcgaggtcctcatcctgtccagcaacttcctgcgccacgtgcccaagcacctgccgcctgccctgtacaagctgcacctcaagaacaacaagctggagaagatccccccgggggccttcagcgagctgagcagcctgcgcgagctatacctgcagaacaactacctgactgacgagggcctggacaacgagaccttctggaagctctccagcctggagtacctggatctgtccagcaacaacctgtctcgggtcccagctgggctgccgcgcagcctggtgctgctgcacttggagaagaacgccatccggagcgtggacgcgaatgtgctgacccccatccgcagcctggagtacctgctgctgcacagcaaccagctgcgggagcagggcatccacccactggccttccagggcctcaagcggttgcacacggtgcacctgtacaacaacgcgctggagcgcgtgcccagtggcctgcctcgccgcgtgcgcaccctcatgatcctgcacaaccagatcacaggcattggccgcgaagactttgccaccacctacttcctggaggagctcaacctcagctacaaccgcatcaccagcccgcaggtgcaccgcgacgccttccgcaagctgcgcctgctgcgctcgctggacctgtcgggcaaccggctgcacacgctgccacctgggctgcctcgaaatgtccatgtgctgaaggtcaagcgcaatgagctggctgccttggcacgaggggcgctggtgggcatggctcagctgcgtgagctgtacctcaccagcaaccgactgcgcagccgagccctgggcccccgtgcctgggtggacctcgcccatctgcagctgctggacatcgccgggaatcagctcacagagatccccgaggggctccccgagtcacttgagtacctgtacctgcagaacaacaagattagtgcggtgcccgccaatgccttcgactccacgcccaacctcaaggggatctttctcaggtttaacaagctggctgtgggctccgtggtggacagtgccttccggaggctgaagcacctgcaggtcttggacattgaaggcaacttagagtttggtgacatttccaaggaccgtggccgcttggggaaggaaaaggaggaggaggaagaggaggaggaggaggaagaggaaacaagatagtgacaaggtgatgcagatgtgacctaggacgatggaccgccggactcttttctgcagcacacgcctgtgtgctgtgagccccccactctgccgtgctcacacagacacacccagctgcacacatgaggcatcccacatgacacgggctgacacagtctcatatccccaccccttcccacggcgtgtcccacggccagacacatgcacacacatcacaccctcaaacacccagctcagccacacacaactaccctccaaaccaccacagtctctgtcacacccccactaccgctgccacgccctctgaatcatgcagggaagggtctgcccctgccctggcacacacaggcacccattccctccccctgctgacatgtgtatgcgtatgcatacacaccacacacacacacatgcacaagtcatgtgcgaacagccctccaaagcctatgccacagacagctcttgccccagccagaatcagccatagcagctcgccgtctgccctgtccatctgtccgtccgttccctggagaagacacaagggtatccatgctctgtggccaggtgcctgccaccctctggaactcacaaaagctggcttttattcctttcccatcctatggggacaggagccttcaggactgctggcctggcctggcccaccctgctcctccaggtgctgggcagtcactctgctaagagtccctccctgccacgccctggcaggacacaggcacttttccaatgggcaagcccagtggaggcaggatgggagagccccctgggtgctgctggggccttggggcaggagtgaagcagaggtgatggggctgggctgagccagggaggaaggacccagctgcacctaggagacacctttgttcttcaggcctgtgggggaagttccgggtgcctttattttttattcttttctaaggaaaaaaatgataaaaatctcaaagctgatttttcttgttatagaaaaactaatataaaagcattatccctatccctgc

SEQ ID NO: 166858 - DNA, 1859 bp, Homo sapiens
  Payload ID: 12850
  Gene Symbol: PODNL1
  Gene Name: podocan-like 1
  ENST ID: ENST00000254320
  CDS Start-End: 217-1509
agtcaccatggcgaccctgcgcccagcctggagacacgctgaccctccctcccccgcagtggccgagcctgctgctgctcctgctgttgccggggcccccgcccgtcgccggcttggaagacgctgccttcccccacctgggggagagcttgcagcccctgccccgggcctgtcccctgcgctgctcctgcccccgagtcgacactgtggactgtgatggcttggaccttcgagtgttcccggacaacatcaccagagccgctcagcacctctccctgcagaacaaccagctccaggaactcccctacaatgagctgtcccgcctcagtggcctgcgaaccctcaacctccacaacaacctcatctcctccgaagctctcagtggcccctcagtttctgccccggtccctccgtgtcgcggatctggctgccaaccaagtgatggagatcttccccctcacctttggggagaagccggcactcaggtccgtgtacctccacaacaaccagctgagcaacgctggcctgccccccgacgccttccgcggctccgaggccatcgccaccctcagcctctccaacaaccagctcagctacctgccgcccagcctgccgccctcactcgagcggctccacctgcagaacaatctcatctccaaggtgccccgaggagccctgagccgccagactcaactccgtgagctctacctccagcacaaccagctgacagacagtggcctggatgccaccaccttcagcaagctgcatagccttgaatacctggatctctcccacaaccagctgaccacagtgcccgccggcctgccccggaccctggctatcctgcacctgggccgcaaccgcatccggcaggtggaggcggctcggctgcacggggcgcgtggtctgcgctatttgttgctgcagcacaaccagctggggagctcagggctgcccgccggggctctgcggccgctgcggggcctgcacacgctgcacctctatggcaatgggctggaccgcgtgcctccagccctgccccgccgcctgcgtgccctggtgctgccccacaaccacgtggccgcgctgggtgcccgtgacctggtcgccacaccgggcctgacggagcttaacctggcctataaccgcctggccagcgcccgtgtgcaccaccgggccttccgccggttgcgtgccctgcgcagcctcgacctggcagggaatcagctaacccggctgcccatgggcctgcccactggcctgcgcaccctgcagctgcaacgcaaccagctgcggatgctcgagcccgagcctctggccggcctggaccaactgcgggagctcagcctggcgcacaaccggctccgggtcggcgacatcgggccaggcacctggcatgagctccaagccctccaggtcaggcacaggctggttagccacactgtccccagggcccctccatccccctgcctgccctgccacgtcccaaacattctagttagctggtaaagcaatcagaacaagaaaatgataagagtgggttagaaggtgatgaggaggctgggtgaggtggctcatgcctgtaatcccagcactttggggagccaaggcaggagaatcgctttaggctatgggtttgagaccagcctggcaacacagcaagaccctatctctaccaaaaaaacatagccaagcgtggtggcacatgcctgtagtcccagctattcaggaggctgaggcaggaggatcgcttgagcccagaagtttgaggctgcaatgagccgtgatcgggccactgccctctagactgggcaacagagcaagaccctgtctcttgaaaaaaaaagtgatgaaagagg

SEQ ID NO: 166859 - DNA, 2165 bp, Homo sapiens
  Payload ID: 12850
  Gene Symbol: PODNL1
  Gene Name: podocan-like 1
  Uniprot ID: Q6PEZ8
  ENST ID: ENST00000339560
  CDS Start-End: 275-1813
aggctggctgaggttacgaaagcagagatggggtggttgttgggggggaccaaggggacgggctggcctgtcctcaccaccccatccggccgcctgcccgtcctccccagggcggggaagggggtgggccagctcccccaaagccccgggagaacaggctgttgtggggggtggcatgggtctggagatggggggcggtggtggccacagcagaggctccaggaggtgaccgcctggtttccattaggaagtcctggtcagcagcttgggcgagatggcagagtcagggctggccatgtggccgagcctgctgctgctcctgctgttgccggggcccccgcccgtcgccggcttggaagacgctgccttcccccacctgggggagagcttgcagcccctgccccgggcctgtcccctgcgctgctcctgcccccgagtcgacactgtggactgtgatggcttggaccttcgagtgttcccggacaacatcaccagagccgctcagcacctctccctgcagaacaaccagctccaggaactcccctacaatgagctgtcccgcctcagtggcctgcgaaccctcaacctccacaacaacctcatctcctccgaaggcctgcctgacgaggccttcgagtccctcacccagctgcagcacctctgcgtggctcacaacaagctctcagtggcccctcagtttctgccccggtccctccgtgtcgcggatctggctgccaaccaagtgatggagatcttccccctcacctttggggagaagccggcactcaggtccgtgtacctccacaacaaccagctgagcaacgctggcctgccccccgacgccttccgcggctccgaggccatcgccaccctcagcctctccaacaaccagctcagctacctgccgcccagcctgccgccctcactcgagcggctccacctgcagaacaatctcatctccaaggtgccccgaggagccctgagccgccagactcaactccgtgagctctacctccagcacaaccagctgacagacagtggcctggatgccaccaccttcagcaagctgcatagccttgaatacctggatctctcccacaaccagctgaccacagtgcccgccggcctgccccggaccctggctatcctgcacctgggccgcaaccgcatccggcaggtggaggcggctcggctgcacggggcgcgtggtctgcgctatttgttgctgcagcacaaccagctggggagctcagggctgcccgccggggctctgcggccgctgcggggcctgcacacgctgcacctctatggcaatgggctggaccgcgtgcctccagccctgccccgccgcctgcgtgccctggtgctgccccacaaccacgtggccgcgctgggtgcccgtgacctggtcgccacaccgggcctgacggagcttaacctggcctataaccgcctggccagcgcccgtgtgcaccaccgggccttccgccggttgcgtgccctgcgcagcctcgacctggcagggaatcagctaacccggctgcccatgggcctgcccactggcctgcgcaccctgcagctgcaacgcaaccagctgcggatgctcgagcccgagcctctggccggcctggaccaactgcgggagctcagcctggcgcacaaccggctccgggtcggcgacatcgggccaggcacctggcatgagctccaagccctccaggtcaggcacaggctggttagccacactgtccccagggcccctccatccccctgcctgccctgccacgtcccaaacattctagttagctggtaaagcaatcagaacaagaaaatgataagagtgggttagaaggtgatgaggaggctgggtgaggtggctcatgcctgtaatcccagcactttggggagccaaggcaggagaatcgctttaggctatgggtttgagaccagcctggcaacacagcaagaccctatctctaccaaaaaaacatagccaagcgtggtggcacatgcctgtagtcccagctattcaggaggctgaggcaggaggatcgcttgagcccagaagtttgaggctgcaatgagccgtgatcgggccactgccctctagactgggcaacagagcaagaccctgtctcttgaaaaaaaaagtgatgaaagaggta

SEQ ID NO: 166860 - DNA, 2744 bp, Homo sapiens
  Payload ID: 12850
  Gene Symbol: PODNL1
  Gene Name: podocan-like 1
  Uniprot ID: Q6PEZ8
  ENST ID: ENST00000538517
  CDS Start-End: 246-1511
aaagctaccagcctcacggagaaggcgcagtccctgtccacagagacacagccttgccccagttactgcccacctgcaagagatccacatttctgccctccagagctcccaaactgatgggggagagagacatcatcccccagctctgggagtttccagtctgatggaggagacagagcctgcttcggtaactctcactctgcgggggaagactcagccctatccagggagctcccacactttcaatggggaggcccacccagtggccgagcctgctgctgctcctgctgttgccggggcccccgcccgtcgccggcttggaagacgctgccttcccccacctgggggagagcttgcagcccctgccccgggcctgtcccctgcgctgctcctgcccccgagtcgacactgtggactgtgatggcttggaccttcgagtgttcccggacaacatcaccagagccgctcagcacctctccctgcagaacaaccagctccaggaactcccctacaatgagctgtcccgcctcagtggcctgcgaaccctcaacctccacaacaacctcatctcctccgaaggcctgcctgacgaggccttcgagtccctcacccagctgcagcacctctgcgtggctcacaacaagaacaatctcatctccaaggtgccccgaggagccctgagccgccagactcaactccgtgagctctacctccagcacaaccagctgacagacagtggcctggatgccaccaccttcagcaagctgcatagccttgaatacctggatctctcccacaaccagctgaccacagtgcccgccggcctgccccggaccctggctatcctgcacctgggccgcaaccgcatccggcaggtggaggcggctcggctgcacggggcgcgtggtctgcgctatttgttgctgcagcacaaccagctggggagctcagggctgcccgccggggctctgcggccgctgcggggcctgcacacgctgcacctctatggcaatgggctggaccgcgtgcctccagccctgccccgccgcctgcgtgccctggtgctgccccacaaccacgtggccgcgctgggtgcccgtgacctggtcgccacaccgggcctgacggagcttaacctggcctataaccgcctggccagcgcccgtgtgcaccaccgggccttccgccggttgcgtgccctgcgcagcctcgacctggcagggaatcagctaacccggctgcccatgggcctgcccactggcctgcgcaccctgcagctgcaacgcaaccagctgcggatgctcgagcccgagcctctggccggcctggaccaactgcgggagctcagcctggcgcacaaccggctccgggtcggcgacatcgggccaggcacctggcatgagctccaagccctccaggtcaggcacaggctggttagccacactgtccccagggcccctccatccccctgcctgccctgccacgtcccaaacattctagttagctggtaaagcaatcagaacaagaaaatgataagagtgggttagaaggtgatgaggaggctgggtgaggtggctcatgcctgtaatcccagcactttggggagccaaggcaggagaatcgctttaggctatgggtttgagaccagcctggcaacacagcaagaccctatctctaccaaaaaaacatagccaagcgtggtggcacatgcctgtagtcccagctattcaggaggctgaggcaggaggatcgcttgagcccagaagtttgaggctgcaatgagccgtgatcgggccactgccctctagactgggcaacagagcaagaccctgtctcttgaaaaaaaaagtgatgaaagaggtatggtgcgattcaatgactgactcatttaatcaagtggggacctgtctgtctgtgccttcctgggaagggccttagtttacctctgcagaagggaggaatttggcaatcatggggggtggggggcagaagggccaggctggtatgaagggggcaggggactctcagagaggttgggggctggctgagctgagtggcccaggcctggggctgccacgatgccatctataaccccctgcccagatgctggacctcagccacaatgagctgtcctttgtgcccccggacctgcctgaggccctagaggagctgcacctcgagggcaaccgcatcggccacgtgggccccgaggccttcctcagcacaccccgcctgcgtgccctcttcctcaggtgccccgagggtgaccggaggggtggaggtgggcaggggagggcctgggagggtcatgaccgcctctctgtgcagggccaacaggcttcacatgacgagcatcgcggctgaggccttcctggggctcccaaacctgcgtgtggtggacacggcagggaatccggagcaggtcctgatccggctgcctcccaccaccccacgtgggccacgggcagggggcccctgatcctagagaggcccagcagagcagctcagactcctgggactccgctgggccgtggactgaggagacaacgcccaccaggggcccttggtctggctctcctgggcctccagggctgggcctgctctgcctgccactggccgagacacagaggcacacagctggcatactccaggctcacagaccacgccggcctggcgggacacaccctaccccaaactcccaacacagatggaggcagcaacaataaagccaaacccttccagca

SEQ ID NO: 166861 - DNA, 1826 bp, Homo sapiens
  Payload ID: 12850
  Gene Symbol: PODNL1
  Gene Name: podocan-like 1
  Uniprot ID: Q6PEZ8
  ENST ID: ENST00000538371
  CDS Start-End: 257-1789
actgcccttacaaagctaccagcctcacggagaaggcgcagtccctgtccacagagacacagccttgccccagttactgcccacctgcaagagatccacatttctgccctccagagctcccaaactgatgggggagagagacatcatcccccagctctgggagtttccagtctgatggaggagacagagcctgcttcggtaactctcactctgcgggggaagactcagccctatccagggagctcccacactttcaatggggaggcccacccagtggccgagcctgctgctgctcctgctgttgccggggcccccgcccgtcgccggcttggaagacgctgccttcccccacctgggggagagcttgcagcccctgccccgggcctgtcccctgcgctgctcctgcccccgagtcgacactgtggactgtgatggcttggaccttcgagtgttcccggacaacatcaccagagccgctcagcacctctccctgcagaacaaccagctccaggaactcccctacaatgagctgtcccgcctcagtggcctgcgaaccctcaacctccacaacaacctcatctcctccgaaggcctgcctgacgaggccttcgagtccctcacccagctgcagcacctctgcgtggctcacaacaagctctcagtggcccctcagtttctgccccggtccctccgtgtcgcggatctggctgccaaccaagtgatggagatcttccccctcacctttggggagaagccggcactcaggtccgtgtacctccacaacaaccagctgagcaacgctggcctgccccccgacgccttccgcggctccgaggccatcgccaccctcagcctctccaacaaccagctcagctacctgccgcccagcctgccgccctcactcgagcggctccacctgcagaacaatctcatctccaaggtgccccgaggagccctgagccgccagactcaactccgtgagctctacctccagcacaaccagctgacagacagtggcctggatgccaccaccttcagcaagctgcatagccttgaatacctggatctctcccacaaccagctgaccacagtgcccgccggcctgccccggaccctggctatcctgcacctgggccgcaaccgcatccggcaggtggaggcggctcggctgcacggggcgcgtggtctgcgctatttgttgctgcagcacaaccagctggggagctcagggctgcccgccggggctctgcggccgctgcggggcctgcacacgctgcacctctatggcaatgggctggaccgcgtgcctccagccctgccccgccgcctgcgtgccctggtgctgccccacaaccacgtggccgcgctgggtgcccgtgacctggtcgccacaccgggcctgacggagcttaacctggcctataaccgcctggccagcgcccgtgtgcaccaccgggccttccgccggttgcgtgccctgcgcagcctcgacctggcagggaatcagctaacccggctgcccatgggcctgcccactggcctgcgcaccctgcagctgcaacgcaaccagctgcggatgctcgagcccgagcctctggccggcctggaccaactgcgggagctcagcctggcgcacaaccggctccgggtcggcgacatcgggccaggcacctggcatgagctccaagccctccaggtcaggcacaggctggttagccacactgtccccagggcccctccatccccctgcctgccctgccacgtcccaaacattctagttagctggtaaagcaatcagaacaagaaaatgataagagtgggttaga

SEQ ID NO: 166862 - DNA, 545 bp, Homo sapiens
  Payload ID: 12850
  Gene Symbol: PODNL1
  Gene Name: podocan-like 1
  ENST ID: ENST00000588764
  CDS Start-End: 1-545
ccttcgagtccctcacccagctgcagcacctctgcgtggctcacaacaagctgagcaacgctggcctgccccccgacgccttccgcggctccgaggccatcgccaccctcagcctctccaacaaccagctcagctacctgccgcccagcctgccgccctcactcgagcggctccacctgcagaacaatctcatctccaaggtgccccgaggagccctgagccgccagactcaactccgtgagctctacctccagcacaaccagctgacagacagtggcctggatgccaccaccttcagcaagctgcatagccttgaatacctggatctctcccacaaccagctgaccacagtgcccgccggcctgccccggaccctggctatcctgcacctgggccgcaaccgcatccggcaggtggaggcggctcggctgcacggggcgcgtggtctgcgctatttgttgctgcagcacaaccagctggggagctcagggctgcccgccggggctctgcggccgctgcggggcctgcacacgctgcacctctat

SEQ ID NO: 166863 - DNA, 537 bp, Homo sapiens
  Payload ID: 12850
  Gene Symbol: PODNL1
  Gene Name: podocan-like 1
  ENST ID: ENST00000585607
  CDS Start-End: 167-537
gagatccacatttctgccctccagagctcccaaactgatgggggagagagacatcatcccccagctctgggagtttccagtctgatggaggagacagagcctgcttcggtaactctcactctgcgggggaagactcagccctatccagggagctcccacactttcaatggggaggcccacccagtggccgagcctgctgctgctcctgctgttgccggggcccccgcccgtcgccggcttggaagacgctgccttcccccacctgggggagagcttgcagcccctgccccgggcctgtcccctgcgctgctcctgcccccgagtcgacactgtggactgtgatggcttggaccttcgagtgttcccggacaacatcaccagagccgctcagcacctctccctgcagaacaaccagctccaggaactcccctacaatgagctgtcccgcctcagtggcctgcgaaccctcaacctccacaacaacctcatctcctccgaagaacaatctcatctccaaggtgccccgaggagccctga

SEQ ID NO: 166864 - DNA, 992 bp, Homo sapiens
  Payload ID: 12850
  Gene Symbol: PODNL1
  Gene Name: podocan-like 1
  ENST ID: ENST00000588872
  CDS Start-End: 1-716
tctatggcaatgggctggaccgcgtgcctccagccctgccccgccgcctgcgtgccctggtgctgccccacaaccacgtggccgcgctgggtgcccgtgacctggtcgccacaccgggcctgacggagcttaacctggcctataaccgcctggccagcgcccgtgtgcaccaccgggccttccgccggttgcgtgccctgcgcagcctcgacctggcagggaatcagctaacccggctgcccatgggcctgcccactggcctgcgcaccctgcagctgcaacgcaaccagctgcggatgctcgagcccgagcctctggccggcctggaccaactgcgggagctcagcctggcgcacaaccggctccgggtcggcgacatcgggccaggcacctggcatgagctccaagccctccagatgctggacctcagccacaatgagctgtcctttgtgcccccggacctgcctgaggccctagaggagctgcacctcgagggcaaccgcatcggccacgtgggccccgaggccttcctcagcacaccccgcctgcgtgccctcttcctcagggccaacaggcttcacatgacgagcatcgcggctgaggccttcctggggctcccaaacctgcgtgtggtggacacggcagggaatccggagcaggtcctgatccggctgcctcccaccaccccacgtgggccacgggcagggggcccctgatcctagagaggcccagcagagcagctcagactcctgggactccgctgggccgtggactgaggagacaacgcccaccaggggcccttggtctggctctcctgggcctccagggctgggcctgctctgcctgccactggccgagacacagaggcacacagctggcatactccaggctcacagaccacgccggcctggcgggacacaccctaccccaaactcccaacacagatggaggcagcaacaataaagccaaacccttccagcactcagcacgga

SEQ ID NO: 166865 - DNA, 562 bp, Homo sapiens
  Payload ID: 12850
  Gene Symbol: PODNL1
  Gene Name: podocan-like 1
  ENST ID: ENST00000587458
  CDS Start-End: 466-562
acaaagctaccagcctcacggagaaggcgcagtccctgtccacagagacacagccttgccccagttactgcccacctgcaagagatccacatttctgccctccagagctcccaaactgatgggggagagagacatcatcccccagctctgggagtttccagtctgatggaggagacagagcctgcttcgagtggcgtgcagtggcacatagctcattgtaacctcaaacttgagcccagaggctcaagtgttcctcctgccttggcctcctgagtacctgggactgtgggtgtgcaccaccataccagtggccgagcctgctgctgctcctgctgttgccggggcccccgcccgtcgccggcttggaagacgctgccttcccccacctgggggagagcttgcagcccctgccccgggcctgtcccctgcgctgctcctgcccccgagtcgacactgtggactgtgatggcttggaccttcgagtgttcccggacaacatcaccagagccgctcagcacctctccctgcagaacaaccagctccaggaactcccctacaatga

SEQ ID NO: 166866 - DNA, 739 bp, Homo sapiens
  Payload ID: 12850
  Gene Symbol: PODNL1
  Gene Name: podocan-like 1
  ENST ID: ENST00000586075
  CDS Start-End: 248-739
accaagaccctccccgaggaggggatgctccagtcaccatggcgaccctgcgcccagcctggagacacgctgaccctccctcccccgcagtggccgagcctgctgctgctcctgctgttgccggggcccccgcccgtcgccggcttggaagacgctgccttcccccacctgggggagagcttgcagcccctgccccgggcctgtcccctgcgctgctcctgcccccgagtcgacactgtggactgtgatggcttggaccttcgagtgttcccggacaacatcaccagagccgctcagcacctctccctgcagaacaaccagctccaggaactcccctacaatgagctgtcccgcctcagtggcctgcgaaccctcaacctccacaacaacctcatctcctccgaagaacaatctcatctccaaggtgccccgaggagccctgagccgccagactcaactccgtgagctctacctccagcacaaccagctgacagacagtggcctggatgccaccaccttcagcaagctgcatagccttgaatacctggatctctcccacaaccagctgaccacagtgcccgccggcctgccccggaccctggctatcctgcacctgggccgcaaccgcatccggcaggtggaggcggctcggctgcacggggcgcgtggtctgcgctatttgttgctgcagcacaaccagctggggagctcagggctgcccgccggggctctgcggccg

SEQ ID NO: 166867 - DNA, 454 bp, Homo sapiens
  Payload ID: 12850
  Gene Symbol: PODNL1
  Gene Name: podocan-like 1
  ENST ID: ENST00000591353
  CDS Start-End: 1-454
cgacgccttccgcggctccgaggccatcgccaccctcagcctctccaacaaccagctcagctacctgccgcccagcctgccgccctcactcgagcggctccacctgcaggtagccctgctaacaatctcatctccaaggtgccccgaggagccctgagccgccagactcaactccgtgagctctacctccagcacaaccagctgacagacagtggcctggatgccaccaccttcagcaagctgcatagccttgaatacctggatctctcccacaaccagctgaccacagtgcccgccggcctgccccggaccctggctatcctgcacctgggccgcaaccgcatccggcaggtggaggcggctcggctgcacggggcgcgtggtctgcgctatttgttgctgcagcacaaccagctggggagctcagggctgcccgccggggctctgcggccgc

SEQ ID NO: 166868 - DNA, 1073 bp, Homo sapiens
  Payload ID: 12850
  Gene Symbol: PODNL1
  Gene Name: podocan-like 1
  ENST ID: ENST00000587954
  CDS Start-End: 1-408
ctgcagctgcaacgcaaccagctgcggatgctcgagcccgagcctctggccggcctggaccaactgcgggagctcagcctggcgcacaaccggctccgggtcggcgacatcgggccaggcacctggcatgagctccaagccctccagatgctggacctcagccacaatgagctgtcctttgtgcccccggacctgcctgaggccctagaggagctgcacctcgagggcaaccgcatcggccacgtgggccccgaggccttcctcagcacaccccgcctgcgtgccctcttcctcaggtgccccgagggtgaccggaggggtggaggtgggcaggggagggcctgggagggtcatgaccgcctctctgtgcagggccaacaggcttcacatgacgagcatcgcggctgaggccttcctggggctcccaaacctgcgtgtggtggacacggcagggaatccggagcaggtcctgatccggctgcctcccaccaccccacgtgggccacgggcagggggcccctgatcctagagaggcccagcagagcagctcagactcctgggactccgctgggccgtggactgaggagacaacgcccaccaggggcccttggtctggctctcctgggcctccagggctgggcctgctctgcctgccactggccgagacacagaggcacacagctggcatactccaggctcacagaccacgccggcctggcgggacacaccctaccccaaactcccaacacagatggaggcagcaacaataaagccaaacccttccagcactcagcacggaccaggcaccctttgggggctctgtccacggactcctccccacaaccagtccagctggggaaactgaggctctgggatgctaagtgggtcaggactgaattttgaggtcttgaggcacacactggggtcaccaaacagcaccctgtgcgacctagccacgtgtgattgcagggacgcccaaggccacccactgaaaaaacactgggtgacagatatagggaccctcacatgtatccccccccacagcaagcatgggaatgaaatgcatccttcaa

SEQ ID NO: 166869 - DNA, 3104 bp, Homo sapiens
  Payload ID: 12851
  Gene Symbol: PDPN
  Gene Name: podoplanin
  Uniprot ID: Q86YL7
  ENST ID: ENST00000294489
  CDS Start-End: 342-1058
acttctcacttctgcccataacaagaaaaacatagacttgtgccttactcttaaaaaaataataataataaatataggttttttaaaatttatatataatttttaaaaccccgtttgttgcatgtggtccctttccctcctgttgttgagcagaataaaagcccattttgccagggcccgcagtcctggcggcccccgcagctgcggccctgtaactttaaacctggcctgagatcatcgttttggcgccggccaaacagagcccgagggcgggcctagcgcgcccggacggagaccaccttgcggccgaccccgctcccccgcctcctcgggagagataaatgctgactccgctcggaaagttctcaactgcaaagtttgctgtccggctgcctagggtctgggaagctcgggcaccctccctctccggggctcctgctcccacccctccggcccccccaccgtcgcgctcctccaggctgggcctgtggccgcggtgctttttaattttcccccagctcagaatcttgctgctcggcccccaggagagcaacaactcaacgggaacgatgtggaaggtgtcagctctgctcttcgttttgggaagcgcgtcgctctgggtcctggcagaaggagccagcacaggccagccagaagatgacactgagactacaggtttggaaggcggcgttgccatgccaggtgccgaagatgatgtggtgactccaggaaccagcgaagaccgctataagtctggcttgacaactctggtggcaacaagtgtcaacagtgtaacaggcattcgcatcgaggatctgccaacttcagaaagcacagtccacgcgcaagaacaaagtccaagcgccacagcctcaaacgtggccaccagtcactccacggagaaagtggatggagacacacagacaacagttgagaaagatggtttgtcaacagtgaccctggttggaatcatagttggggtcttactagccatcggcttcattggtgcaatcatcgttgtggttatgcgaaaaatgtcgggaaggtactcgccctaaagagctgaagggttacgccctgctgccaacgtgcttaaaaaaagaccgtttctgactctgtgccctgtccctgagctcgtgggagaagatgacccgtggaacacttgcctggcccactcagaatccacggtgacctctccgcttgccaaaataaccgaaggaaagaccgttcaccagacttggctcctctaaacatttgctgttcaaacatgtttttgaatatacattctataaaagattatttgaaagacaaaattcatagaaaatggagcaaaactgtataaactgatttgtaactaacactggaccattggatcgatattatatgctgtaaccatgtgtctccgtctgaccattcttgttattgttaaaatgcagaggaatctggaaatatttatatccacggagtccttggatccagtgctacgtcagtaaatagcaccagcattttgcaattgctgatctgctgaaatgtacacattctggtctagtttggtctatcttttaaagcctgatctggtgtgaataatcaactaggaaatctaaacttggataacacgtggtgaacaactgcctttagctggtccagattaatcatttcaaagacatccattttagatcacaagcaggaagtcgatagtctcaaaggcactttgtttctcccaagtaggccaccaggcagcctctagagttgctttacccaaatccttctccagccatgacttggtgactctaagcttgctcccacctgccccctccacttccctcagatgatgaggagccagggctaagggggcagccttctctcttcccagtgatgcacatccttcacattggctgctttgttctggaatatggatatctcagcctggatgccgaggaagctgctggatgcttaatggtgctagaggctcaagtgtgtttgaaaccaagagccagttgtcccccatgcagaaagaaatcctgtgtgagcctctggtatgagaaataaaatctgccagttttataacattcactttctgcctctgaggaaagatacagggaacaaaaatcaatttgtacagtcttaatattaaaagcagcttgactaaatacctgatttaaaaatagaagacatccccagtcctcatgacataccgcaaatatctgtggggtcctgttgaaaagaacaaaataaaggagcccaaggggtcattctgtctcagcaccatccagcctggcacttctcttcccatatatccattggatttttttttttttttcctaaacaaagtttttacactgagcagatgctctgtcatgatggcggttgtgcaattctggtatcctctaaatttgtaagcattcataaaacaggaaaaagtaaactatcattcggaagcacagcccattcctcccattttttgcaatgatgtctggatgttattttaaacagtgtgtctgtgtgttcccaaatccagctggccccaccagctcagattccattttttttgtgtgtgtgtgtgaaacgtagtctgcaactctgcctcccggcaattatacatgtgtcaggatgtcaaaaagcaattctcctgcctcagcctcctgagtagctgggactacaggttcctaccaccacacccggccaatttttgtatttttagtagagatggggtttcaccgtatcggcgaggatgatctctatctcttgacctcgtgatctgcccgcctcggcctcccaaagtgctgggattacaggcgtgtgccactgcgctcggcctcagattccatatttgaacaccagctgattgagagaaggggaatgagaagagctggatgagtttaaataactcattgttcagattcctgaacaggagttgggataatggccatcttttctttcctatcctttcttcccccctcactgtgaaaaataacagtccaccccaagtcatacactggacccagtgcctgcggggacaggactgtgggtttcttggtcacacctgtgttggtgctcaatgcagtgtagacatgttttcaaataaaacaaatgattgtgtacaa

SEQ ID NO: 166870 - DNA, 2801 bp, Homo sapiens
  Payload ID: 12851
  Gene Symbol: PDPN
  Gene Name: podoplanin
  Uniprot ID: Q86YL7
  ENST ID: ENST00000376057
  CDS Start-End: 45-755
accttgcggccgaccccgctcccccgcctcctcgggagagataaatgctgactccgctcggaaagttctcaactgcaaagtttgctgtccggctgcctagggtctgggaagctcgggcaccctccctctccggggctcctgctcccacccctccggcccccccaccgtcgcgctcctccaggctgggcctgtggccgcggtgctttttaattttcccccagctcagaatcttgctgctcggcccccaggagagcaacaactcaacgggaacgatgtggaaggtgtcagctctgctcttcgttttgggaagcgcgtcgctctgggtcctggcagaaggagccagcacaggccagccagaagatgacactgagactacaggtttggaaggcggcgttgccatgccaggtgccgaagatgatgtggtgactccaggaaccagcgaagaccgctataagtctggcttgacaactctggtggcaacaagtgtcaacagtgtaacaggcattcgcatcgaggatctgccaacttcagaaagcacagtccacgcgcaagaacaaagtccaagcgccacagcctcaaacgtggccaccagtcactccacggagaaagtggatggagacacacagacaacagttgagaaagatggtttgtcaacagtgaccctggttggaatcatagttggggtcttactagccatcggcttcattggtgcaatcatcgttgtggttatgcgaaaaatgtcgggaaggccctaaagagctgaagggttacgccctgctgccaacgtgcttaaaaaaagaccgtttctgactctgtgccctgtccctgagctcgtgggagaagatgacccgtggaacacttgcctggcccactcagaatccacggtgacctctccgcttgccaaaataaccgaaggaaagaccgttcaccagacttggctcctctaaacatttgctgttcaaacatgtttttgaatatacattctataaaagattatttgaaagacaaaattcatagaaaatggagcaaaactgtataaactgatttgtaactaacactggaccattggatcgatattatatgctgtaaccatgtgtctccgtctgaccattcttgttattgttaaaatgcagaggaatctggaaatatttatatccacggagtccttggatccagtgctacgtcagtaaatagcaccagcattttgcaattgctgatctgctgaaatgtacacattctggtctagtttggtctatcttttaaagcctgatctggtgtgaataatcaactaggaaatctaaacttggataacacgtggtgaacaactgcctttagctggtccagattaatcatttcaaagacatccattttagatcacaagcaggaagtcgatagtctcaaaggcactttgtttctcccaagtaggccaccaggcagcctctagagttgctttacccaaatccttctccagccatgacttggtgactctaagcttgctcccacctgccccctccacttccctcagatgatgaggagccagggctaagggggcagccttctctcttcccagtgatgcacatccttcacattggctgctttgttctggaatatggatatctcagcctggatgccgaggaagctgctggatgcttaatggtgctagaggctcaagtgtgtttgaaaccaagagccagttgtcccccatgcagaaagaaatcctgtgtgagcctctggtatgagaaataaaatctgccagttttataacattcactttctgcctctgaggaaagatacagggaacaaaaatcaatttgtacagtcttaatattaaaagcagcttgactaaatacctgatttaaaaatagaagacatccccagtcctcatgacataccgcaaatatctgtggggtcctgttgaaaagaacaaaataaaggagcccaaggggtcattctgtctcagcaccatccagcctggcacttctcttcccatatatccattggatttttttttttttttcctaaacaaagtttttacactgagcagatgctctgtcatgatggcggttgtgcaattctggtatcctctaaatttgtaagcattcataaaacaggaaaaagtaaactatcattcggaagcacagcccattcctcccattttttgcaatgatgtctggatgttattttaaacagtgtgtctgtgtgttcccaaatccagctggccccaccagctcagattccattttttttgtgtgtgtgtgtgaaacgtagtctgcaactctgcctcccggcaattatacatgtgtcaggatgtcaaaaagcaattctcctgcctcagcctcctgagtagctgggactacaggttcctaccaccacacccggccaatttttgtatttttagtagagatggggtttcaccgtatcggcgaggatgatctctatctcttgacctcgtgatctgcccgcctcggcctcccaaagtgctgggattacaggcgtgtgccactgcgctcggcctcagattccatatttgaacaccagctgattgagagaaggggaatgagaagagctggatgagtttaaataactcattgttcagattcctgaacaggagttgggataatggccatcttttctttcctatcctttcttcccccctcactgtgaaaaataacagtccaccccaagtcatacactggacccagtgcctgcggggacaggactgtgggtttcttggtcacacctgtgttggtgctcaatgcagtgtagacatgttttcaaataaaacaaatgattgtgtacaa

SEQ ID NO: 166871 - DNA, 1368 bp, Homo sapiens
  Payload ID: 12851
  Gene Symbol: PDPN
  Gene Name: podoplanin
  Uniprot ID: Q86YL7
  ENST ID: ENST00000376061
  CDS Start-End: 135-497
ttagtcggtgccaggtcccaaagacgcagctgcgcgggtgtgccgggaggagccccggaatccacaggctgcgagccagcacaggccagccagaagatgacactgagactacaggtttggaaggcggcgttgccatgccaggtgccgaagatgatgtggtgactccaggaaccagcgaagaccgctataagtctggcttgacaactctggtggcaacaagtgtcaacagtgtaacaggcattcgcatcgaggatctgccaacttcagaaagcacagtccacgcgcaagaacaaagtccaagcgccacagcctcaaacgtggccaccagtcactccacggagaaagtggatggagacacacagacaacagttgagaaagatggtttgtcaacagtgaccctggttggaatcatagttggggtcttactagccatcggcttcattggtgcaatcatcgttgtggttatgcgaaaaatgtcgggaaggtactcgccctaaagagctgaagggttacgccctgctgccaacgtgcttaaaaaaagaccgtttctgactctgtgccctgtccctgagctcgtgggagaagatgacccgtggaacacttgcctggcccactcagaatccacggtgacctctccgcttgccaaaataaccgaaggaaagaccgttcaccagacttggctcctctaaacatttgctgttcaaacatgtttttgaatatacattctataaaagattatttgaaagacaaaattcatagaaaatggagcaaaactgtataaactgatttgtaactaacactggaccattggatcgatattatatgctgtaaccatgtgtctccgtctgaccattcttgttattgttaaaatgcagaggaatctggaaatatttatatccacggagtccttggatccagtgctacgtcagtaaatagcaccagcattttgcaattgctgatctgctgaaatgtacacattctggtctagtttggtctatcttttaaagcctgatctggtgtgaataatcaactaggaaatctaaacttggataacacgtggtgaacaactgcctttagctggtccagattaatcatttcaaagacatccattttagatcacaagcaggaagtcgatagtctcaaaggcactttgtttctcccaagtaggccaccaggcagcctctagagttgctttacccaaatccttctccagccatgacttggtgactctaagcttgctcccacctgccccctccacttccctcagatgatgaggagccagggctaagggggcagccttctctcttcccagtgatgcacatccttcacattggctgctttgttctggaatatggatatctcagcctg

SEQ ID NO: 166872 - DNA, 476 bp, Homo sapiens
  Payload ID: 12851
  Gene Symbol: PDPN
  Gene Name: podoplanin
  ENST ID: ENST00000506205
  CDS Start-End: 1-283
aactgcaaagtttgctgtccggctgcctagggtctgggaagctcgggcaccctccctctccggggctcctgctcccacccctccggcccccccaccgtcgcgctcctccaggctgggcctgtggccgcggtgctttttaattttcccccagctcagaatcttgctgctcggcccccaggagagcaacaactcaacgggaacgatgtggaaggtgtcagctctgctcttcgttttgggaagcgcgtcgctctgggtcctggcagaaggaggggaaggcgtttaacaactcgggggtgaagcctggtggacagcggcagggacatcataaatacagaagataattttaaagaagtgttccggccgggtgcagtggctcacaactgtaatcccaggactttgggaggctgaggcgggcagatcacctgagccagcacaggccagccagaagatgacactgagactacaggtttggaagg

SEQ ID NO: 166873 - DNA, 571 bp, Homo sapiens
  Payload ID: 12851
  Gene Symbol: PDPN
  Gene Name: podoplanin
  ENST ID: ENST00000509009
  CDS Start-End: 45-518
agaaggaggtaagacccagcgcaagtggcttcctgccgtcgctgatggggacgagcgagcagagacttgctggaatgcccgggcctggtattcgagccagcacaggccagccagaagatgacactgagactacaggtttggaaggcggcgttgccatgccaggtgccgaagatgatgtggtgactccaggaaccagcgaagaccgctataagtctggcttgacaactctggtggcaacaagtgtcaacagtgtaacaggcattcgcatcgaggatctgccaacttcagaaagcacagtccacgcgcaagaacaaagtccaagcgccacagcctcaaacgtggccaccagtcactccacggagaaagtggatggagacacacagacaacagttgagaaagatggtttgtcaacagtgaccctggttggaatcatagttggggtcttactagccatcggcttcattggtgcaatcatcgttgtggttatgcgaaaaatgtcgggaaggtactcgccctaaagagctgaagggttacgccctgctgccaacgtgcttaaaaaaagaccgtttct

SEQ ID NO: 166874 - DNA, 1305 bp, Homo sapiens
  Payload ID: 12851
  Gene Symbol: PDPN
  Gene Name: podoplanin
  Uniprot ID: Q86YL7
  ENST ID: ENST00000513143
  CDS Start-End: 290-652
gtcggtgccaggtcccaaagacgcagctgcgcgggtgtgccgggaggagccccggaatccacaggctgcgaggggaaggcgtttaacaactcgggggtgaagcctggtggacagcggcagggacatcataaatacagaagataattttaaagaagtgttccggccgggtgcagtggctcacaactgtaatcccaggactttgggaggctgaggcgggcagatcacctgagccagcacaggccagccagaagatgacactgagactacaggtttggaaggcggcgttgccatgccaggtgccgaagatgatgtggtgactccaggaaccagcgaagaccgctataagtctggcttgacaactctggtggcaacaagtgtcaacagtgtaacaggcattcgcatcgaggatctgccaacttcagaaagcacagtccacgcgcaagaacaaagtccaagcgccacagcctcaaacgtggccaccagtcactccacggagaaagtggatggagacacacagacaacagttgagaaagatggtttgtcaacagtgaccctggttggaatcatagttggggtcttactagccatcggcttcattggtgcaatcatcgttgtggttatgcgaaaaatgtcgggaaggtactcgccctaaagagctgaagggttacgccctgctgccaacgtgcttaaaaaaagaccgtttctgactctgtgccctgtccctgagctcgtgggagaagatgacccgtggaacacttgcctggcccactcagaatccacggtgacctctccgcttgccaaaataaccgaaggaaagaccgttcaccagacttggctcctctaaacatttgctgttcaaacatgtttttgaatatacattctataaaagattatttgaaagacaaaattcatagaaaatggagcaaaactgtataaactgatttgtaactaacactggaccattggatcgatattatatgctgtaaccatgtgtctccgtctgaccattcttgttattgttaaaatgcagaggaatctggaaatatttatatccacggagtccttggatccagtgctacgtcagtaaatagcaccagcattttgcaattgctgatctgctgaaatgtacacattctggtctagtttggtctatcttttaaagcctgatctggtgtgaataatcaactaggaaatctaaacttggataacacgtggtgaacaactgcctttagctggtccagattaatcatttcaaagacatccattttagatcacaagcaggaagtcgatagtctcaaaggcact

SEQ ID NO: 166875 - DNA, 849 bp, Homo sapiens
  Payload ID: 12851
  Gene Symbol: PDPN
  Gene Name: podoplanin
  Uniprot ID: Q86YL7
  ENST ID: ENST00000475043
  CDS Start-End: 157-513
gacaatgtgcaaatgacaccgttttgtgctcaccagggcaaagcaagggagcgccctcacttcagcatctcagccctgctaaagaaaaagctgctggccagcacaggccagccagaagatgacactgagactacaggtttggaaggcggcgttgccatgccaggtgccgaagatgatgtggtgactccaggaaccagcgaagaccgctataagtctggcttgacaactctggtggcaacaagtgtcaacagtgtaacaggcattcgcatcgaggatctgccaacttcagaaagcacagtccacgcgcaagaacaaagtccaagcgccacagcctcaaacgtggccaccagtcactccacggagaaagtggatggagacacacagacaacagttgagaaagatggtttgtcaacagtgaccctggttggaatcatagttggggtcttactagccatcggcttcattggtgcaatcatcgttgtggttatgcgaaaaatgtcgggaaggccctaaagagctgaagggttacgccctgctgccaacgtgcttaaaaaaagaccgtttctgactctgtgccctgtccctgagctcgtgggagaagatgacccgtggaacacttgcctggcccactcagaatccacggtgacctctccgcttgccaaaataaccgaaggaaagaccgttcaccagacttggctcctctaaacatttgctgttcaaacatgtttttgaatatacattctataaaagattatttgaaagacaaaattcatagaaaatggagcaaaactgtataaactgatttgtaactaacactggaccattggatcgatattatatgctgtaacc

SEQ ID NO: 166876 - DNA, 794 bp, Homo sapiens
  Payload ID: 12851
  Gene Symbol: PDPN
  Gene Name: podoplanin
  ENST ID: ENST00000488631
  CDS Start-End: 220-351
gcaaatgacaccgttttgtgctcaccagggcaaagcaagggagcgccctcacttcagcatctcagccctgctaaagaaaaagctgctgggtaacatcctttgtttttgcccagggaagctttagctgtgattcccttcagccggctcctgaatgtcaaagccagcacaggccagccagaagatgacactgagactacaggtttggaaggcggcgttgccatgccaggtgccgaagatgatgtggtgactccaggaaccagcgaagaccgctataagtctggcttgacaactctgagaaagtggatggagacacacagacaacagttgagaaagatggtttgtcaacagtgaccctggttggaatcatagttggggtcttactagccatcggcttcattggtgcaatcatcgttgtggttatgcgaaaaatgtcgggaaggccctaaagagctgaagggttacgccctgctgccaacgtgcttaaaaaaagaccgtttctgactctgtgccctgtccctgagctcgtgggagaagatgacccgtggaacacttgcctggcccactcagaatccacggtgacctctccgcttgccaaaataaccgaaggaaagaccgttcaccagacttggctcctctaaacatttgctgttcaaacatgtttttgaatatacattctataaaagattatttgaaagacaaaattcatagaaaatggagcaaaactgtataaactgatttgtaactaacactggaccattggatcgatattatatgctgtaaccatgtgtctccgt

SEQ ID NO: 166877 - DNA, 786 bp, Homo sapiens
  Payload ID: 12851
  Gene Symbol: PDPN
  Gene Name: podoplanin
  ENST ID: ENST00000510906
  CDS Start-End: 202-687
actgcaaagtttgctgtccggctgcctagggtctgggaagctcgggcaccctccctctccggggctcctgctcccacccctccggcccccccaccgtcgcgctcctccaggctgggcctgtggccgcggtgctttttaattttcccccagctcagaatcttgctgctcggcccccaggagagcaacaactcaacgggaacgatgtggaaggtgtcagctctgctcttcgttttgggaagcgcgtcgctctgggtcctggcagaaggagccagcacaggccagccagaagatgacactgagactacaggtttggaaggcggcgttgccatgccaggtgccgaagatgatgtggtgactccaggaaccagcgaagaccgctataagtctggcttgacaactctggtggcaacaagtgtcaacagtgtaacaggcattcgcatcgaggatctgccaacttcagaaagcacagtccacgcgcaagaacaaagtccaagcgccacagcctcaaacgtggccaccagtcactccacggagaaagtggatggagacacacagacaacagttgagaaagatggtttgtcaacagtgaccctggttggaatcatagttggggtcttactagccatcggcttcattggtgcaatcatcgttgtggttatgcgaaaaatgtcgggaaggtactcgtaagtaaatagcttacacccatgtgataggcaaatgaaagccatcgtgtctagaactcaaatctttgaactaatagaaatctctgatataagctgggtgtgg

SEQ ID NO: 166878 - DNA, 607 bp, Homo sapiens
  Payload ID: 12851
  Gene Symbol: PDPN
  Gene Name: podoplanin
  Uniprot ID: Q86YL7
  ENST ID: ENST00000487038
  CDS Start-End: 239-601
ctttttggcgagacaatgtgcaaatgacaccgttttgtgctcaccagggcaaagcaagggagcgccctcacttcagcatctcagccctgctaaagaaaaagctgctgggtaacatcctttgtttttgcccagggaagctttagctgtgattcccttcagccggctcctgaatgtcaaagccagcacaggccagccagaagatgacactgagactacaggtttggaaggcggcgttgccatgccaggtgccgaagatgatgtggtgactccaggaaccagcgaagaccgctataagtctggcttgacaactctggtggcaacaagtgtcaacagtgtaacaggcattcgcatcgaggatctgccaacttcagaaagcacagtccacgcgcaagaacaaagtccaagcgccacagcctcaaacgtggccaccagtcactccacggagaaagtggatggagacacacagacaacagttgagaaagatggtttgtcaacagtgaccctggttggaatcatagttggggtcttactagccatcggcttcattggtgcaatcatcgttgtggttatgcgaaaaatgtcgggaaggtactcgccctaaagagct

SEQ ID NO: 166879 - DNA, 2738 bp, Homo sapiens
  Payload ID: 12851
  Gene Symbol: PDPN
  Gene Name: podoplanin
  Uniprot ID: Q86YL7
  ENST ID: ENST00000621990
  CDS Start-End: 204-692
caactgcaaagtttgctgtccggctgcctagggtctgggaagctcgggcaccctccctctccggggctcctgctcccacccctccggcccccccaccgtcgcgctcctccaggctgggcctgtggccgcggtgctttttaattttcccccagctcagaatcttgctgctcggcccccaggagagcaacaactcaacgggaacgatgtggaaggtgtcagctctgctcttcgttttgggaagcgcgtcgctctgggtcctggcagaaggagccagcacaggccagccagaagatgacactgagactacaggtttggaaggcggcgttgccatgccaggtgccgaagatgatgtggtgactccaggaaccagcgaagaccgctataagtctggcttgacaactctggtggcaacaagtgtcaacagtgtaacaggcattcgcatcgaggatctgccaacttcagaaagcacagtccacgcgcaagaacaaagtccaagcgccacagcctcaaacgtggccaccagtcactccacggagaaagtggatggagacacacagacaacagttgagaaagatggtttgtcaacagtgaccctggttggaatcatagttggggtcttactagccatcggcttcattggtgcaatcatcgttgtggttatgcgaaaaatgtcgggaaggtactcgccctaaagagctgaagggttacgccctgctgccaacgtgcttaaaaaaagaccgtttctgactctgtgccctgtccctgagctcgtgggagaagatgacccgtggaacacttgcctggcccactcagaatccacggtgacctctccgcttgccaaaataaccgaaggaaagaccgttcaccagacttggctcctctaaacatttgctgttcaaacatgtttttgaatatacattctataaaagattatttgaaagacaaaattcatagaaaatggagcaaaactgtataaactgatttgtaactaacactggaccattggatcgatattatatgctgtaaccatgtgtctccgtctgaccattcttgttattgttaaaatgcagaggaatctggaaatatttatatccacggagtccttggatccagtgctacgtcagtaaatagcaccagcattttgcaattgctgatctgctgaaatgtacacattctggtctagtttggtctatcttttaaagcctgatctggtgtgaataatcaactaggaaatctaaacttggataacacgtggtgaacaactgcctttagctggtccagattaatcatttcaaagacatccattttagatcacaagcaggaagtcgatagtctcaaaggcactttgtttctcccaagtaggccaccaggcagcctctagagttgctttacccaaatccttctccagccatgacttggtgactctaagcttgctcccacctgccccctccacttccctcagatgatgaggagccagggctaagggggcagccttctctcttcccagtgatgcacatccttcacattggctgctttgttctggaatatggatatctcagcctggatgccgaggaagctgctggatgcttaatggtgctagaggctcaagtgtgtttgaaaccaagagccagttgtcccccatgcagaaagaaatcctgtgtgagcctctggtatgagaaataaaatctgccagttttataacattcactttctgcctctgaggaaagatacagggaacaaaaatcaatttgtacagtcttaatattaaaagcagcttgactaaatacctgatttaaaaatagaagacatccccagtcctcatgacataccgcaaatatctgtggggtcctgttgaaaagaacaaaataaaggagcccaaggggtcattctgtctcagcaccatccagcctggcacttctcttcccatatatccattggatttttttttttttttcctaaacaaagtttttacactgagcagatgctctgtcatgatggcggttgtgcaattctggtatcctctaaatttgtaagcattcataaaacaggaaaaagtaaactatcattcggaagcacagcccattcctcccattttttgcaatgatgtctggatgttattttaaacagtgtgtctgtgtgttcccaaatccagctggccccaccagctcagattccattttttttgtgtgtgtgtgtgaaacgtagtctgcaactctgcctcccggcaattatacatgtgtcaggatgtcaaaaagcaattctcctgcctcagcctcctgagtagctgggactacaggttcctaccaccacacccggccaatttttgtatttttagtagagatggggtttcaccgtatcggcgaggatgatctctatctcttgacctcgtgatctgcccgcctcggcctcccaaagtgctgggattacaggcgtgtgccactgcgctcggcctcagattccatatttgaacaccagctgattgagagaaggggaatgagaagagctggatgagtttaaataactcattgttcagattcctgaacaggagttgggataatggccatcttttctttcctatcctttcttcccccctcactgtgaaaaataacagtccaccccaagtcatacactggacccagtgcctgcggggacaggactgtgggtttcttggtcacacctgtgttggtgctcaatgcagtgtagacatgttttcaaataaaacaaatgattgtgtacaa

SEQ ID NO: 166880 - DNA, 2808 bp, Homo sapiens
  Payload ID: 12851
  Gene Symbol: PDPN
  Gene Name: podoplanin
  Uniprot ID: Q86YL7
  ENST ID: ENST00000617617
  CDS Start-End: 50-766
agaccaccttgcggccgaccccgctcccccgcctcctcgggagagataaatgctgactccgctcggaaagttctcaactgcaaagtttgctgtccggctgcctagggtctgggaagctcgggcaccctccctctccggggctcctgctcccacccctccggcccccccaccgtcgcgctcctccaggctgggcctgtggccgcggtgctttttaattttcccccagctcagaatcttgctgctcggcccccaggagagcaacaactcaacgggaacgatgtggaaggtgtcagctctgctcttcgttttgggaagcgcgtcgctctgggtcctggcagaaggagccagcacaggccagccagaagatgacactgagactacaggtttggaaggcggcgttgccatgccaggtgccgaagatgatgtggtgactccaggaaccagcgaagaccgctataagtctggcttgacaactctggtggcaacaagtgtcaacagtgtaacaggcattcgcatcgaggatctgccaacttcagaaagcacagtccacgcgcaagaacaaagtccaagcgccacagcctcaaacgtggccaccagtcactccacggagaaagtggatggagacacacagacaacagttgagaaagatggtttgtcaacagtgaccctggttggaatcatagttggggtcttactagccatcggcttcattggtgcaatcatcgttgtggttatgcgaaaaatgtcgggaaggtactcgccctaaagagctgaagggttacgccctgctgccaacgtgcttaaaaaaagaccgtttctgactctgtgccctgtccctgagctcgtgggagaagatgacccgtggaacacttgcctggcccactcagaatccacggtgacctctccgcttgccaaaataaccgaaggaaagaccgttcaccagacttggctcctctaaacatttgctgttcaaacatgtttttgaatatacattctataaaagattatttgaaagacaaaattcatagaaaatggagcaaaactgtataaactgatttgtaactaacactggaccattggatcgatattatatgctgtaaccatgtgtctccgtctgaccattcttgttattgttaaaatgcagaggaatctggaaatatttatatccacggagtccttggatccagtgctacgtcagtaaatagcaccagcattttgcaattgctgatctgctgaaatgtacacattctggtctagtttggtctatcttttaaagcctgatctggtgtgaataatcaactaggaaatctaaacttggataacacgtggtgaacaactgcctttagctggtccagattaatcatttcaaagacatccattttagatcacaagcaggaagtcgatagtctcaaaggcactttgtttctcccaagtaggccaccaggcagcctctagagttgctttacccaaatccttctccagccatgacttggtgactctaagcttgctcccacctgccccctccacttccctcagatgatgaggagccagggctaagggggcagccttctctcttcccagtgatgcacatccttcacattggctgctttgttctggaatatggatatctcagcctggatgccgaggaagctgctggatgcttaatggtgctagaggctcaagtgtgtttgaaaccaagagccagttgtcccccatgcagaaagaaatcctgtgtgagcctctggtatgagaaataaaatctgccagttttataacattcactttctgcctctgaggaaagatacagggaacaaaaatcaatttgtacagtcttaatattaaaagcagcttgactaaatacctgatttaaaaatagaagacatccccagtcctcatgacataccgcaaatatctgtggggtcctgttgaaaagaacaaaataaaggagcccaaggggtcattctgtctcagcaccatccagcctggcacttctcttcccatatatccattggatttttttttttttttcctaaacaaagtttttacactgagcagatgctctgtcatgatggcggttgtgcaattctggtatcctctaaatttgtaagcattcataaaacaggaaaaagtaaactatcattcggaagcacagcccattcctcccattttttgcaatgatgtctggatgttattttaaacagtgtgtctgtgtgttcccaaatccagctggccccaccagctcagattccattttttttgtgtgtgtgtgtgaaacgtagtctgcaactctgcctcccggcaattatacatgtgtcaggatgtcaaaaagcaattctcctgcctcagcctcctgagtagctgggactacaggttcctaccaccacacccggccaatttttgtatttttagtagagatggggtttcaccgtatcggcgaggatgatctctatctcttgacctcgtgatctgcccgcctcggcctcccaaagtgctgggattacaggcgtgtgccactgcgctcggcctcagattccatatttgaacaccagctgattgagagaaggggaatgagaagagctggatgagtttaaataactcattgttcagattcctgaacaggagttgggataatggccatcttttctttcctatcctttcttcccccctcactgtgaaaaataacagtccaccccaagtcatacactggacccagtgcctgcggggacaggactgtgggtttcttggtcacacctgtgttggtgctcaatgcagtgtagacatgttttcaaataaaacaaatgattgtgt

SEQ ID NO: 166881 - DNA, 6254 bp, Homo sapiens
  Payload ID: 12852
  Gene Symbol: POGK
  Gene Name: pogo transposable element with KRAB domain
  Uniprot ID: Q9P215
  ENST ID: ENST00000367875
  CDS Start-End: 361-2190
ggaaatatcgaaggaaccgactttgaactccagagggatcttttctttggaggttccccgatgcagccctcaagatgcatccgcactccacacctaggaattgcccgcgcccatagagggcaggagtgcggccctttgtactggccaagagtcagcgaatagagaatttgcagcccagaggcaatgggttatttccctgtcggggtgggccccagccgatttctgcacctttttgggtatccaggcataaccctcactatgtttcactgactcctgcgtttgcaaagtcccttaaggtagaatgaccctattttctgaaccagctcgtggacagaacctttgaatttggaaaatccagagatggagtccacagcctaccctctcaatttgagcctgaaagaagaggaagaggaagaagagattcagagccgggaactagaggacggcccggcagacatgcagaaagtacgaatctgctctgagggcggatgggtaccggccctatttgatgaggtggccatatatttttccgatgaggaatgggaagttttgacggagcaacaaaaggccctctaccgggaagtcatgaggatgaattatgaaactgtcctgtccctggaattcccattccctaagccagacatgatcacccgtttggaaggggaggaggagtctcagaattctgacgagtggcagctccaaggaggcacctctgcagaaaatgaagaatctgacgtaaagcctccagactggccaaacccaatgaatgctacctcccagtttcctcagcctcagcactttgacagctttggcctccgtctgcctcgggatatcacagagctgcccgagtggagtgaggggtaccccttctacatggccatgggcttcccagggtatgacctctcggctgatgacatagctgggaagtttcagttcagccggggcatgcgccgcagttacgacgcagggttcaagctgatggtagtggaatatgctgagagtaccaacaactgccaggctgccaagcagtttggagtattggaaaaaaacgttcgagactggcgcaaagtgaagccacagcttcaaaacgcccacgccatgcggcgggcattccgaggccccaagaatgggaggtttgctctggtggaccagcgtgtggccgaatatgtcagatacatgcaggccaaaggggaccccatcacccgggaggcgatgcagctgaaagctctcgaaatcgcccaggaaatgaacattccagagaaagggttcaaggcaagcttgggttggtgtcgaagaatgatgagaaggtatgacctgtctctgaggcataaagtgcccgtgccccagcacctgccggaagacctgactgagaaactcgtcacttaccagcgcagtgtcctggctctgcgcagggcgcatgactatgaggtagctcagatggggaatgcagatgagacgcccatttgtttagaggtgccatcacgggtaactgttgataaccagggcgaaaagcctgtcttggtcaagacaccaggcagggaaaaactgaaaatcacagcaatgcttggtgtcttggctgatgggaggaagttaccaccgtacatcattttgaggggaacatatatccccccggggaagtttcccagtgggatggaaattcgctgccaccggtatgggtggatgactgaagacttgatgcaggactggttggaagtggtgtggagacggaggacaggagcagtgcccaagcagcgagggatgctgatcttgaatggcttccggggccatgccacagattccgtgaagaactccatggaaagcatgaacactgacatggtgatcatcccagggggtctgacctcacagcttcaggtgctggatgtcgtggtctacaagccactgaatgacagtgtgcgggcccagtactccaactggcttctggctgggaacctggcgctgagcccaaccgggaatgctaagaagccacccctgggcctctttctggagtgggtcatggtcgcgtggaatagcatctcaagtgagtccatcgtccaagggttcaagaagtgccatatctccagcaacttggaggaggaagacgatgtcctgtgggaaatcgagagtgagttgccaggaggaggagaaccaccaaaagattgtgacaccgaaagcatggctgagagcaactgaagggaaagggaaaggtaaccactcaggagtagatactcagtgcctttgctgacatgtctgtgttctacaaacaccttctctccattatttttctgtttttaagttcccttagagcctacagtgcagtagtgtagatcaggggtccccaacccccaggtcacggaccatactggtccatggcctgtcaggaactgggctgcacagcaggaggtgagcggcaggtgagcaagcattaccacctgagctccgcccgctgtcacagcagcggcattagattctcataggagcacaaaccctgttgtgaactgcacatgtgagggatctaggttgcaggctcctcaatgcctgaggatctgaggcggaacagtttcatcccaaagccatcctaccacccactaccccgcacttcctgggtccctgcaaaaattgtcttccatgaaaccagtccctggtgccagaaaagttggggactgctggtatagataacagaccattagcattttctcctttatatgaaacatttattatttgatttatttgtgtctattttgctctgtggcttggacccagaaacacttgtataataggtgaaatgaacaaagaatgagctgccagaacatctgagagctgtaaagttaaaattatttggacccaaagaagcatagtctgacgttgttcagttcacacaaaattttgtctgaaaagccaacttttttctttcccttttaaattatgctgaacatttagggccagtatgtgtaactgacatgctgggacagttgtactcacttttgctggcctgtaggactgtgacatagggagaacactaagtgtgtcctccgggcctcgggtctcagtcctggagctatctacagtatgttaccagcgagtaagaataatagcttctacttgcttttccctacagagttcaggagttttaaaacgtcatcttagtctcattatgaccttcacatgggctatgacaataatttcctgtagtcagcagatgtctgaaggaagatattttttaactgaatctttacaccaaaaaaagaaaataaaacggtgcgtatctaggactctagtgagggctgaggacaataggcctggaattttctgggttgagtacacaagaagaacagctttcaaaggaaagtaggaatggaggcctaactgagacaacactagtgaaatgaccccacccacctacacctccagagaggaggaggatgagcatgtacagcaggggggacacccacaaagaacaaacaattcatttacctgttcgttctcatctccctaattataaattaaattgatcctccagacagtgttttatatgaaggaagaagccaccttttttacagaggacctgaaaccgtcaaccatcttcacacattctttttctttcttttaaagtataattaggtatttccatcttccttgcttttttctccaaatgaaatgctaatgggagccttattttacccacttcagctatataagtccatctgtgtttcaaagagtgacttatgtctcctgccttgcttccaaattaaattgtactcatattgctgaatcccattgtaattctgggatccctggaattacaatggagcaagaagttcttactattacattcaaaatcaccaaaattgcttttttttcccccttgggtcctccttgctttgagaaaccccatgaatccagcctcccttttctgctgacccttatattgcctgcattggatatcaaactgaattacattgagtttccatcttttcttcatttaccttttgcttttccctctccttgttagataacatttttgtgcacttttaatttcctaagctccttaccacctcagggacatgattaaaaacttccagaagaggaaaggagaaaaagctatgctaagttgcatttatgaatgttggcctgtaatattggtcatgagcttttgctcttctagtctgccacaattctctctgcagctcctgaggaagtgatgggagtagacagattcacagtgaacaagagatttgggagaccaagtgggcataaaactacgtcttggcctctatttggaaatctgaatgatggaattattatgtttgttaaaagttataccaaaaagccaagggttaattcatttaggttctctctgttttccagcaaatggaactctgatttaaacagctggggatgaaattcctcaagatgattattcctgaaagtgtggatgcgctggatgcgcagggaacatcaggaaaaggccacggggctctgaacagccccggtccagacagcagcctgtacatccatcccaggacacagcccagcccctccccacaccatacaaggtatcagaaaagtctaggacctatcatttcatcagagacatgatcagaaaagaaactgcttctgccccatttcttgttttggagattactccatctgtccatcaaaagaaacctgtaaatatgaaagaacaaaggttatttcctggagaaaagacaatttattcaacaccaacgagggactcatcatatgggcacaactctggtgtccttctatggagaaaacctcaagtaaagttttattctgcctttgaaaatgcttccaaaagtagaccctgtccccacacaggtcaagactacagagaaggctttgtagaaatgtgtcacctatgtacacctgctacttacacatttcctcttttggaaaaatgagatacttagaataacaagaaaattaagacatactggcctggtgccagcagatggcttttctatagacaaactaggttagtgtggaagatataggttaaaataaactatgctgttttatttatcttcccaacctgattggcagctagacttttttagggtctcatttaatggccctgtttttttcattattatatttaatgatagggcaggatttcgtatgcaagctcttgtttctcaggctgcctgcagaagaagtcgctataaattatctgttgtctacatggtacaaggcccattgactcatctgatgcttgttttgttaatttctttaatatttttatcacggggcagtgggagggcttgggcttttagccacagctgttttaagacttctgatctcctgccctgcaggaataggtgggaagtcattgaatttttacactatagtaatttgcattcccacataagtttgagtgttacgaaaacattcctttaaagggatctgtgctacacaaaatatgccaggacctcacagacaaagccattgctagaaatgtcattccaatgatcagatctggaaacaggctgccataaccacttttccttcttgtagactcagctcacctgtatatttaaactgttcttggcatcttgaaacacctatttctactcaggtactcattgtcctgttactgattcacctttctgatccttttcaaccagttttcccccaaggggggaaattttacttaacctctagtatttgaacaactcaatatttgaattgttgccccatttgcttttacctgtactgtattcttggtcatctcaaatggcgtctaaacccagctactttgcattccagaagtttccattccctccaattccacctaatttttcatctgtcctagttactggctctttcttcatgtcttatttctcttgctttgggagcttaaaagattttacaagacctaattttgggttccttccttggagccatagttaccctgccaagaagagtagaaaatgggttcaactcctgtttcgctccaccaacacctctgtgagtctcatcatcagctgagcgatgatgccttacaggttgcatagcactggaactttcctagagtaacggctctgctgccagggtttctctgggctcattcttccactgacttaattatgatctatgcctaacagagccccagtacaactattttgcagaatggctgttaccctagaattactatagcacatattgagatatagttgtactccctagtagataggaactgaccccaacaataaactttgataataaagacaata

SEQ ID NO: 166882 - DNA, 5754 bp, Homo sapiens
  Payload ID: 12852
  Gene Symbol: POGK
  Gene Name: pogo transposable element with KRAB domain
  Uniprot ID: Q9P215
  ENST ID: ENST00000367876
  CDS Start-End: 151-1980
accctccctcctcccaccacgtgtcctccccgctccctcccgaggggccgcgcgcacgggaggacggagaggcggaaaggatggcgctgtgacagccgggccggagccctcgcgtccccaccccgcgccctggccgctgggcccggcgagatggagtccacagcctaccctctcaatttgagcctgaaagaagaggaagaggaagaagagattcagagccgggaactagaggacggcccggcagacatgcagaaagtacgaatctgctctgagggcggatgggtaccggccctatttgatgaggtggccatatatttttccgatgaggaatgggaagttttgacggagcaacaaaaggccctctaccgggaagtcatgaggatgaattatgaaactgtcctgtccctggaattcccattccctaagccagacatgatcacccgtttggaaggggaggaggagtctcagaattctgacgagtggcagctccaaggaggcacctctgcagaaaatgaagaatctgacgtaaagcctccagactggccaaacccaatgaatgctacctcccagtttcctcagcctcagcactttgacagctttggcctccgtctgcctcgggatatcacagagctgcccgagtggagtgaggggtaccccttctacatggccatgggcttcccagggtatgacctctcggctgatgacatagctgggaagtttcagttcagccggggcatgcgccgcagttacgacgcagggttcaagctgatggtagtggaatatgctgagagtaccaacaactgccaggctgccaagcagtttggagtattggaaaaaaacgttcgagactggcgcaaagtgaagccacagcttcaaaacgcccacgccatgcggcgggcattccgaggccccaagaatgggaggtttgctctggtggaccagcgtgtggccgaatatgtcagatacatgcaggccaaaggggaccccatcacccgggaggcgatgcagctgaaagctctcgaaatcgcccaggaaatgaacattccagagaaagggttcaaggcaagcttgggttggtgtcgaagaatgatgagaaggtatgacctgtctctgaggcataaagtgcccgtgccccagcacctgccggaagacctgactgagaaactcgtcacttaccagcgcagtgtcctggctctgcgcagggcgcatgactatgaggtagctcagatggggaatgcagatgagacgcccatttgtttagaggtgccatcacgggtaactgttgataaccagggcgaaaagcctgtcttggtcaagacaccaggcagggaaaaactgaaaatcacagcaatgcttggtgtcttggctgatgggaggaagttaccaccgtacatcattttgaggggaacatatatccccccggggaagtttcccagtgggatggaaattcgctgccaccggtatgggtggatgactgaagacttgatgcaggactggttggaagtggtgtggagacggaggacaggagcagtgcccaagcagcgagggatgctgatcttgaatggcttccggggccatgccacagattccgtgaagaactccatggaaagcatgaacactgacatggtgatcatcccagggggtctgacctcacagcttcaggtgctggatgtcgtggtctacaagccactgaatgacagtgtgcgggcccagtactccaactggcttctggctgggaacctggcgctgagcccaaccgggaatgctaagaagccacccctgggcctctttctggagtgggtcatggtcgcgtggaatagcatctcaagtgagtccatcgtccaagggttcaagaagtgccatatctccagcaacttggaggaggaagacgatgtcctgtgggaaatcgagagtgagttgccaggaggaggagaaccaccaaaagattgtgacaccgaaagcatggctgagagcaactgaagggaaagggaaagcaaatggaactctgatttaaacagctggggatgaaattcctcaagatgattattcctgaaagtgtggatgcgctggatgcgcagggaacatcaggaaaaggccacggggctctgaacagccccggtccagacagcagcctgtacatccatcccaggacacagcccagcccctccccacaccatacaaggtatcagaaaagtctaggacctatcatttcatcagagacatgatcagaaaagaaactgcttctgccccatttcttgttttggagattactccatctgtccatcaaaagaaacctgtaaatatgaaagaacaaaggttatttcctggagaaaagacaatttattcaacaccaacgagggactcatcatatgggcacaactctggtgtccttctatggagaaaacctcaagtaaagttttattctgcctttgaaaatgcttccaaaagtagaccctgtccccacacaggtcaagactacagagaaggctttgtagaaatgtgtcacctatgtacacctgctacttacacatttcctcttttggaaaaatgagatacttagaataacaagaaaattaagacatactggcctggtgccagcagatggcttttctatagacaaactaggttagtgtggaagatataggttaaaataaactatgctgttttatttatcttcccaacctgattggcagctagacttttttagggtctcatttaatggccctgtttttttcattattatatttaatgatagggcaggatttcgtatgcaagctcttgtttctcaggctgcctgcagaagaagtcgctataaattatctgttgtctacatggtacaaggcccattgactcatctgatgcttgttttgttaatttctttaatatttttatcacggggcagtgggagggcttgggcttttagccacagctgttttaagacttctgatctcctgccctgcaggaataggtgggaagtcattgaatttttacactatagtaatttgcattcccacataagtttgagtgttacgaaaacattcctttaaagggatctgtgctacacaaaatatgccaggacctcacagacaaagccattgctagaaatgtcattccaatgatcagatctggaaacaggctgccataaccacttttccttcttgtagactcagctcacctgtatatttaaactgttcttggcatcttgaaacacctatttctactcaggtactcattgtcctgttactgattcacctttctgatccttttcaaccagttttcccccaaggggggaaattttacttaacctctagtatttgaacaactcaatatttgaattgttgccccatttgcttttacctgtactgtattcttggtcatctcaaatggcgtctaaacccagctactttgcattccagaagtttccattccctccaattccacctaatttttcatctgtcctagttactggctctttcttcatgtcttatttctcttgctttgggagcttaaaagattttacaagacctaattttgggttccttccttggagccatagttaccctgccaagaagagtagaaaatgggttcaactcctgtttcgctccaccaacacctctgtgagtctcatcatcagctgagcgatgatgccttacaggttgcatagcactggaactttcctagagtaacggctctgctgccagggtttctctgggctcattcttccactgacttaattatgatctatgcctaacagagccccagtacaactattttgcagaatggctgttaccctagaattactatagcacatattgagatatagttgtactccctagtagataggaactgaccccaacaataaactttgataataaagacaataggctatggtgattttatttctttacctattagcattgtgaaaagttacattcaaggtattggctacaccttattctccatccggtttggtaccaatatattacatctttcagtcaaaaagtgttcatgagatgcagtgtaagtaatattggtatctgtgaagacacagggaagaacgtgtgcagtggggcaagtttgacataaatagcttttttcctcagtcatgttttgtatgctctcagcagtggtacattaccaaaatcacatgaaagaaatcccataaagggatctgaattttaaatgaaagtatgatgaacccgcaagtcttaattatgcacttttaataaaattagtcctgacaatttacagtgcccataaagtagtagttgattctccaggaataatctggcagtgttatttttccttttcaacccatcagcattaaatgctgagccactctccaagtctgacccctagactaagcttccttactcttactcttcctcccagaggcattttggaatgagtcaaaggcatggtaggacacggcatttacctgtggtcatcacttcaggcaatggaaaggaaaagtgtttgtccttggttgatcagagaagtgggtgataagaacgtgctaaataacaaacctgcacacttgtacctctgaacctaaaatgttttttttttaattcagaacaacaaaagaacatgctaagcgagtcctcccacctgcctggtaaaatacagccagctttatcacacctggttttgcacagtgataaattcctgcaggaaaaaataagttttattctaagtctgaaattatatggtttccaacagctttttccctcgttaaaataattatttttctacatgatgcttgataataagcatttgtttcttaacctaattagagaagcgattgcactcgagtccccacagctggcagtggtgttacagatggaaccagcctttggtggacagagttcagatgtttcaggggctcttgtgaaaatgctaagtattactgtttctaccttactgccctgcactttaccccatcatctcccctccttagaaaatgatttcataggaaaattggcatggagagcagatagtagagtgtagacctgaaatacatgaggcaaaggcagtcttccagcattctatggtcccaccaggtgggtaggtgactaggaattcaggccaggtcctagagagtagtgagaagttttccagtttgcagtttcctctgtgctgtatgtacagccatacagcctatggaacctgacattgcagtgggcagcaggacacggtcaaggctcctagctgcctctccatctatggaactatgaaatttcacacatattccctaggcagcattaaggcccaggtatattgagtagtccaaaccaaaaaactatattcgagtatcagtttaaattcttccaagccctaaaaattcttacgtagtttctcacctaaaactaatggcttgtgccaagaactgaaactaagctattgatttttttttaagaagtcttaatctatacataagaaattacatacctggccaggtgcagtagttcaggcctgtaatcctaacaaacactctgggaggccaaggtgggcagactgcttgagctcaggagttcattaccagtctgggcaacatgataaaaccgtgtctttacaaaaaaaaaaaattttaaattagccgggcatggtggtgtgaatctgtagtcccagctacttaggaggttgcgatgggagaatcacctgagcccagaggtccagtctgcagtgagccatgatcacaccacagcactccagctggggtgacagagtgagaccctatctcaaaaagaaaag

SEQ ID NO: 166883 - DNA, 954 bp, Homo sapiens
  Payload ID: 12852
  Gene Symbol: POGK
  Gene Name: pogo transposable element with KRAB domain
  ENST ID: ENST00000449930
  CDS Start-End: 326-954
tccgggccggaccctccctcctcccaccacgtgtcctccccgctccctcccgaggggccgcgcgcacgggaggacggagaggcggaaaggatggcgctgtgacagccgggccggagccctcgcgtccccaccccgcgccctggccgctgggcccggcggtgagtgcgcgcgggcgggggcggcggcggcgcggcccctcccccgggtcccgggcggctgggccgcggcagaggcgggggcgccgaggctgcgccgccgccgccgccgcctttgttgcgggcccgccggggaggcgggcggcgccggctctcgccgcccggcagagatggagtccacagcctaccctctcaatttgagcctgaaagaagaggaagaggaagaagagattcagagccgggaactagaggacggcccggcagacatgcagaaagtacgaatctgctctgagggcggatgggtaccggccctatttgatgaggtggccatatatttttccgatgaggaatgggaagttttgacggagcaacaaaaggccctctaccgggaagtcatgaggatgaattatgaaactgtcctgtccctggaattcccattccctaagccagacatgatcacccgtttggaaggggaggaggagtctcagaattctgacgagtggcagctccaaggaggcacctctgcagaaaatgaagaatctgacgtaaagcctccagactggccaaacccaatgaatgctacctcccagtttcctcagcctcagcactttgacagctttggcctccgtctgcctcgggatatcacagagctgcccgagtggagtgaggggtaccccttctacatggccatgggcttcccagggtatgacctctcggctgatgacatagctgggaagtttcagttcagccggggcatgcgccgcagttacgacgcagggttcaagctgatggtagtgga

SEQ ID NO: 166884 - DNA, 6626 bp, Homo sapiens
  Payload ID: 12853
  Gene Symbol: POGZ
  Gene Name: pogo transposable element with ZNF domain
  Uniprot ID: Q7Z3K3
  ENST ID: ENST00000271715
  CDS Start-End: 316-4548
ggggggagtcggcgtctctctcccccgcgccagctcccgtacacggagccgcattccttggcccccccacccccctccctcggggcccccccgcccccctcgggaaaaaaatccaccccgaatcactcgaacccgagggaggcttcctttcacccttggggagacgagctttcaacggttacctcttcttcgtctccccccaagcccccgtcccctccccctgctcccacccccttctggcgccgggtgtaaggtccctttaaggcgacggcgccttcctcgggtcagactaccggcggcgacgaccacaggagcatggcggacaccgacctgttcatggaatgtgaggaggaggagttggagccatggcagaaaatcagtgatgtcattgaggactctgtagttgaagattataattcagtggataaaactaccacagtttctgtgagccagcagccagtctcggctccagtgcccatcgctgcccatgcttctgttgctgggcacctctctacatccaccaccgttagtagcagcggggcacagaacagcgacagtacaaagaagactcttgtcacactaattgccaacaacaatgctggcaatcctttggtccagcaaggtggacagccactcatcctgacccagaatccagccccaggtctgggcacaatggttactcaaccagtattgaggcctgttcaggtcatgcagaatgccaatcatgtgactagttcccctgtggcctcacaaccaatatttatcactacgcagggatttcctgtaaggaatgtccggcctgtacaaaatgcaatgaatcaggttgggattgtgctgaacgtacagcaaggccaaacggttagaccaattacactagttccagccccaggtacccagtttgttaagccgacagttggagttccacaagtgttctcccagatgacccctgtgaggccaggctccacaatgcctgtgaggcccaccaccaacaccttcaccaccgtcatcccggccactcttaccattcgaagcaccgtcccacagtcccagtcccagcagaccaagtccactcccagcacttctaccactcccactgccacacagccaacctcactggggcaactagctgttcagtctccaggccagtcaaaccagaccacgaatcccaagctagctccctccttcccctctccacctgcagtgagcattgccagctttgtcactgtgaagcgacctggtgttacaggcgaaaatagcaatgaagtggccaaattggtgaatacccttaacaccatcccttccctgggccagagtcctgggccagtggtggtgtccaacaacagctctgctcatggctctcaaagaaccagcggacctgagtcttcaatgaaagtgacctcttccatcccagtatttgacctccaggatggtggacggaaaatatgtccacgatgtaatgctcaatttcgtgttactgaagctttgagaggtcacatgtgttactgttgcccagaaatggttgaataccagaagaaaggaaagtccctggattcagaacccagtgtcccatcagcagcaaagcccccatcccctgagaaaacagctcctgttgcttccacaccctcttctacacctattcctgctctgtcaccgcctaccaaagtaccagaaccaaatgagaacgtgggcgatgccgtccagaccaaactcattatgcttgtagatgacttctactatggacgggatggtggcaaagtagcccagctcacaaatttccctaaggtcgccacatctttccgatgcccacattgtaccaaaaggctaaaaaacaatattcgattcatgaaccatatgaaacaccacgtagaactcgatcagcagaacggtgaggtagatggtcacactatctgccagcactgttaccgccagttttccactcccttccagcttcagtgccacttggaaaatgttcatagtccctatgaatctactaccaagtgcaagatctgtgaatgggcgtttgaaagtgagccactatttctccagcatatgaaggatactcataagcctggagagatgccttatgtttgccaggtgtgtcaatatcgctcctcactctactctgaggtagatgtccattttcggatgatccatgaggatacccggcatctgctctgcccttattgcctgaaggtcttcaaaaatggcaatgcattccaacagcattacatgaggcaccagaagagaaatgtttatcactgcaacaaatgccggctgcagtttctctttgccaaggacaaaattgaacacaagcttcaacaccataaaaccttccgtaaacccaagcagctggagggcttgaaaccaggcaccaaggtgacaatccgggcttcccgagggcagccacgaactgttcctgtatcctctaatgatacacctcccagcgccttgcaggaggcagcaccgctgacctcctcaatggaccctctgcctgtcttcctttatccccctgtccagcgcagcatccagaagagagctgttaggaaaatgagtgtcatgggccggcagacatgcctggagtgcagcttcgagatcccagacttccctaatcatttccctacttacgtacactgctctctgtgtcgctatagcacctgctgttctcgagcttatgccaaccacatgatcaacaatcatgttccacggaagagccccaagtatttggctttgtttaaaaattctgtgagtggaatcaagctggcctgcacttcatgtacctttgttacctctgtgggcgatgctatggccaagcatttggtattcaacccctctcacagatccagcagcatcctgccacggggactcacttggatagctcactcaaggcatggccagactcgtgaccgagtgcatgaccggaacgtgaagaatatgtaccctcctccttccttccccactaacaaagctgccactgtgaaatctgcgggggccaccccagctgagcctgaagagctactaactcccttagccccagcactcccatcaccagcctcaactgcaaccccaccaccaacccccactcacccgcaggctttagcccttccaccgctggctacagagggagccgaatgtctgaatgttgatgatcaggatgaagggagcccagtcacccaagaacctgagctagcatcaggtggtggtggtagtggtggagttggcaaaaaggagcagctgtctgtgaagaagcttcgagtagtactgtttgctctatgctgcaatacagaacaggcagctgaacacttccgaaatccccagcgacgtattcgccgttggcttcgacgtttccaggcctcccagggggagaatctagagggcaaatatctgagctttgaggcagaagagaaactggctgagtgggtgctaacccagcgcgaacaacagctacctgtaaatgaggagaccttgttccagaaggccaccaaaataggacgttctttggaaggggggtttaagatctcctatgagtgggctgtgcgtttcatgctgcggcaccacctgactccccatgcccggcgagctgtggcccacaccctacctaaggatgtagcagagaatgcaggactcttcattgattttgtacaacggcagattcacaaccaggacttacccttgtctatgattgtggctattgatgagatctctttgttcctggatacagaggtgctgagcagtgatgatcgaaaggagaatgccctgcagacagtgggcacaggggaaccttggtgtgatgtagtcctagccattctggcagatggcactgtccttcccaccctggttttctacagagggcagatggatcagcctgctaacatgccagactccatattgctagaggcaaaggagagtggctacagtgatgacgagatcatggagctgtggtcaactcgagtgtggcagaagcacacagcttgccagcgcagcaaaggcatgcttgtgatggactgtcatcgcactcacttgtcagaagaggtactggctatgcttagtgcctctagcactttgcctgcagtggtcccagcaggctgtagctccaaaattcagccattagatgtatgcatcaaaagaactgtcaagaacttcctgcataaaaaatggaaggaacaggctcgggaaatggcagatactgcatgtgattctgatgtcctgcttcagctggtgcttgtctggctgggtgaagtgctaggtgtcattggggactgtccagagctagttcagcgctccttcctggtggctagtgttctgcctggccccgatggcaacattaactcacctacaagaaatgctgacatgcaggaggagctaattgcctccctagaggagcaactgaagctgagtggggaacattctgagtcttccactccacgacccagatcatctcctgaagagacaattgagcctgaaagtcttcaccagctctttgagggtgaaagtgagaccgagtctttctatggctttgaagaagctgacctagatctgatggagatttgagtgttggggtcatgagggggtgtggagtgagggtgggaacatgtgagggagggtaaaggggcttagggaaaagggggcataccaggtggggtatttggtttctattttttaattttataccaccactcccccctgaagttgacttacacttccctgtggatttgtggattaattaggaaaaccaatagtaatcacgtctgagccaaggagctggcccattggtcattcacttctgctaaaaacaggtttttgtgactttttttttttttaaatttaaatcactgtgtttggtatttttctgacaaaattaagaaaaagaaaaaaaattatttgtgggcaaatgttaaatttttttgtttccccttttacctcaattgtatcatagtactgggtttttttgtttgttttattgtgtggccaatgtctttgggcatgatgctatctaatcattgttaatgtgagaacatttctgaagatgggaaagacaaattatgtagctcacaaactggtttattatatatatggataaaaaacttttttcattgtggtcttaacacttttatataaaaatgaaaatggaaaaaaagtcccactgaactctctcttccttctccttttctttccttccctctccagagatgttggtttctacagcaaccctagatataaaattgtggctttaaaaatgcatgaaaccacctttaattatccagaatgaatagatttgtcttttcctcaccaccttccctccaaaacatgacataaacaatattttttgcacttgtgatccttggcccctttccccattctcaacaccatccatccctctggacaaaggatcatacaggtgttattagcaagcaagagatactgaagcgatcaaacagttttagggtggaagccattcccagtttgagtcttcatcctgtaagcccccaggggcagtccctgctttactgaacttcatcctgttagatggagagcatgcctgtttaagggattactggtcctacagccaggagctaattgttcaagaagtgttgaactttaaaaagacaagaccacttgttgaaatccagcgtgctctgtggctttcccctatttctcttaatacttagggaagaatctgacaggaagaagcgcacaggggtgtgcacaaagaaaatgacatgaatctttatttttcactgccagcttcaaggaaagaaaattttttctacaatttgcatgagggatttttttaattgtatgtactcatggttgtaaaccaaaacgtactgtaccgtacagagaaaaggagcaaaaaaccaagtcttctgtttatcctgaggctttccacaatgttcccctcctgtgagccaaggaggcaaactgcacaagcttgtaaatggttcgtctttaaaatgtacataagtggaacatttaataaaatgaggggaaatggatttataaacttgttttttttctaggtgaccctgtttaataggctttcacagactggggaatgctcaagatgtgatgggcctggtggtacaggtgtgacatttgttaccacccatttctcccaccccaccctgcttttttgtttgtttgttttttcatcccccagcacactataatatagtgaactggaaaagtcccttccagaaacagcttggccagctttgtgaacctttgacatctgaaaacaaccaaggatccatctgggcttctcttccccagctttttgcctgatgccattttattgacagacaatggactttgaagtcagcctttgcctttgagaaagttcaagaactatggttggtcacgtctatctacaacctaatcctactctttggtagtctctgcagcagccacagccttagcagagctggggttcctgtcttctgcacacgattgactttcttgatgggtaattttttttaagattataccaacagtggatcagctgggttttggccaggaagttgtctttgtggactctgcctgcatggcttagtagtagaaggaaatttttttttggttttgttttttataattcagtttaatcaataaacatgtatttattgactgtt

SEQ ID NO: 166885 - DNA, 6054 bp, Homo sapiens
  Payload ID: 12853
  Gene Symbol: POGZ
  Gene Name: pogo transposable element with ZNF domain
  Uniprot ID: Q7Z3K3
  ENST ID: ENST00000368863
  CDS Start-End: 30-3977
agactaccggcggcgacgaccacaggagcatggcggacaccgacctgttcatggaatgtgaggaggaggagttggagccatggcagaaaatcagtgatgtcattgaggactctgtagttgaagattataattcagtggataaaactaccacagtttctgtgagccagcagccagtctcggctccagtgcccatcgctgcccatgcttctgttgctgggcacctctctacatccaccaccgttagtagcagcggggcacagaacagcgacagtacaaagaagactcttgtcacactaattgccaacaacaatgccccaggtacccagtttgttaagccgacagttggagttccacaagtgttctcccagatgacccctgtgaggccaggctccacaatgcctgtgaggcccaccaccaacaccttcaccaccgtcatcccggccactcttaccattcgaagcaccgtcccacagtcccagtcccagcagaccaagtccactcccagcacttctaccactcccactgccacacagccaacctcactggggcaactagctgttcagtctccaggccagtcaaaccagaccacgaatcccaagctagctccctccttcccctctccacctgcagtgagcattgccagctttgtcactgtgaagcgacctggtgttacaggcgaaaatagcaatgaagtggccaaattggtgaatacccttaacaccatcccttccctgggccagagtcctgggccagtggtggtgtccaacaacagctctgctcatggctctcaaagaaccagcggacctgagtcttcaatgaaagtgacctcttccatcccagtatttgacctccaggatggtggacggaaaatatgtccacgatgtaatgctcaatttcgtgttactgaagctttgagaggtcacatgtgttactgttgcccagaaatggttgaataccagaagaaaggaaagtccctggattcagaacccagtgtcccatcagcagcaaagcccccatcccctgagaaaacagctcctgttgcttccacaccctcttctacacctattcctgctctgtcaccgcctaccaaagtaccagaaccaaatgagaacgtgggcgatgccgtccagaccaaactcattatgcttgtagatgacttctactatggacgggatggtggcaaagtagcccagctcacaaatttccctaaggtcgccacatctttccgatgcccacattgtaccaaaaggctaaaaaacaatattcgattcatgaaccatatgaaacaccacgtagaactcgatcagcagaacggtgaggtagatggtcacactatctgccagcactgttaccgccagttttccactcccttccagcttcagtgccacttggaaaatgttcatagtccctatgaatctactaccaagtgcaagatctgtgaatgggcgtttgaaagtgagccactatttctccagcatatgaaggatactcataagcctggagagatgccttatgtttgccaggtgtgtcaatatcgctcctcactctactctgaggtagatgtccattttcggatgatccatgaggatacccggcatctgctctgcccttattgcctgaaggtcttcaaaaatggcaatgcattccaacagcattacatgaggcaccagaagagaaatgtttatcactgcaacaaatgccggctgcagtttctctttgccaaggacaaaattgaacacaagcttcaacaccataaaaccttccgtaaacccaagcagctggagggcttgaaaccaggcaccaaggtgacaatccgggcttcccgagggcagccacgaactgttcctgtatcctctaatgatacacctcccagcgccttgcaggaggcagcaccgctgacctcctcaatggaccctctgcctgtcttcctttatccccctgtccagcgcagcatccagaagagagctgttaggaaaatgagtgtcatgggccggcagacatgcctggagtgcagcttcgagatcccagacttccctaatcatttccctacttacgtacactgctctctgtgtcgctatagcacctgctgttctcgagcttatgccaaccacatgatcaacaatcatgttccacggaagagccccaagtatttggctttgtttaaaaattctgtgagtggaatcaagctggcctgcacttcatgtacctttgttacctctgtgggcgatgctatggccaagcatttggtattcaacccctctcacagatccagcagcatcctgccacggggactcacttggatagctcactcaaggcatggccagactcgtgaccgagtgcatgaccggaacgtgaagaatatgtaccctcctccttccttccccactaacaaagctgccactgtgaaatctgcgggggccaccccagctgagcctgaagagctactaactcccttagccccagcactcccatcaccagcctcaactgcaaccccaccaccaacccccactcacccgcaggctttagcccttccaccgctggctacagagggagccgaatgtctgaatgttgatgatcaggatgaagggagcccagtcacccaagaacctgagctagcatcaggtggtggtggtagtggtggagttggcaaaaaggagcagctgtctgtgaagaagcttcgagtagtactgtttgctctatgctgcaatacagaacaggcagctgaacacttccgaaatccccagcgacgtattcgccgttggcttcgacgtttccaggcctcccagggggagaatctagagggcaaatatctgagctttgaggcagaagagaaactggctgagtgggtgctaacccagcgcgaacaacagctacctgtaaatgaggagaccttgttccagaaggccaccaaaataggacgttctttggaaggggggtttaagatctcctatgagtgggctgtgcgtttcatgctgcggcaccacctgactccccatgcccggcgagctgtggcccacaccctacctaaggatgtagcagagaatgcaggactcttcattgattttgtacaacggcagattcacaaccaggacttacccttgtctatgattgtggctattgatgagatctctttgttcctggatacagaggtgctgagcagtgatgatcgaaaggagaatgccctgcagacagtgggcacaggggaaccttggtgtgatgtagtcctagccattctggcagatggcactgtccttcccaccctggttttctacagagggcagatggatcagcctgctaacatgccagactccatattgctagaggcaaaggagagtggctacagtgatgacgagatcatggagctgtggtcaactcgagtgtggcagaagcacacagcttgccagcgcagcaaaggcatgcttgtgatggactgtcatcgcactcacttgtcagaagaggtactggctatgcttagtgcctctagcactttgcctgcagtggtcccagcaggctgtagctccaaaattcagccattagatgtatgcatcaaaagaactgtcaagaacttcctgcataaaaaatggaaggaacaggctcgggaaatggcagatactgcatgtgattctgatgtcctgcttcagctggtgcttgtctggctgggtgaagtgctaggtgtcattggggactgtccagagctagttcagcgctccttcctggtggctagtgttctgcctggccccgatggcaacattaactcacctacaagaaatgctgacatgcaggaggagctaattgcctccctagaggagcaactgaagctgagtggggaacattctgagtcttccactccacgacccagatcatctcctgaagagacaattgagcctgaaagtcttcaccagctctttgagggtgaaagtgagaccgagtctttctatggctttgaagaagctgacctagatctgatggagatttgagtgttggggtcatgagggggtgtggagtgagggtgggaacatgtgagggagggtaaaggggcttagggaaaagggggcataccaggtggggtatttggtttctattttttaattttataccaccactcccccctgaagttgacttacacttccctgtggatttgtggattaattaggaaaaccaatagtaatcacgtctgagccaaggagctggcccattggtcattcacttctgctaaaaacaggtttttgtgactttttttttttttaaatttaaatcactgtgtttggtatttttctgacaaaattaagaaaaagaaaaaaaattatttgtgggcaaatgttaaatttttttgtttccccttttacctcaattgtatcatagtactgggtttttttgtttgttttattgtgtggccaatgtctttgggcatgatgctatctaatcattgttaatgtgagaacatttctgaagatgggaaagacaaattatgtagctcacaaactggtttattatatatatggataaaaaacttttttcattgtggtcttaacacttttatataaaaatgaaaatggaaaaaaagtcccactgaactctctcttccttctccttttctttccttccctctccagagatgttggtttctacagcaaccctagatataaaattgtggctttaaaaatgcatgaaaccacctttaattatccagaatgaatagatttgtcttttcctcaccaccttccctccaaaacatgacataaacaatattttttgcacttgtgatccttggcccctttccccattctcaacaccatccatccctctggacaaaggatcatacaggtgttattagcaagcaagagatactgaagcgatcaaacagttttagggtggaagccattcccagtttgagtcttcatcctgtaagcccccaggggcagtccctgctttactgaacttcatcctgttagatggagagcatgcctgtttaagggattactggtcctacagccaggagctaattgttcaagaagtgttgaactttaaaaagacaagaccacttgttgaaatccagcgtgctctgtggctttcccctatttctcttaatacttagggaagaatctgacaggaagaagcgcacaggggtgtgcacaaagaaaatgacatgaatctttatttttcactgccagcttcaaggaaagaaaattttttctacaatttgcatgagggatttttttaattgtatgtactcatggttgtaaaccaaaacgtactgtaccgtacagagaaaaggagcaaaaaaccaagtcttctgtttatcctgaggctttccacaatgttcccctcctgtgagccaaggaggcaaactgcacaagcttgtaaatggttcgtctttaaaatgtacataagtggaacatttaataaaatgaggggaaatggatttataaacttgttttttttctaggtgaccctgtttaataggctttcacagactggggaatgctcaagatgtgatgggcctggtggtacaggtgtgacatttgttaccacccatttctcccaccccaccctgcttttttgtttgtttgttttttcatcccccagcacactataatatagtgaactggaaaagtcccttccagaaacagcttggccagctttgtgaacctttgacatctgaaaacaaccaaggatccatctgggcttctcttccccagctttttgcctgatgccattttattgacagacaatggactttgaagtcagcctttgcctttgagaaagttcaagaactatggttggtcacgtctatctacaacctaatcctactctttggtagtctctgcagcagccacagccttagcagagctggggttcctgtcttctgcacacgattgactttcttgatgggtaattttttttaagattataccaacagtggatcagctgggttttggccaggaagttgtctttgtggactctgcctgcatggcttagtagtagaaggaaatttttttttggttttgttttttataattcagtttaatcaataaacatgtatttattgactgt

SEQ ID NO: 166886 - DNA, 6152 bp, Homo sapiens
  Payload ID: 12853
  Gene Symbol: POGZ
  Gene Name: pogo transposable element with ZNF domain
  Uniprot ID: Q7Z3K3
  ENST ID: ENST00000392723
  CDS Start-End: 1-4074
atggcggacaccgacctgttcatggaatgtgaggaggaggagttggagccatggcagaaaatcagtgatgtcattgaggactctgtagttgaagattataattcagtggataaaactaccacagctggcaatcctttggtccagcaaggtggacagccactcatcctgacccagaatccagccccaggtctgggcacaatggttactcaaccagtattgaggcctgttcaggtcatgcagaatgccaatcatgtgactagttcccctgtggcctcacaaccaatatttatcactacgcagggatttcctgtaaggaatgtccggcctgtacaaaatgcaatgaatcaggttgggattgtgctgaacgtacagcaaggccaaacggttagaccaattacactagttccagccccaggtacccagtttgttaagccgacagttggagttccacaagtgttctcccagatgacccctgtgaggccaggctccacaatgcctgtgaggcccaccaccaacaccttcaccaccgtcatcccggccactcttaccattcgaagcaccgtcccacagtcccagtcccagcagaccaagtccactcccagcacttctaccactcccactgccacacagccaacctcactggggcaactagctgttcagtctccaggccagtcaaaccagaccacgaatcccaagctagctccctccttcccctctccacctgcagtgagcattgccagctttgtcactgtgaagcgacctggtgttacaggcgaaaatagcaatgaagtggccaaattggtgaatacccttaacaccatcccttccctgggccagagtcctgggccagtggtggtgtccaacaacagctctgctcatggctctcaaagaaccagcggacctgagtcttcaatgaaagtgacctcttccatcccagtatttgacctccaggatggtggacggaaaatatgtccacgatgtaatgctcaatttcgtgttactgaagctttgagaggtcacatgtgttactgttgcccagaaatggttgaataccagaagaaaggaaagtccctggattcagaacccagtgtcccatcagcagcaaagcccccatcccctgagaaaacagctcctgttgcttccacaccctcttctacacctattcctgctctgtcaccgcctaccaaagtaccagaaccaaatgagaacgtgggcgatgccgtccagaccaaactcattatgcttgtagatgacttctactatggacgggatggtggcaaagtagcccagctcacaaatttccctaaggtcgccacatctttccgatgcccacattgtaccaaaaggctaaaaaacaatattcgattcatgaaccatatgaaacaccacgtagaactcgatcagcagaacggtgaggtagatggtcacactatctgccagcactgttaccgccagttttccactcccttccagcttcagtgccacttggaaaatgttcatagtccctatgaatctactaccaagtgcaagatctgtgaatgggcgtttgaaagtgagccactatttctccagcatatgaaggatactcataagcctggagagatgccttatgtttgccaggtgtgtcaatatcgctcctcactctactctgaggtagatgtccattttcggatgatccatgaggatacccggcatctgctctgcccttattgcctgaaggtcttcaaaaatggcaatgcattccaacagcattacatgaggcaccagaagagaaatgtttatcactgcaacaaatgccggctgcagtttctctttgccaaggacaaaattgaacacaagcttcaacaccataaaaccttccgtaaacccaagcagctggagggcttgaaaccaggcaccaaggtgacaatccgggcttcccgagggcagccacgaactgttcctgtatcctctaatgatacacctcccagcgccttgcaggaggcagcaccgctgacctcctcaatggaccctctgcctgtcttcctttatccccctgtccagcgcagcatccagaagagagctgttaggaaaatgagtgtcatgggccggcagacatgcctggagtgcagcttcgagatcccagacttccctaatcatttccctacttacgtacactgctctctgtgtcgctatagcacctgctgttctcgagcttatgccaaccacatgatcaacaatcatgttccacggaagagccccaagtatttggctttgtttaaaaattctgtgagtggaatcaagctggcctgcacttcatgtacctttgttacctctgtgggcgatgctatggccaagcatttggtattcaacccctctcacagatccagcagcatcctgccacggggactcacttggatagctcactcaaggcatggccagactcgtgaccgagtgcatgaccggaacgtgaagaatatgtaccctcctccttccttccccactaacaaagctgccactgtgaaatctgcgggggccaccccagctgagcctgaagagctactaactcccttagccccagcactcccatcaccagcctcaactgcaaccccaccaccaacccccactcacccgcaggctttagcccttccaccgctggctacagagggagccgaatgtctgaatgttgatgatcaggatgaagggagcccagtcacccaagaacctgagctagcatcaggtggtggtggtagtggtggagttggcaaaaaggagcagctgtctgtgaagaagcttcgagtagtactgtttgctctatgctgcaatacagaacaggcagctgaacacttccgaaatccccagcgacgtattcgccgttggcttcgacgtttccaggcctcccagggggagaatctagagggcaaatatctgagctttgaggcagaagagaaactggctgagtgggtgctaacccagcgcgaacaacagctacctgtaaatgaggagaccttgttccagaaggccaccaaaataggacgttctttggaaggggggtttaagatctcctatgagtgggctgtgcgtttcatgctgcggcaccacctgactccccatgcccggcgagctgtggcccacaccctacctaaggatgtagcagagaatgcaggactcttcattgattttgtacaacggcagattcacaaccaggacttacccttgtctatgattgtggctattgatgagatctctttgttcctggatacagaggtgctgagcagtgatgatcgaaaggagaatgccctgcagacagtgggcacaggggaaccttggtgtgatgtagtcctagccattctggcagatggcactgtccttcccaccctggttttctacagagggcagatggatcagcctgctaacatgccagactccatattgctagaggcaaaggagagtggctacagtgatgacgagatcatggagctgtggtcaactcgagtgtggcagaagcacacagcttgccagcgcagcaaaggcatgcttgtgatggactgtcatcgcactcacttgtcagaagaggtactggctatgcttagtgcctctagcactttgcctgcagtggtcccagcaggctgtagctccaaaattcagccattagatgtatgcatcaaaagaactgtcaagaacttcctgcataaaaaatggaaggaacaggctcgggaaatggcagatactgcatgtgattctgatgtcctgcttcagctggtgcttgtctggctgggtgaagtgctaggtgtcattggggactgtccagagctagttcagcgctccttcctggtggctagtgttctgcctggccccgatggcaacattaactcacctacaagaaatgctgacatgcaggaggagctaattgcctccctagaggagcaactgaagctgagtggggaacattctgagtcttccactccacgacccagatcatctcctgaagagacaattgagcctgaaagtcttcaccagctctttgagggtgaaagtgagaccgagtctttctatggctttgaagaagctgacctagatctgatggagatttgagtgttggggtcatgagggggtgtggagtgagggtgggaacatgtgagggagggtaaaggggcttagggaaaagggggcataccaggtggggtatttggtttctattttttaattttataccaccactcccccctgaagttgacttacacttccctgtggatttgtggattaattaggaaaaccaatagtaatcacgtctgagccaaggagctggcccattggtcattcacttctgctaaaaacaggtttttgtgactttttttttttttaaatttaaatcactgtgtttggtatttttctgacaaaattaagaaaaagaaaaaaaattatttgtgggcaaatgttaaatttttttgtttccccttttacctcaattgtatcatagtactgggtttttttgtttgttttattgtgtggccaatgtctttgggcatgatgctatctaatcattgttaatgtgagaacatttctgaagatgggaaagacaaattatgtagctcacaaactggtttattatatatatggataaaaaacttttttcattgtggtcttaacacttttatataaaaatgaaaatggaaaaaaagtcccactgaactctctcttccttctccttttctttccttccctctccagagatgttggtttctacagcaaccctagatataaaattgtggctttaaaaatgcatgaaaccacctttaattatccagaatgaatagatttgtcttttcctcaccaccttccctccaaaacatgacataaacaatattttttgcacttgtgatccttggcccctttccccattctcaacaccatccatccctctggacaaaggatcatacaggtgttattagcaagcaagagatactgaagcgatcaaacagttttagggtggaagccattcccagtttgagtcttcatcctgtaagcccccaggggcagtccctgctttactgaacttcatcctgttagatggagagcatgcctgtttaagggattactggtcctacagccaggagctaattgttcaagaagtgttgaactttaaaaagacaagaccacttgttgaaatccagcgtgctctgtggctttcccctatttctcttaatacttagggaagaatctgacaggaagaagcgcacaggggtgtgcacaaagaaaatgacatgaatctttatttttcactgccagcttcaaggaaagaaaattttttctacaatttgcatgagggatttttttaattgtatgtactcatggttgtaaaccaaaacgtactgtaccgtacagagaaaaggagcaaaaaaccaagtcttctgtttatcctgaggctttccacaatgttcccctcctgtgagccaaggaggcaaactgcacaagcttgtaaatggttcgtctttaaaatgtacataagtggaacatttaataaaatgaggggaaatggatttataaacttgttttttttctaggtgaccctgtttaataggctttcacagactggggaatgctcaagatgtgatgggcctggtggtacaggtgtgacatttgttaccacccatttctcccaccccaccctgcttttttgtttgtttgttttttcatcccccagcacactataatatagtgaactggaaaagtcccttccagaaacagcttggccagctttgtgaacctttgacatctgaaaacaaccaaggatccatctgggcttctcttccccagctttttgcctgatgccattttattgacagacaatggactttgaagtcagcctttgcctttgagaaagttcaagaactatggttggtcacgtctatctacaacctaatcctactctttggtagtctctgcagcagccacagccttagcagagctggggttcctgtcttctgcacacgattgactttcttgatgggtaattttttttaagattataccaacagtggatcagctgggttttggccaggaagttgtctttgtggactctgcctgcatggcttagtagtagaaggaaatttttttttggttttgttttttataattcagtttaatcaataaacatgtatttattgactgtt

SEQ ID NO: 166887 - DNA, 4813 bp, Homo sapiens
  Payload ID: 12853
  Gene Symbol: POGZ
  Gene Name: pogo transposable element with ZNF domain
  Uniprot ID: Q7Z3K3
  ENST ID: ENST00000409503
  CDS Start-End: 30-4235
agactaccggcggcgacgaccacaggagcatggcggacaccgacctgttcatggaatgtgaggaggaggagttggagccatggcagaaaatcagtgatgtcattgaggactctgtagttgaagattataattcagtggataaaactaccacagtttctgtgagccagcagccagtctcggctccagtgcccatcgctgcccatgcttctgttgctgggcacctctctacatccaccaccgttagtagcagcggggcacagaacagcgacagtacaaagaagactcttgtcacactaattgccaacaacaatgctggcaatcctttggtccagcaaggtggacagccactcatcctgacccagaatccagccccaggtctgggcacaatggttactcaaccagtattgaggcctgttcaggtcatgcagaatgccaatcatgtgactagttcccctgtggcctcacaaccaatatttatcactacgcagggatttcctgtaaggaatgtccggcctgtacaaaatgcaatgaatcaggttgggattgtgctgaacgtacagcaaggccaaacggttagaccaattacactagttccagccccaggtacccagtttgttaagccgacagttggagttccacaagtgttctcccagatgacccctgtgaggccaggctccacaatgcctgtgaggcccaccaccaacaccttcaccaccgtcatcccggccactcttaccattcgaagcaccgtcccacagtcccagtcccagcagaccaagtccactcccagcacttctaccactcccactgccacacagccaacctcactggggcaactagctgttcagtctccaggccagtcaaaccagaccacgaatcccaagctagtgagcattgccagctttgtcactgtgaagcgacctggtgttacaggcgaaaatagcaatgaagtggccaaattggtgaatacccttaacaccatcccttccctgggccagagtcctgggccagtggtggtgtccaacaacagctctgctcatggctctcaaagaaccagcggacctgagtcttcaatgaaagtgacctcttccatcccagtatttgacctccaggatggtggacggaaaatatgtccacgatgtaatgctcaatttcgtgttactgaagctttgagaggtcacatgtgttactgttgcccagaaatggttgaataccagaagaaaggaaagtccctggattcagaacccagtgtcccatcagcagcaaagcccccatcccctgagaaaacagctcctgttgcttccacaccctcttctacacctattcctgctctgtcaccgcctaccaaagtaccagaaccaaatgagaacgtgggcgatgccgtccagaccaaactcattatgcttgtagatgacttctactatggacgggatggtggcaaagtagcccagctcacaaatttccctaaggtcgccacatctttccgatgcccacattgtaccaaaaggctaaaaaacaatattcgattcatgaaccatatgaaacaccacgtagaactcgatcagcagaacggtgaggtagatggtcacactatctgccagcactgttaccgccagttttccactcccttccagcttcagtgccacttggaaaatgttcatagtccctatgaatctactaccaagtgcaagatctgtgaatgggcgtttgaaagtgagccactatttctccagcatatgaaggatactcataagcctggagagatgccttatgtttgccaggtgtgtcaatatcgctcctcactctactctgaggtagatgtccattttcggatgatccatgaggatacccggcatctgctctgcccttattgcctgaaggtcttcaaaaatggcaatgcattccaacagcattacatgaggcaccagaagagaaatgtttatcactgcaacaaatgccggctgcagtttctctttgccaaggacaaaattgaacacaagcttcaacaccataaaaccttccgtaaacccaagcagctggagggcttgaaaccaggcaccaaggtgacaatccgggcttcccgagggcagccacgaactgttcctgtatcctctaatgatacacctcccagcgccttgcaggaggcagcaccgctgacctcctcaatggaccctctgcctgtcttcctttatccccctgtccagcgcagcatccagaagagagctgttaggaaaatgagtgtcatgggccggcagacatgcctggagtgcagcttcgagatcccagacttccctaatcatttccctacttacgtacactgctctctgtgtcgctatagcacctgctgttctcgagcttatgccaaccacatgatcaacaatcatgttccacggaagagccccaagtatttggctttgtttaaaaattctgtgagtggaatcaagctggcctgcacttcatgtacctttgttacctctgtgggcgatgctatggccaagcatttggtattcaacccctctcacagatccagcagcatcctgccacggggactcacttggatagctcactcaaggcatggccagactcgtgaccgagtgcatgaccggaacgtgaagaatatgtaccctcctccttccttccccactaacaaagctgccactgtgaaatctgcgggggccaccccagctgagcctgaagagctactaactcccttagccccagcactcccatcaccagcctcaactgcaaccccaccaccaacccccactcacccgcaggctttagcccttccaccgctggctacagagggagccgaatgtctgaatgttgatgatcaggatgaagggagcccagtcacccaagaacctgagctagcatcaggtggtggtggtagtggtggagttggcaaaaaggagcagctgtctgtgaagaagcttcgagtagtactgtttgctctatgctgcaatacagaacaggcagctgaacacttccgaaatccccagcgacgtattcgccgttggcttcgacgtttccaggcctcccagggggagaatctagagggcaaatatctgagctttgaggcagaagagaaactggctgagtgggtgctaacccagcgcgaacaacagctacctgtaaatgaggagaccttgttccagaaggccaccaaaataggacgttctttggaaggggggtttaagatctcctatgagtgggctgtgcgtttcatgctgcggcaccacctgactccccatgcccggcgagctgtggcccacaccctacctaaggatgtagcagagaatgcaggactcttcattgattttgtacaacggcagattcacaaccaggacttacccttgtctatgattgtggctattgatgagatctctttgttcctggatacagaggtgctgagcagtgatgatcgaaaggagaatgccctgcagacagtgggcacaggggaaccttggtgtgatgtagtcctagccattctggcagatggcactgtccttcccaccctggttttctacagagggcagatggatcagcctgctaacatgccagactccatattgctagaggcaaaggagagtggctacagtgatgacgagatcatggagctgtggtcaactcgagtgtggcagaagcacacagcttgccagcgcagcaaaggcatgcttgtgatggactgtcatcgcactcacttgtcagaagaggtactggctatgcttagtgcctctagcactttgcctgcagtggtcccagcaggctgtagctccaaaattcagccattagatgtatgcatcaaaagaactgtcaagaacttcctgcataaaaaatggaaggaacaggctcgggaaatggcagatactgcatgtgattctgatgtcctgcttcagctggtgcttgtctggctgggtgaagtgctaggtgtcattggggactgtccagagctagttcagcgctccttcctggtggctagtgttctgcctggccccgatggcaacattaactcacctacaagaaatgctgacatgcaggaggagctaattgcctccctagaggagcaactgaagctgagtggggaacattctgagtcttccactccacgacccagatcatctcctgaagagacaattgagcctgaaagtcttcaccagctctttgagggtgaaagtgagaccgagtctttctatggctttgaagaagctgacctagatctgatggagatttgagtgttggggtcatgagggggtgtggagtgagggtgggaacatgtgagggagggtaaaggggcttagggaaaagggggcataccaggtggggtatttggtttctattttttaattttataccaccactcccccctgaagttgacttacacttccctgtggatttgtggattaattaggaaaaccaatagtaatcacgtctgagccaaggagctggcccattggtcattcacttctgctaaaaacaggtttttgtgactttttttttttttaaatttaaatcactgtgtttggtatttttctgacaaaattaagaaaaagaaaaaaaattatttgtgggcaaatgttaaatttttttgtttccccttttacctcaattgtatcatagtactgggtttttttgtttgttttattgtgtggccaatgtctttgggcatgatgctatctaatcattgttaatgtgagaacatttctgaagatgggaaagacaaattatgtagctcacaaactggtttattatatatatggataaaaaacttttttcattgtggtcttaacacttttatataaaaatgaaaatg

SEQ ID NO: 166888 - DNA, 199 bp, Homo sapiens
  Payload ID: 12853
  Gene Symbol: POGZ
  Gene Name: pogo transposable element with ZNF domain
  ENST ID: ENST00000439756
  CDS Start-End: 176-199
ctcggcttcccaaaatgttgggattacaggtgggagccaccatgcccggcctgtaaccctaattattaaataatttgctgtggaatggattctaatattcaataatagaagttgtaattctgaacccttggaaatggaggaaggctagaggatatgataaaggagtccaaggagcatggcggacaccgacctgttcatg

SEQ ID NO: 166889 - DNA, 489 bp, Homo sapiens
  Payload ID: 12853
  Gene Symbol: POGZ
  Gene Name: pogo transposable element with ZNF domain
  ENST ID: ENST00000450842
  CDS Start-End: 238-489
tatcaatatggtaacattttgatagattctttggtattcttgtttgtgatattaagccatattcacaaaaacttgtcttttttttttttttgagatggagtctcgctctattgcccaggctggagcgtaatggcgcaatctcggctcactgcaccctccgcctcctgggttcaagcgattctcctccttcagcttcctcagtagctgggattacaggcacgcgccaccacacctggcatggcggacaccgacctgttcatggaatgtgaggaggaggagttggagccatggcagaaaatcagtgatgtcattgaggactctgtagttgaagattataattcagtggataaaactaccacagctggcaatcctttggtccagcaaggtggacagccactcatcctgacccagaatccagccccaggtctgggcacaatggttactcaaccagtattgaggcctgttcaggtcatgcagaatgccaatcat

SEQ ID NO: 166890 - DNA, 526 bp, Homo sapiens
  Payload ID: 12853
  Gene Symbol: POGZ
  Gene Name: pogo transposable element with ZNF domain
  ENST ID: ENST00000441516
  CDS Start-End: 1-181
tggtgttacaggcgaaaatagcaatgaagtggccaaattggtgaatacccttaacaccatcccttccctgggccagagtcctgggccagtggtggtgtccaacaacagctctgctcatggctctcaaagaaccagcggacctgagtcttcaatgaaagtactgttgcccagaaatggttgaataccagaagaaaggaaagtccctggattcagaacccagtgtcccatcagcagcaaagcccccatcccctgagaaaacagctcctgttgcttccacaccctcttctacacctattcctgctctgtcaccgcctaccaaagtaccagaaccaaatgagaacgtgggcgatgccgtccagaccaaactcattatgcttgtagatgacttctactatggacgggatggtggcaaagtagcccagctcacaaatttccctaaggtcgccacatctttccgatgcccacattgtaccaaaaggctaaaaaacaatattcgattcatgaaccatatgaaacaccacgtaga

SEQ ID NO: 166891 - DNA, 4130 bp, Homo sapiens
  Payload ID: 12853
  Gene Symbol: POGZ
  Gene Name: pogo transposable element with ZNF domain
  Uniprot ID: Q7Z3K3
  ENST ID: ENST00000491586
  CDS Start-End: 30-4130
agactaccggcggcgacgaccacaggagcatggcggacaccgacctgttcatggaatgtgaggaggaggagttggagccatggcagaaaatcagtgatgtcattgaggactctgtagttgaagattataattcagtggataaaactaccacagctggcaatcctttggtccagcaaggtggacagccactcatcctgacccagaatccagccccaggtctgggcacaatggttactcaaccagtattgaggcctgttcaggtcatgcagaatgccaatcatgtgactagttcccctgtggcctcacaaccaatatttatcactacgcagggatttcctgtaaggaatgtccggcctgtacaaaatgcaatgaatcaggttgggattgtgctgaacgtacagcaaggccaaacggttagaccaattacactagttccagccccaggtacccagtttgttaagccgacagttggagttccacaagtgttctcccagatgacccctgtgaggccaggctccacaatgcctgtgaggcccaccaccaacaccttcaccaccgtcatcccggccactcttaccattcgaagcaccgtcccacagtcccagtcccagcagaccaagtccactcccagcacttctaccactcccactgccacacagccaacctcactggggcaactagctgttcagtctccaggccagtcaaaccagaccacgaatcccaagctagctccctccttcccctctccacctgcagtgagcattgccagctttgtcactgtgaagcgacctggtgttacaggcgaaaatagcaatgaagtggccaaattggtgaatacccttaacaccatcccttccctgggccagagtcctgggccagtggtggtgtccaacaacagctctgctcatggctctcaaagaaccagcggacctgagtcttcaatgaaagtgacctcttccatcccagtatttgacctccaggatggtggacggaaaatatgtccacgatgtaatgctcaatttcgtgttactgaagctttgagaggtcacatgtgttactgttgcccagaaatggttgaataccagaagaaaggaaagtccctggattcagaacccagtgtcccatcagcagcaaagcccccatcccctgagaaaacagctcctgttgcttccacaccctcttctacacctattcctgctctgtcaccgcctaccaaagtaccagaaccaaatgagaacgtgggcgatgccgtccagaccaaactcattatgcttgtagatgacttctactatggacgggatggtggcaaagtagcccagctcacaaatttccctaaggtcgccacatctttccgatgcccacattgtaccaaaaggctaaaaaacaatattcgattcatgaaccatatgaaacaccacgtagaactcgatcagcagaacggtgaggtagatggtcacactatctgccagcactgttaccgccagttttccactcccttccagcttcagtgccacttggaaaatgttcatagtccctatgaatctactaccaagtgcaagatctgtgaatgggcgtttgaaagtgagccactatttctccagcatatgaaggatactcataagcctggagagatgccttatgtttgccagccttattttccctcctatgtgactcaggtgtgtcaatatcgctcctcactctactctgaggtagatgtccattttcggatgatccatgaggatacccggcatctgctctgcccttattgcctgaaggtcttcaaaaatggcaatgcattccaacagcattacatgaggcaccagaagagaaatgtttatcactgcaacaaatgccggctgcagtttctctttgccaaggacaaaattgaacacaagcttcaacaccataaaaccttccgtaaacccaagcagctggagggcttgaaaccaggcaccaaggtgacaatccgggcttcccgagggcagccacgaactgttcctgtatcctctaatgatacacctcccagcgccttgcaggaggcagcaccgctgacctcctcaatggaccctctgcctgtcttcctttatccccctgtccagcgcagcatccagaagagagctgttaggaaaatgagtgtcatgggccggcagacatgcctggagtgcagcttcgagatcccagacttccctaatcatttccctacttacgtacactgctctctgtgtcgctatagcacctgctgttctcgagcttatgccaaccacatgatcaacaatcatgttccacggaagagccccaagtatttggctttgtttaaaaattctgtgagtggaatcaagctggcctgcacttcatgtacctttgttacctctgtgggcgatgctatggccaagcatttggtattcaacccctctcacagatccagcagcatcctgccacggggactcacttggatagctcactcaaggcatggccagactcgtgaccgagtgcatgaccggaacgtgaagaatatgtaccctcctccttccttccccactaacaaagctgccactgtgaaatctgcgggggccaccccagctgagcctgaagagctactaactcccttagccccagcactcccatcaccagcctcaactgcaaccccaccaccaacccccactcacccgcaggctttagcccttccaccgctggctacagagggagccgaatgtctgaatgttgatgatcaggatgaagggagcccagtcacccaagaacctgagctagcatcaggtggtggtggtagtggtggagttggcaaaaaggagcagctgtctgtgaagaagcttcgagtagtactgtttgctctatgctgcaatacagaacaggcagctgaacacttccgaaatccccagcgacgtattcgccgttggcttcgacgtttccaggcctcccagggggagaatctagagggcaaatatctgagctttgaggcagaagagaaactggctgagtgggtgctaacccagcgcgaacaacagctacctgtaaatgaggagaccttgttccagaaggccaccaaaataggacgttctttggaaggggggtttaagatctcctatgagtgggctgtgcgtttcatgctgcggcaccacctgactccccatgcccggcgagctgtggcccacaccctacctaaggatgtagcagagaatgcaggactcttcattgattttgtacaacggcagattcacaaccaggacttacccttgtctatgattgtggctattgatgagatctctttgttcctggatacagaggtgctgagcagtgatgatcgaaaggagaatgccctgcagacagtgggcacaggggaaccttggtgtgatgtagtcctagccattctggcagatggcactgtccttcccaccctggttttctacagagggcagatggatcagcctgctaacatgccagactccatattgctagaggcaaaggagagtggctacagtgatgacgagatcatggagctgtggtcaactcgagtgtggcagaagcacacagcttgccagcgcagcaaaggcatgcttgtgatggactgtcatcgcactcacttgtcagaagaggtactggctatgcttagtgcctctagcactttgcctgcagtggtcccagcaggctgtagctccaaaattcagccattagatgtatgcatcaaaagaactgtcaagaacttcctgcataaaaaatggaaggaacaggctcgggaaatggcagatactgcatgtgattctgatgtcctgcttcagctggtgcttgtctggctgggtgaagtgctaggtgtcattggggactgtccagagctagttcagcgctccttcctggtggctagtgttctgcctggccccgatggcaacattaactcacctacaagaaatgctgacatgcaggaggagctaattgcctccctagaggagcaactgaagctgagtggggaacattctgagtcttccactccacgacccagatcatctcctgaagagacaattgagcctgaaagtcttcaccagctctttgagggtgaaagtgagaccgagtctttctatggctttgaagaagctgacctagatctgatggagatttga

SEQ ID NO: 166892 - DNA, 4415 bp, Homo sapiens
  Payload ID: 12853
  Gene Symbol: POGZ
  Gene Name: pogo transposable element with ZNF domain
  Uniprot ID: Q7Z3K3
  ENST ID: ENST00000531094
  CDS Start-End: 66-4112
aaggtccctttaaggcgacggcgccttcctcgggtcagactaccggcggcgacgaccacaggagcatggcggacaccgacctgttcatggaatgtgaggaggaggagttggagccatggcagaaaatcagtgatgtcattgaggactctgtagttgaagattataattcagtggataaaactaccacagctggcaatcctttggtccagcaaggtggacagccactcatcctgacccagaatccagccccaggtctgggcacaatggttactcaaccagtattgaggcctgttcaggtcatgcagaatgccaatcatgtgactagttcccctgtggcctcacaaccaatatttatcactacgcagggatttcctgtaaggaatgtccggcctgtacaaaatgcaatgaatcaggttgggattgtgctgaacgtacagcaaggccaaacggttagaccaattacactagttccagccccaggtacccagtttgttaagccgacagttggagttccacaagtgttctcccagatgacccctgtgaggccaggctccacaatgcctgtgaggcccaccaccaacaccttcaccaccgtcatcccggccactcttaccattcgaagcaccgtcccacagtcccagtcccagcagaccaagtccactcccagcacttctaccactcccactgccacacagccaacctcactggggcaactagctgttcagtctccaggccagtcaaaccagaccacgaatcccaagctagtgagcattgccagctttgtcactgtgaagcgacctggtgttacaggcgaaaatagcaatgaagtggccaaattggtgaatacccttaacaccatcccttccctgggccagagtcctgggccagtggtggtgtccaacaacagctctgctcatggctctcaaagaaccagcggacctgagtcttcaatgaaagtgacctcttccatcccagtatttgacctccaggatggtggacggaaaatatgtccacgatgtaatgctcaatttcgtgttactgaagctttgagaggtcacatgtgttactgttgcccagaaatggttgaataccagaagaaaggaaagtccctggattcagaacccagtgtcccatcagcagcaaagcccccatcccctgagaaaacagctcctgttgcttccacaccctcttctacacctattcctgctctgtcaccgcctaccaaagtaccagaaccaaatgagaacgtgggcgatgccgtccagaccaaactcattatgcttgtagatgacttctactatggacgggatggtggcaaagtagcccagctcacaaatttccctaaggtcgccacatctttccgatgcccacattgtaccaaaaggctaaaaaacaatattcgattcatgaaccatatgaaacaccacgtagaactcgatcagcagaacggtgaggtagatggtcacactatctgccagcactgttaccgccagttttccactcccttccagcttcagtgccacttggaaaatgttcatagtccctatgaatctactaccaagtgcaagatctgtgaatgggcgtttgaaagtgagccactatttctccagcatatgaaggatactcataagcctggagagatgccttatgtttgccaggtgtgtcaatatcgctcctcactctactctgaggtagatgtccattttcggatgatccatgaggatacccggcatctgctctgcccttattgcctgaaggtcttcaaaaatggcaatgcattccaacagcattacatgaggcaccagaagagaaatgtttatcactgcaacaaatgccggctgcagtttctctttgccaaggacaaaattgaacacaagcttcaacaccataaaaccttccgtaaacccaagcagctggagggcttgaaaccaggcaccaaggtgacaatccgggcttcccgagggcagccacgaactgttcctgtatcctctaatgatacacctcccagcgccttgcaggaggcagcaccgctgacctcctcaatggaccctctgcctgtcttcctttatccccctgtccagcgcagcatccagaagagagctgttaggaaaatgagtgtcatgggccggcagacatgcctggagtgcagcttcgagatcccagacttccctaatcatttccctacttacgtacactgctctctgtgtcgctatagcacctgctgttctcgagcttatgccaaccacatgatcaacaatcatgttccacggaagagccccaagtatttggctttgtttaaaaattctgtgagtggaatcaagctggcctgcacttcatgtacctttgttacctctgtgggcgatgctatggccaagcatttggtattcaacccctctcacagatccagcagcatcctgccacggggactcacttggatagctcactcaaggcatggccagactcgtgaccgagtgcatgaccggaacgtgaagaatatgtaccctcctccttccttccccactaacaaagctgccactgtgaaatctgcgggggccaccccagctgagcctgaagagctactaactcccttagccccagcactcccatcaccagcctcaactgcaaccccaccaccaacccccactcacccgcaggctttagcccttccaccgctggctacagagggagccgaatgtctgaatgttgatgatcaggatgaagggagcccagtcacccaagaacctgagctagcatcaggtggtggtggtagtggtggagttggcaaaaaggagcagctgtctgtgaagaagcttcgagtagtactgtttgctctatgctgcaatacagaacaggcagctgaacacttccgaaatccccagcgacgtattcgccgttggcttcgacgtttccaggcctcccagggggagaatctagagggcaaatatctgagctttgaggcagaagagaaactggctgagtgggtgctaacccagcgcgaacaacagctacctgtaaatgaggagaccttgttccagaaggccaccaaaataggacgttctttggaaggggggtttaagatctcctatgagtgggctgtgcgtttcatgctgcggcaccacctgactccccatgcccggcgagctgtggcccacaccctacctaaggatgtagcagagaatgcaggactcttcattgattttgtacaacggcagattcacaaccaggacttacccttgtctatgattgtggctattgatgagatctctttgttcctggatacagaggtgctgagcagtgatgatcgaaaggagaatgccctgcagacagtgggcacaggggaaccttggtgtgatgtagtcctagccattctggcagatggcactgtccttcccaccctggttttctacagagggcagatggatcagcctgctaacatgccagactccatattgctagaggcaaaggagagtggctacagtgatgacgagatcatggagctgtggtcaactcgagtgtggcagaagcacacagcttgccagcgcagcaaaggcatgcttgtgatggactgtcatcgcactcacttgtcagaagaggtactggctatgcttagtgcctctagcactttgcctgcagtggtcccagcaggctgtagctccaaaattcagccattagatgtatgcatcaaaagaactgtcaagaacttcctgcataaaaaatggaaggaacaggctcgggaaatggcagatactgcatgtgattctgatgtcctgcttcagctggtgcttgtctggctgggtgaagtgctaggtgtcattggggactgtccagagctagttcagcgctccttcctggtggctagtgttctgcctggccccgatggcaacattaactcacctacaagaaatgctgacatgcaggaggagctaattgcctccctagaggagcaactgaagctgagtggggaacattctgagtcttccactccacgacccagatcatctcctgaagagacaattgagcctgaaagtcttcaccagctctttgagggtgaaagtgagaccgagtctttctatggctttgaagaagctgacctagatctgatggagatttgagtgttggggtcatgagggggtgtggagtgagggtgggaacatgtgagggagggtaaaggggcttagggaaaagggggcataccaggtggggtatttggtttctattttttaattttataccaccactcccccctgaagttgacttacacttccctgtggatttgtggattaattaggaaaaccaatagtaatcacgtctgagccaaggagctggcccattggtcattcacttctgctaaaaacaggtttttgtgactttttttttttttaaatttaaatcactgtgtttggtatttttctgac

SEQ ID NO: 166893 - DNA, 949 bp, Homo sapiens
  Payload ID: 12853
  Gene Symbol: POGZ
  Gene Name: pogo transposable element with ZNF domain
  ENST ID: ENST00000529669
  CDS Start-End: 1-949
gttcatagtccctatgaatctactaccaagtgcaagatctgtgaatgggcgtttgaaagtgagccactatttctccagcatatgaaggatactcataagcctggagagatgccttatgtttgccagaagagaaatgtttatcactgcaacaaatgccggctgcagtttctctttgccaaggacaaaattgaacacaagcttcaacaccataaaaccttccgtaaacccaagcagctggagggcttgaaaccaggcaccaaggtgacaatccgggcttcccgagggcagccacgaactgttcctgtatcctctaatgatacacctcccagcgccttgcaggaggcagcaccgctgacctcctcaatggaccctctgcctgtcttcctttatccccctgtccagcgcagcatccagaagagagctgttaggaaaatgagtgtcatgggccggcagacatgcctggagtgcagcttcgagatcccagacttccctaatcatttccctacttacgtacactgctctctgtgtcgctatagcacctgctgttctcgagcttatgccaaccacatgatcaacaatcatgttccacggaagagccccaagtatttggctttgtttaaaaattctgtgagtggaatcaagctggcctgcacttcatgtacctttgttacctctgtgggcgatgctatggccaagcatttggtattcaacccctctcacagatccagcagcatcctgccacggggactcacttggatagctcactcaaggcatggccagactcgtgaccgagtgcatgaccggaacgtgaagaatatgtaccctcctccttccttccccactaacaaagctgccactgtgaaatctgcgggggccaccccagctgagcctgaagagctactaactcccttagccccagcactcccatcaccagcctcaactgcaaccc

SEQ ID NO: 166894 - DNA, 586 bp, Homo sapiens
  Payload ID: 12853
  Gene Symbol: POGZ
  Gene Name: pogo transposable element with ZNF domain
  ENST ID: ENST00000533351
  CDS Start-End: 168-586
agactaccggcggcgacgaccacaggagagacggggtttcaccacatctctggtcatggtcatggccaggctggttttgaactcctgacctcaagtgatccacccacctcggcctcccaaagtgctgggattacaggcgtgagccactgcaccggtcctggctaagcatggcggacaccgacctgttcatggaatgtgaggaggaggagttggagccatggcagaaaatcagtgatgtcattgaggactctgtagttgaagattataattcagtggataaaactaccacagtttctgtgagccagcagccagtctcggctccagtgcccatcgctgcccatgcttctgttgctgggcacctctctacatccaccaccgttagtagcagcggggcacagaacagcgacagtacaaagaagactcttgtcacactaattgccaacaacaatgctggcaatcctttggtccagcaaggtggacagccactcatcctgacccagaatccagccccaggtctgggcacaatggttactcaaccagtattgaggcctgttcaggtcatgcagaatgccaatcatgtgactag

SEQ ID NO: 166895 - DNA, 550 bp, Homo sapiens
  Payload ID: 12853
  Gene Symbol: POGZ
  Gene Name: pogo transposable element with ZNF domain
  ENST ID: ENST00000533461
  CDS Start-End: 98-550
tcggctcactgcaccctccgcctcctgggttcaagcgattctcctccttcagcttcctcagtagctgggattacaggcacgcgccaccacacctggcatggcggacaccgacctgttcatggaatgtgaggaggaggagttggagccatggcagaaaatcagtgatgtcattgaggactctgtagttgaagattataattcagtggataaaactaccacagtttctgtgagccagcagccagtctcggctccagtgcccatcgctgcccatgcttctgttgctgggcacctctctacatccaccaccgttagtagcagcggggcacagaacagcgacagtacaaagaagactcttgtcacactaattgccaacaacaatgctggcaatcctttggtccagcaaggtggacagccactcatcctgacccagaatccagccccaggtctgggcacaatggttactcaaccagtattgaggcctgttcaggtcatgcagaatgccaatcatgtgactagttcccctgtggcctcacaaccaatatttatcact

SEQ ID NO: 166896 - DNA, 561 bp, Homo sapiens
  Payload ID: 12853
  Gene Symbol: POGZ
  Gene Name: pogo transposable element with ZNF domain
  ENST ID: ENST00000594456
  CDS Start-End: 1-329
cgaatcccaagctaggtaaggcttcggaagaggagatggcagagccaggttgggatggtgggtggagaacagatgattatcacttggtcaccgtagctccctccttcccctctccacctgcagtgagcattgccagctttgtcactgtgaagcgacctggtgttacaggcgaaaatagcaatgaagtggccaaattggtgaatacccttaacaccatcccttccctgggccagagtcctgggccagtggtggtgtccaacaacagctctgctcatggctctcaaagaaccagcggacctgagtcttcaatgaaaggtacaataacctgaaagactctgagcagccagtcattcaaaaacattaataaagtgtttgttgtatcagagctttatactcagaaatagaaaaataaaataaaatacagctgctgtagtttgttcttacagaaactttagtaaggagaaagccacttacaaaaagtgtaactgaatcagctccaagaaattatgtgtgtaattgtgctttggagattagtgaaattgattgattaaagatgggtga

SEQ ID NO: 166897 - DNA, 3132 bp, Homo sapiens
  Payload ID: 12854
  Gene Symbol: PVR
  Gene Name: poliovirus receptor
  ENST ID: ENST00000187830
  CDS Start-End: 184-318
acttgtctggagcttgaagaagtgggtattccccttcccaccccaggcactggaggagcggccccccggggattccaggacctgagctccgggagctggactcgcagcgaccgcggcagagcgagcgggcgccgggaagcgaggagacgcccgcgggaggcccagctgctcggagcaactggcatggcccgagccatggccgccgcgtggccgctgctgctggtggcgctactggtgctgtcctggccacccccaggaaccggtgcccaacatggaggtgacgcatgtgtcacagctgacttgggcgcggcatggtgaatctggcagcatggccgtcttccaccaaacgcagggccccagctattcggagtccaaacggctggaattcgtggcagccagactgggcgcggagctgcggaatgcctcgctgaggatgttcgggttgcgcgtagaggatgaaggcaactacacctgcctgttcgtcacgttcccgcagggcagcaggagcgtggatatctggctccgagtgcttgccaagccccagaacacagctgaggttcagaaggtccagctcactggagagccagtgcccatggcccgctgcgtctccacagggggtcgcccgccagcccaaatcacctggcactcagacctgggcgggatgcccaatacgagccaggtgccagggttcctgtctggcacagtcactgtcaccagcctctggatattggtgccctcaagccaggtggacggcaagaatgtgacctgcaaggtggagcacgagagctttgagaagcctcagctgctgactgtgaacctcaccgtgtactaccccccagaggtatccatctctggctatgataacaactggtaccttggccagaatgaggccaccctgacctgcgatgctcgcagcaacccagagcccacaggctataattggagcacgaccatgggtcccctgccaccctttgctgtggcccagggcgcccagctcctgatccgtcctgtggacaaaccaatcaacacaactttaatctgcaacgtcaccaatgccctaggagctcgccaggcagaactgaccgtccaggtcaaagagggacctcccagtgagcactcaggcatgtcccgtaacgccatcatcttcctggttctgggaatcctggtttttctgatcctgctggggatcgggatttatttctattggtccaaatgttcccgtgaggtcctttggcactgtcatctgtgtccctcgagtacagagcatgccagcgcctcagctaatgggcatgtctcctattcagctgtgagcagagagaacagctcttcccaggatccacagacagagggcacaaggtgacagcgtcgggactgagaggggagagagactggagctggcaaggacgtgggcctccagagttggacccgaccccaatggatgaagaccccctccaaagagaccagcctccctccctgtgccagacctcaaaacgacgggggcaggtgcaagttcataggtctccaagaccaccctcctttcatttgctagaaggactcactagactcaggaaagctgttaggctcacagttacagtttattacagtaaaaggacagagattaagatcagcaaagggaggaggtgcacagcacacgttccacgacagatgaggcgacggcttccatctgccctctcccagtggagccatataggcagcacctgattctcacagcaacatgtgacaacatgcaagaagtactgccaatactgccaaccagagcagctcactcgagatctttgtgtccagagttttttgtttgtcttgagacagggtctggctctgttggcagactagagtacagtggtgagatcacagttcattgcagccttgacttctcaacgccaagtcatcctcccacctcagcctcctgagtagctatgactacaggtatgtgccaccacgtctggctaatctttttattatttgtaaagtcgaggtttccctgtgttgcccaggctggtcttgaactcttggctccaagtgatacttctgccttggcctcccaaagtgctgaattaagcagctcaccatccacacggctgacctcatacatcaagccaataccgtgtggcccaagacccccaccataaatcacatcattagcatgaaccacccagagtggcccaagactccaagatcagctaccaggcaggatattccaagggcttagagatgaatgcccaggagctgaggataaagggcccgatctttctttgggcaaggttaagcctttactgcatagcagaccacacagaagggtgtgggccaccagagaattttggtaaaaatttggcctctggccttgagcttctaaatctctgtatccgtcagatctctgtggttacaagaaacagccactgaccctggtcaccagaggctgcaattcaggccgcaagcagctgcctggggggtgtccaaggagcagagaaaactactagatgtgaacttgaagaaggttgtcagctgcagccactttctgccagcatctgcagccactttctgccagcatctgcagccagcaagctgggactggcaggaaataacccacaaaagaagcaaatgcaatttccaacacaagggggaagggatgcagggggaggcagcgctgcagttgctcaggacacgctcctataggaccaagatggatgcgacccaagacccaggaggcccagctgctcagtgcaactgacaagttaaaaaggtctatgatcttgagggcagacagcagaattcctcttataaagaaaactgtttgggaaaatacgttgagggagagaagaccttgggccaagatgctaaatgggaatgcaaagcttgagctgctctgcaagagaaaataagcaggacagaggatttgctctggacagagatggaagagccgggaacagagaagtgtggggaagagataggaaccagcaggatggcaggggcaaagggctcaagggtgaggaggccagtgggaccccacagagttggggagataaaggaacattggttgctttggtggcacgtaagctccttgtctgtctccagcacccagaatctcattaaagcttatttattgtacctcca

SEQ ID NO: 166898 - DNA, 3166 bp, Homo sapiens
  Payload ID: 12854
  Gene Symbol: PVR
  Gene Name: poliovirus receptor
  Uniprot ID: P15151
  ENST ID: ENST00000344956
  CDS Start-End: 300-1394
agcgggactgagcgccgggagagacctgcgcaggcgcaggcgcgcggggagggccagcctgggtggcccaccccgcgcctggcgggactggccgccaactcccctccgctccagtcacttgtctggagcttgaagaagtgggtattccccttcccaccccaggcactggaggagcggccccccggggattccaggacctgagctccgggagctggactcgcagcgaccgcggcagagcgagcgggcgccgggaagcgaggagacgcccgcgggaggcccagctgctcggagcaactggcatggcccgagccatggccgccgcgtggccgctgctgctggtggcgctactggtgctgtcctggccacccccaggaaccggggacgtcgtcgtgcaggcgcccacccaggtgcccggcttcttgggcgactccgtgacgctgccctgctacctacaggtgcccaacatggaggtgacgcatgtgtcacagctgacttgggcgcggcatggtgaatctggcagcatggccgtcttccaccaaacgcagggccccagctattcggagtccaaacggctggaattcgtggcagccagactgggcgcggagctgcggaatgcctcgctgaggatgttcgggttgcgcgtagaggatgaaggcaactacacctgcctgttcgtcacgttcccgcagggcagcaggagcgtggatatctggctccgagtgcttgccaagccccagaacacagctgaggttcagaaggtccagctcactggagagccagtgcccatggcccgctgcgtctccacagggggtcgcccgccagcccaaatcacctggcactcagacctgggcgggatgcccaatacgagccaggtgccagggttcctgtctggcacagtcactgtcaccagcctctggatattggtgccctcaagccaggtggacggcaagaatgtgacctgcaaggtggagcacgagagctttgagaagcctcagctgctgactgtgaacctcaccgtgtactaccccccagaggtatccatctctggctatgataacaactggtaccttggccagaatgaggccaccctgacctgcgatgctcgcagcaacccagagcccacaggctataattggagcacgaccatgggtcccctgccaccctttgctgtggcccagggcgcccagctcctgatccgtcctgtggacaaaccaatcaacacaactttaatctgcaacgtcaccaatgccctaggagctcgccaggcagaactgaccgtccaggtcaaaggtacagagcatgccagcgcctcagctaatgggcatgtctcctattcagctgtgagcagagagaacagctcttcccaggatccacagacagagggcacaaggtgacagcgtcgggactgagaggggagagagactggagctggcaaggacgtgggcctccagagttggacccgaccccaatggatgaagaccccctccaaagagaccagcctccctccctgtgccagacctcaaaacgacgggggcaggtgcaagttcataggtctccaagaccaccctcctttcatttgctagaaggactcactagactcaggaaagctgttaggctcacagttacagtttattacagtaaaaggacagagattaagatcagcaaagggaggaggtgcacagcacacgttccacgacagatgaggcgacggcttccatctgccctctcccagtggagccatataggcagcacctgattctcacagcaacatgtgacaacatgcaagaagtactgccaatactgccaaccagagcagctcactcgagatctttgtgtccagagttttttgtttgtcttgagacagggtctggctctgttggcagactagagtacagtggtgagatcacagttcattgcagccttgacttctcaacgccaagtcatcctcccacctcagcctcctgagtagctatgactacaggtatgtgccaccacgtctggctaatctttttattatttgtaaagtcgaggtttccctgtgttgcccaggctggtcttgaactcttggctccaagtgatacttctgccttggcctcccaaagtgctgaattaagcagctcaccatccacacggctgacctcatacatcaagccaataccgtgtggcccaagacccccaccataaatcacatcattagcatgaaccacccagagtggcccaagactccaagatcagctaccaggcaggatattccaagggcttagagatgaatgcccaggagctgaggataaagggcccgatctttctttgggcaaggttaagcctttactgcatagcagaccacacagaagggtgtgggccaccagagaattttggtaaaaatttggcctctggccttgagcttctaaatctctgtatccgtcagatctctgtggttacaagaaacagccactgaccctggtcaccagaggctgcaattcaggccgcaagcagctgcctggggggtgtccaaggagcagagaaaactactagatgtgaacttgaagaaggttgtcagctgcagccactttctgccagcatctgcagccactttctgccagcatctgcagccagcaagctgggactggcaggaaataacccacaaaagaagcaaatgcaatttccaacacaagggggaagggatgcagggggaggcagcgctgcagttgctcaggacacgctcctataggaccaagatggatgcgacccaagacccaggaggcccagctgctcagtgcaactgacaagttaaaaaggtctatgatcttgagggcagacagcagaattcctcttataaagaaaactgtttgggaaaatacgttgagggagagaagaccttgggccaagatgctaaatgggaatgcaaagcttgagctgctctgcaagagaaaataagcaggacagaggatttgctctggacagagatggaagagccgggaacagagaagtgtggggaagagataggaaccagcaggatggcaggggcaaagggctcaagggtgaggaggccagtgggaccccacagagttggggagataaaggaacattggttgctttggtggcacgtaagctccttgtctgtctccagcacccagaatctcattaaagcttatttattgtacctcca

SEQ ID NO: 166899 - DNA, 1344 bp, Homo sapiens
  Payload ID: 12854
  Gene Symbol: PVR
  Gene Name: poliovirus receptor
  ENST ID: ENST00000406449
  CDS Start-End: 1-1179
atggcccgagccatggccgccgcgtggccgctgctgctggtggcgctactggtgctgtcctggccacccccaggaaccggggacgtcgtcgtgcaggcgcccacccaggtgcccggcttcttgggcgactccgtgacgctgccctgctacctacaggtgcccaacatggaggtgacgcatgtgtcacagctgacttgggcgcggcatggtgaatctggcagcatggccgtcttccaccaaacgcagggccccagctattcggagtccaaacggctggaattcgtggcagccagactgggcgcggagctgcggaatgcctcgctgaggatgttcgggttgcgcgtagaggatgaaggcaactacacctgcctgttcgtcacgttcccgcagggcagcaggagcgtggatatctggctccgagtgcttgccaagccccagaacacagctgaggttcagaaggtccagctcactggagagccagtgcccatggcccgctgcgtctccacagggggtcgcccgccagcccaaatcacctggcactcagacctgggcgggatgcccaatacgagccaggtgccagggttcctgtctggcacagtcactgtcaccagcctctggatattggtgccctcaagccaggtggacggcaagaatgtgacctgcaaggtggagcacgagagctttgagaagcctcagctgctgactgtgaacctcaccgtgtactaccccccagaggtatccatctctggctatgataacaactggtaccttggccagaatgaggccaccctgacctgcgatgctcgcagcaacccagagcccacaggctataattggagcacgaccatgggtcccctgccaccctttgctgtggcccagggcgcccagctcctgatccgtcctgtggacaaaccaatcaacacaactttaatctgcaacgtcaccaatgccctaggagctcgccaggcagaactgaccgtccaggtcaaagagggacctcccagtgagcactcaggcatgtcccgtaacgccatcatcttcctggttctgggaatcctggtttttctgatcctgctggggatcgggatttatttctattggtccaaatgttcccgtgaggtcctttggcactgtcatctgtgtccctcgagtgagcatcaccagagctgccgtaattgagcacctactacgggctctgtgctgagtccttccagtgtgcctctcactgaatcctcaccccactgccatgaggtttcccccatttgactgatgagggtgcagagccagggagccttgttcactggttcattgattacatttacaaatattatttacagagtggga

SEQ ID NO: 166900 - DNA, 3078 bp, Homo sapiens
  Payload ID: 12854
  Gene Symbol: PVR
  Gene Name: poliovirus receptor
  Uniprot ID: P15151
  ENST ID: ENST00000403059
  CDS Start-End: 188-1306
agtcacttgtctggagcttgaagaagtgggtattccccttcccaccccaggcactggaggagcggccccccggggattccaggacctgagctccgggagctggactcgcagcgaccgcggcagagcgagcgggcgccgggaagcgaggagacgcccgcgggaggcccagctgctcggagcaactggcatggcccgagccatggccgccgcgtggccgctgctgctggtggcgctactggtgctgtcctggccacccccaggaaccggggacgtcgtcgtgcaggcgcccacccaggtgcccggcttcttgggcgactccgtgacgctgccctgctacctacaggtgcccaacatggaggtgacgcatgtgtcacagctgacttgggcgcggcatggtgaatctggcagcatggccgtcttccaccaaacgcagggccccagctattcggagtccaaacggctggaattcgtggcagccagactgggcgcggagctgcggaatgcctcgctgaggatgttcgggttgcgcgtagaggatgaaggcaactacacctgcctgttcgtcacgttcccgcagggcagcaggagcgtggatatctggctccgagtgcttgccaagccccagaacacagctgaggttcagaaggtccagctcactggagagccagtgcccatggcccgctgcgtctccacagggggtcgcccgccagcccaaatcacctggcactcagacctgggcgggatgcccaatacgagccaggtgccagggttcctgtctggcacagtcactgtcaccagcctctggatattggtgccctcaagccaggtggacggcaagaatgtgacctgcaaggtggagcacgagagctttgagaagcctcagctgctgactgtgaacctcaccgtgtactaccccccagaggtatccatctctggctatgataacaactggtaccttggccagaatgaggccaccctgacctgcgatgctcgcagcaacccagagcccacaggctataattggagcacgaccatgggtcccctgccaccctttgctgtggcccagggcgcccagctcctgatccgtcctgtggacaaaccaatcaacacaactttaatctgcaacgtcaccaatgccctaggagctcgccaggcagaactgaccgtccaggtcaaagagggacctcccagtgagcactcaggtacagagcatgccagcgcctcagctaatgggcatgtctcctattcagctgtgagcagagagaacagctcttcccaggatccacagacagagggcacaaggtgacagcgtcgggactgagaggggagagagactggagctggcaaggacgtgggcctccagagttggacccgaccccaatggatgaagaccccctccaaagagaccagcctccctccctgtgccagacctcaaaacgacgggggcaggtgcaagttcataggtctccaagaccaccctcctttcatttgctagaaggactcactagactcaggaaagctgttaggctcacagttacagtttattacagtaaaaggacagagattaagatcagcaaagggaggaggtgcacagcacacgttccacgacagatgaggcgacggcttccatctgccctctcccagtggagccatataggcagcacctgattctcacagcaacatgtgacaacatgcaagaagtactgccaatactgccaaccagagcagctcactcgagatctttgtgtccagagttttttgtttgtcttgagacagggtctggctctgttggcagactagagtacagtggtgagatcacagttcattgcagccttgacttctcaacgccaagtcatcctcccacctcagcctcctgagtagctatgactacaggtatgtgccaccacgtctggctaatctttttattatttgtaaagtcgaggtttccctgtgttgcccaggctggtcttgaactcttggctccaagtgatacttctgccttggcctcccaaagtgctgaattaagcagctcaccatccacacggctgacctcatacatcaagccaataccgtgtggcccaagacccccaccataaatcacatcattagcatgaaccacccagagtggcccaagactccaagatcagctaccaggcaggatattccaagggcttagagatgaatgcccaggagctgaggataaagggcccgatctttctttgggcaaggttaagcctttactgcatagcagaccacacagaagggtgtgggccaccagagaattttggtaaaaatttggcctctggccttgagcttctaaatctctgtatccgtcagatctctgtggttacaagaaacagccactgaccctggtcaccagaggctgcaattcaggccgcaagcagctgcctggggggtgtccaaggagcagagaaaactactagatgtgaacttgaagaaggttgtcagctgcagccactttctgccagcatctgcagccactttctgccagcatctgcagccagcaagctgggactggcaggaaataacccacaaaagaagcaaatgcaatttccaacacaagggggaagggatgcagggggaggcagcgctgcagttgctcaggacacgctcctataggaccaagatggatgcgacccaagacccaggaggcccagctgctcagtgcaactgacaagttaaaaaggtctatgatcttgagggcagacagcagaattcctcttataaagaaaactgtttgggaaaatacgttgagggagagaagaccttgggccaagatgctaaatgggaatgcaaagcttgagctgctctgcaagagaaaataagcaggacagaggatttgctctggacagagatggaagagccgggaacagagaagtgtggggaagagataggaaccagcaggatggcaggggcaaagggctcaagggtgaggaggccagtgggaccccacagagttggggagataaaggaacattggttgctttggtggcacgtaagctccttgtctgtctccagcacccagaatctcattaaagcttatttattgtacctcca

SEQ ID NO: 166901 - DNA, 3325 bp, Homo sapiens
  Payload ID: 12854
  Gene Symbol: PVR
  Gene Name: poliovirus receptor
  ENST ID: ENST00000425690
  CDS Start-End: 300-1553
agcgggactgagcgccgggagagacctgcgcaggcgcaggcgcgcggggagggccagcctgggtggcccaccccgcgcctggcgggactggccgccaactcccctccgctccagtcacttgtctggagcttgaagaagtgggtattccccttcccaccccaggcactggaggagcggccccccggggattccaggacctgagctccgggagctggactcgcagcgaccgcggcagagcgagcgggcgccgggaagcgaggagacgcccgcgggaggcccagctgctcggagcaactggcatggcccgagccatggccgccgcgtggccgctgctgctggtggcgctactggtgctgtcctggccacccccaggaaccggggacgtcgtcgtgcaggcgcccacccaggtgcccggcttcttgggcgactccgtgacgctgccctgctacctacaggtgcccaacatggaggtgacgcatgtgtcacagctgacttgggcgcggcatggtgaatctggcagcatggccgtcttccaccaaacgcagggccccagctattcggagtccaaacggctggaattcgtggcagccagactgggcgcggagctgcggaatgcctcgctgaggatgttcgggttgcgcgtagaggatgaaggcaactacacctgcctgttcgtcacgttcccgcagggcagcaggagcgtggatatctggctccgagtgcttgccaagccccagaacacagctgaggttcagaaggtccagctcactggagagccagtgcccatggcccgctgcgtctccacagggggtcgcccgccagcccaaatcacctggcactcagacctgggcgggatgcccaatacgagccaggtgccagggttcctgtctggcacagtcactgtcaccagcctctggatattggtgccctcaagccaggtggacggcaagaatgtgacctgcaaggtggagcacgagagctttgagaagcctcagctgctgactgtgaacctcaccgtgtactaccccccagaggtatccatctctggctatgataacaactggtaccttggccagaatgaggccaccctgacctgcgatgctcgcagcaacccagagcccacaggctataattggagcacgaccatgggtcccctgccaccctttgctgtggcccagggcgcccagctcctgatccgtcctgtggacaaaccaatcaacacaactttaatctgcaacgtcaccaatgccctaggagctcgccaggcagaactgaccgtccaggtcaaagagggacctcccagtgagcactcaggcatgtcccgtaacgccatcatcttcctggttctgggaatcctggtttttctgatcctgctggggatcgggatttatttctattggtccaaatgttcccgtgaggtcctttggcactgtcatctgtgtccctcgagtacagagcatgccagcgcctcagctaatgggcatgtctcctattcagctgtgagcagagagaacagctcttcccaggatccacagacagagggcacaaggtgacagcgtcgggactgagaggggagagagactggagctggcaaggacgtgggcctccagagttggacccgaccccaatggatgaagaccccctccaaagagaccagcctccctccctgtgccagacctcaaaacgacgggggcaggtgcaagttcataggtctccaagaccaccctcctttcatttgctagaaggactcactagactcaggaaagctgttaggctcacagttacagtttattacagtaaaaggacagagattaagatcagcaaagggaggaggtgcacagcacacgttccacgacagatgaggcgacggcttccatctgccctctcccagtggagccatataggcagcacctgattctcacagcaacatgtgacaacatgcaagaagtactgccaatactgccaaccagagcagctcactcgagatctttgtgtccagagttttttgtttgtcttgagacagggtctggctctgttggcagactagagtacagtggtgagatcacagttcattgcagccttgacttctcaacgccaagtcatcctcccacctcagcctcctgagtagctatgactacaggtatgtgccaccacgtctggctaatctttttattatttgtaaagtcgaggtttccctgtgttgcccaggctggtcttgaactcttggctccaagtgatacttctgccttggcctcccaaagtgctgaattaagcagctcaccatccacacggctgacctcatacatcaagccaataccgtgtggcccaagacccccaccataaatcacatcattagcatgaaccacccagagtggcccaagactccaagatcagctaccaggcaggatattccaagggcttagagatgaatgcccaggagctgaggataaagggcccgatctttctttgggcaaggttaagcctttactgcatagcagaccacacagaagggtgtgggccaccagagaattttggtaaaaatttggcctctggccttgagcttctaaatctctgtatccgtcagatctctgtggttacaagaaacagccactgaccctggtcaccagaggctgcaattcaggccgcaagcagctgcctggggggtgtccaaggagcagagaaaactactagatgtgaacttgaagaaggttgtcagctgcagccactttctgccagcatctgcagccactttctgccagcatctgcagccagcaagctgggactggcaggaaataacccacaaaagaagcaaatgcaatttccaacacaagggggaagggatgcagggggaggcagcgctgcagttgctcaggacacgctcctataggaccaagatggatgcgacccaagacccaggaggcccagctgctcagtgcaactgacaagttaaaaaggtctatgatcttgagggcagacagcagaattcctcttataaagaaaactgtttgggaaaatacgttgagggagagaagaccttgggccaagatgctaaatgggaatgcaaagcttgagctgctctgcaagagaaaataagcaggacagaggatttgctctggacagagatggaagagccgggaacagagaagtgtggggaagagataggaaccagcaggatggcaggggcaaagggctcaagggtgaggaggccagtgggaccccacagagttggggagataaaggaacattggttgctttggtggcacgtaagctccttgtctgtctccagcacccagaatctcattaaagcttatttattgtacctcca

SEQ ID NO: 166902 - DNA, 356 bp, Homo sapiens
  Payload ID: 12854
  Gene Symbol: PVR
  Gene Name: poliovirus receptor
  ENST ID: ENST00000587785
  CDS Start-End: 1-211
ctgcaaggtggagcacgagagctttgagaagcctcagctgctgactgtgaacctcaccgtgtactaccccccagaggtatccatctctggctatgataacaactggtaccttggccagaatgaggccaccctgacctgcgatgctcgcagcaacccagagcccacaggctataattggagcacgtacagagcatgccagcgcctcagctaatgggcatgtctcctattcagctgtgagcagagagaacagctcttcccaggatccacagacagagggcacaaggtgacagcgtcgggactgagaggggagagagactggagctggcaaggacgtgggcctccagagttggacccga

SEQ ID NO: 166903 - DNA, 1583 bp, Homo sapiens
  Payload ID: 12855
  Gene Symbol: PVRIG
  Gene Name: poliovirus receptor related immunoglobulin domain containing
  Uniprot ID: Q6DKI7
  ENST ID: ENST00000317271
  CDS Start-End: 364-1344
tctgcactgctagggcagaggactgctgtttgctgacacaatcttggtgcgttggaagtgaaagggaagaggcactggtggctgtgctttgggcccgagcagccagaagccagttgccatcacctatgacgaggagacagcgcctggggcagagcccagtatggggcctagccagggctgggttctcacccacctgtgccgccctgccttgttacctggaagcacagccttggggactgagcaggccctcactgtcactttaagaagggaatcagccactttgtgctcaccacctctggggaaggtgtgagaggagagaaggaagtggctgtttggctgctgacaacatgaagacttcctgcgatgagaacagaggcacaggtgccggccctgcagcccccagaacctggactggagggggccatggggcaccggaccctggtcctgccctgggtgctgctgaccttgtgtgtcactgcggggaccccggaggtgtgggttcaagttcggatggaggccaccgagctctcgtccttcaccatccgttgtgggttcctggggtctggctccatctccctggtgactgtgagctgggggggccccaacggtgctggggggaccacgctggctgtgttgcacccagaacgtggcatccggcaatgggcccctgctcgccaggcccgctgggaaacccagagcagcatctctctcatcctggaaggctctggggccagcagcccctgcgccaacaccaccttctgctgcaagtttgcgtccttccctgagggctcctgggaggcctgtgggagcctcccgcccagctcagacccagggctctctgccccgccgactcctgcccccattctgcgggcagacctggccgggatcttgggggtctcaggagtcctcctctttggctgtgtctacctccttcatctgctgcgccgacataagcaccgccctgcccctaggctccagccgtcccgcaccagcccccaggcaccgagagcacgagcatgggcaccaagccaggcctcccaggctgctcttcacgtcccttatgccactatcaacaccagctgccgcccagctactttggacacagctcacccccatggggggccgtcctggtgggcgtcactccccacccacgctgcacaccggccccagggccctgccgcctgggcctccacacccatccctgcacgtggcagctttgtctctgttgagaatggactctacgctcaggcaggggagaggcctcctcacactggtcccggcctcactcttttccctgaccctcgggggcccagggccatggaaggacccttaggagttcgatgagagagaccatgaggccactgggctttccccctcccaggcctcctgggtgtcacccccttactttaattcttgggcctccaataagtgtcccataggtgtctggccaggcccacctgctgcggatgtggtctctgtgtgtgcgtgtgtgggcacaggtgtgagtgtgtgagtgacagttaccccatttcagtcatttcctgctgcaactaagtcagcaacacagtttctctgatgtcggc

SEQ ID NO: 166904 - DNA, 5840 bp, Homo sapiens
  Payload ID: 12856
  Gene Symbol: PVRL1
  Gene Name: poliovirus receptor-related 1 (herpesvirus entry mediator C)
  Uniprot ID: Q15223
  ENST ID: ENST00000264025
  CDS Start-End: 532-2085
cgcagccagagccacccgggccgccgaccgccgagccccgcgcccgccgcctgggccccgagccttctgcgccgcccgggtgcgtcccgccaccctcggaggacggccggccatggacgcctgcaagttggagccgagcgggagggtgtgagcgggccggggccaggagcccgcgccgcgcaaccgggcagccgggcgcgccgggggtgggtccctctccccagccccgctctgcgtggaagaagagggcggggaccggcgccgggaggagagcggaggaggcgaaggggcatgactcgtgcaacttgcggcgggcatctgccgagcctctgagccggcggcggcccggggcccggactgcggccgcgcggatcccacccagcccaccccgccccggccgacggctgcagctgacctggatccttcgagcgcccgccgaccgccagcgatcttccctcatcttccgggctggtttctgctgcgcgaggagcgctgccctcgccgcccctctcgccggacccccggcccccgatggctcggatggggcttgcgggcgccgctggacgctggtggggactcgctctcggcttgaccgcattcttcctcccaggcgtccactcccaggtggtccaggtgaacgactccatgtatggcttcatcggcacagacgtggttctgcactgcagctttgccaacccgcttcccagcgtgaagatcacccaggtcacatggcagaagtccaccaatggctccaagcagaacgtggccatctacaacccatccatgggcgtgtccgtgctggctccctaccgcgagcgtgtggaattcctgcggccctccttcaccgatggcactatccgcctctcccgcctggagctggaggatgagggtgtctacatctgcgagtttgctaccttccctacgggcaatcgagaaagccagctcaatctcacggtgatggccaaacccaccaattggatagagggtacccaggcagtgcttcgagccaagaaggggcaggatgacaaggtcctggtggccacctgcacctcagccaatgggaagcctcccagtgtggtatcctgggaaactcggttaaaaggtgaggcagagtaccaggagatccggaaccccaatggcacagtgacggtcatcagccgctaccgcctggtgcccagcagggaagcccaccagcagtccttggcctgcatcgtcaactaccacatggaccgcttcaaggaaagcctcactctcaacgtgcagtatgagcctgaggtaaccattgaggggtttgatggcaactggtacctgcagcggatggacgtgaagctcacctgcaaagctgatgctaaccccccagccactgagtaccactggaccacgctaaatggctctctccccaagggtgtggaggcccagaacagaaccctcttcttcaagggacccatcaactacagcctggcagggacctacatctgtgaggccaccaaccccatcggtacacgctcaggccaggtggaggtcaatatcacagaattcccctacaccccgtctcctcccgaacatgggcggcgcgccgggccggtgcccacggccatcattgggggcgtggcggggagcatcctgctggtgttgattgtggtcggcgggatcgtggtcgccctgcgtcggcgccggcacaccttcaagggtgactacagcaccaagaagcacgtgtatggcaacggctacagcaaggcaggcatcccccagcaccacccaccaatggcacagaacctgcagtaccccgacgactcagacgacgagaagaaggccggcccactgggtggaagcagctatgaggaggaggaggaggaggaggagggcggtggagggggcgagcgcaaggtgggcggcccccaccccaaatatgacgaggacgccaagcggccctacttcaccgtggatgaggccgaggcccgtcaggacggctacggggaccggactctgggctaccagtacgaccctgagcagctggacttggctgagaacatggtttctcagaacgacgggtctttcatttccaagaaggagtggtacgtgtagccccccttccagagcctctgtctgtgaccgctcctccccagcccctccccgcacgccccctgcccaccccccacctcccactccaggagctgaacagagacttgcccagctgcccaaagccagccccgaactcctggggggccaggggagcccagggcagccacgacttggctttgtgttttatttcctccctctcctccgcccttccccatggtgttgtgttcgactgtggctttagtgttactgtatcttccctttacgggccccacctgcctgccctctgtgtagggagccctgttctcgtcttgtgtacctgggcatccctccagggtttggggagccagcctcccccgcccccctacactggaatttgtttgtgtttcttcactgggggtggagggctcaaggggctctaagagggaaaagctccccacacccccagatgctgctcctcctcccggctagagggaacccaacacccaccagtgaaatctgatgcagctgggagtttggaccttgggtctagacagctggtgcgcccaagaggtagggggaggggtgcggcttctccccagttcccagggagtcttgtttgttaagcggggccttgggcagtgttttcctgctgagggtggttttacattttttttcctcattggcccacagagagtggagttggcctagctctgacgcgtcccctctttatccccaatgtgccccctccattaggggctccaggtgggctccagcccacacttgctctctgcctctgctgacacgtgcacacacacacacatgcacacactgctcctctctgcctgctttcccctggagtcccatgccctgccccatccagacactgcccaaggcccacccgtctatttccacctcattccccctttaagctgagaatggggtctgcctatagaagcttccagagacagctgagactgggtccccggtgcctccaccctaggatctcaggcctgccccaaactgcttcttacagcgtggaggtttctctgatttctcccttatctagcaacacttggttcttttggctagtcagggctgggatcccagggggatccacctgcaggagtcagaggtaaagaagcatccacacggagggtagtggggaaggaagcccacatggcagaagctctgcaaacacagtccgagggactgaggagtccatacaatgcctcacacacaaaggccattgtcaaagcctcgggcctggcagaaagtgaggggggtggggccgctaggccacctcctgctcagccacccctggtcctcattctgggatgaggggagggcctaggagaagccctccctttcagtgcagattcccttcttgaatgggacattgagttcctatcagccaccccagactgggtcttcccatgtatataatggaggaagacccctcccagccctctcagtcccccagctcaaagtgcctcagttcctccatctgctcccagatcccctggcactctagacaggcatgcccatgggaaggaccctgggatggagaggcaggcttcgcggcccttcatgcctgcccactgggattccagttaactcaccccagggtgtcaggggctctgcaggatggcaagtgttggggaggagggaggcagaccactctgtgccccacgggcactgacccaccctgccataggcttcctaagggagccccccaacccctcccctcccctccctggtgctgctattgaaccccctgccagctccatttctgccctggcaaccctgggcccagcaggtgggtcgtcgttgtctggccctcactgccctggccccagcccaggctgcccagtagccacgtagcagaagtctgaagccatgccagccctggtgcggctctcccctctacacatttggggtactggatagggtgaagttaggggagaaaattgtggagtctttccagccacagggcagagggaggtggaggagctgggctgcttttcccagcagtattagtgtcccccaggacaggggaccttttccacattacatcactgccccatcccaccttacaacactctggcccctctgcttggtccccttttcccccaggcaggaggcaatcccaggggcctgcctgatagaggcatttcctgtccctgtctcctcctgcatctcctttatcctgcactgccaccctctattccccattctgtgttggactttgaaggccccaagcccagccaaagcactgagttcccccttaagacacctccacaccctccccacaagcaaagcacaaattttggggtccatgtagcatgggccacgtaggaggctcctgacttgccaggggcccagcctcagcatacccaccgagcagctgccagcctgggctgagggtgggcatgaggcaggagtcagcacttggacctagggatgtgaggttttctgtgccccaagtttgtgggaaggtgggcactactgctgggcccacagacacagccagctggcaaaagggaggtctagcccagcagagagatgaggacattttgcttctccttcatgcccacagcatgagctgagcttctgctttgctggaaatgaaataaacttggtatgaattgtgccaaggcctccccagttgtcatcctgcctcttgttgccctccctgtccttgccccccaccccacacccatgcccctgtttccttacagattttgatattgttctaatgtgtaatagaaccagccgagtccccttttatcagaagggtctgaaaagcagcagcacagagtaggtgaacacaggcctgcaagtgcgaccacctcagacccagtacgtgtgcccacagtggacacactcacacctccaacacacccacgcgcaggcatgtgtacacgcatgtacacacgcatgcatgcacagccagatggccactcagcacagatgtggcagagggaatggtctgatcctgctgaaagccattaaggagaaacgaatttcccagtgcccgggctgcaagagagccttataggggccctgtttcctgggcatgcgcttcctctgccagccaacccccacttgcccaagtcactggtgcaataacttttctgccttcctcagagcagagaaattgggaattgtgttaggtgggtgtgggcagctctgctgagccaagcagacacggatgtcccctcttctgggaggagggtagtgctcccaggcctcaggagtccagacagagacccccaaagcctgactgccaacagaaaccctctcctagtgaggggcaggtgggtgtgccccaggtccccacacccacagggaggcttcacacactgcccagtaccggggatgccaggaggcaggcccctctgctgctgccactgctgccaacactgcccagcttgtgaggccaggaggagcccctgtcccactcggtgctgctgctcttctgacccctgctgtgaggaatgggattcttggtcgaaaaaattggttttccttttttgtataaatgaaaagaatccaggagaagctgccaccctcccctcccagcgtgatgcgctaccttgcttcggcgtcttgtcgccctttccgcctttggtccagggacagcccagcagatcctcctggttctgacctggggggtgtttgcatcacccccttttacttgtattaaaaaaaaatgatgggttgaaaatgtactgaggattaaaaatgtacttttttataaataaagtgtttaaaacaaa

SEQ ID NO: 166905 - DNA, 1377 bp, Homo sapiens
  Payload ID: 12856
  Gene Symbol: PVRL1
  Gene Name: poliovirus receptor-related 1 (herpesvirus entry mediator C)
  Uniprot ID: Q15223
  ENST ID: ENST00000341398
  CDS Start-End: 1-1377
atggctcggatggggcttgcgggcgccgctggacgctggtggggactcgctctcggcttgaccgcattcttcctcccaggcgtccactcccaggtggtccaggtgaacgactccatgtatggcttcatcggcacagacgtggttctgcactgcagctttgccaacccgcttcccagcgtgaagatcacccaggtcacatggcagaagtccaccaatggctccaagcagaacgtggccatctacaacccatccatgggcgtgtccgtgctggctccctaccgcgagcgtgtggaattcctgcggccctccttcaccgatggcactatccgcctctcccgcctggagctggaggatgagggtgtctacatctgcgagtttgctaccttccctacgggcaatcgagaaagccagctcaatctcacggtgatggccaaacccaccaattggatagagggtacccaggcagtgcttcgagccaagaaggggcaggatgacaaggtcctggtggccacctgcacctcagccaatgggaagcctcccagtgtggtatcctgggaaactcggttaaaaggtgaggcagagtaccaggagatccggaaccccaatggcacagtgacggtcatcagccgctaccgcctggtgcccagcagggaagcccaccagcagtccttggcctgcatcgtcaactaccacatggaccgcttcaaggaaagcctcactctcaacgtgcagtatgagcctgaggtaaccattgaggggtttgatggcaactggtacctgcagcggatggacgtgaagctcacctgcaaagctgatgctaaccccccagccactgagtaccactggaccacgctaaatggctctctccccaagggtgtggaggcccagaacagaaccctcttcttcaagggacccatcaactacagcctggcagggacctacatctgtgaggccaccaaccccatcggtacacgctcaggccaggtggaggtcaatatcacagaaaagccccgcccccagaggggtctgggaagtgcagccaggctcctggcgggcaccgtggccgtgttcctcatcctagttgctgtgctcactgtcttcttcctgtacaaccggcagcagaagagcccaccggagacggatggggccgggaccgaccagcccctctcccagaagccggagccttctcccagcaggcaaagctcccttgtgcctgaggatatccaggttgtccacctggacccagggaggcagcagcagcaagaagaggaggacttgcagaagctgtccctgcagcccccctactatgatctgggggtctccccctcctaccacccctcggtaaggacaaccgaacctcgaggagagtgcccctag

SEQ ID NO: 166906 - DNA, 1059 bp, Homo sapiens
  Payload ID: 12856
  Gene Symbol: PVRL1
  Gene Name: poliovirus receptor-related 1 (herpesvirus entry mediator C)
  Uniprot ID: Q15223
  ENST ID: ENST00000340882
  CDS Start-End: 1-1059
atggctcggatggggcttgcgggcgccgctggacgctggtggggactcgctctcggcttgaccgcattcttcctcccaggcgtccactcccaggtggtccaggtgaacgactccatgtatggcttcatcggcacagacgtggttctgcactgcagctttgccaacccgcttcccagcgtgaagatcacccaggtcacatggcagaagtccaccaatggctccaagcagaacgtggccatctacaacccatccatgggcgtgtccgtgctggctccctaccgcgagcgtgtggaattcctgcggccctccttcaccgatggcactatccgcctctcccgcctggagctggaggatgagggtgtctacatctgcgagtttgctaccttccctacgggcaatcgagaaagccagctcaatctcacggtgatggccaaacccaccaattggatagagggtacccaggcagtgcttcgagccaagaaggggcaggatgacaaggtcctggtggccacctgcacctcagccaatgggaagcctcccagtgtggtatcctgggaaactcggttaaaaggtgaggcagagtaccaggagatccggaaccccaatggcacagtgacggtcatcagccgctaccgcctggtgcccagcagggaagcccaccagcagtccttggcctgcatcgtcaactaccacatggaccgcttcaaggaaagcctcactctcaacgtgcagtatgagcctgaggtaaccattgaggggtttgatggcaactggtacctgcagcggatggacgtgaagctcacctgcaaagctgatgctaaccccccagccactgagtaccactggaccacgctaaatggctctctccccaagggtgtggaggcccagaacagaaccctcttcttcaagggacccatcaactacagcctggcagggacctacatctgtgaggccaccaaccccatcggtacacgctcaggccaggtggaggtcaatatcacagctttctgtcaacttatctatccgggcaaagggaggacaagagctaggatgttctga

SEQ ID NO: 166907 - DNA, 2466 bp, Homo sapiens
  Payload ID: 12857
  Gene Symbol: PVRL2
  Gene Name: poliovirus receptor-related 2 (herpesvirus entry mediator B)
  Uniprot ID: Q92692
  ENST ID: ENST00000252483
  CDS Start-End: 1-1617
atggcccgggccgctgccctcctgccgtcgagatcgccgccgacgccgctgctgtggccgctgctgctgctgctgctcctggaaaccggagcccaggatgtgcgagttcaagtgctacccgaggtgcgaggccagctcgggggcaccgtggagctgccgtgccacctgctgccacctgttcctggactgtacatctccctggtgacctggcagcgcccagatgcacctgcgaaccaccagaatgtggccgccttccaccctaagatgggtcccagcttccccagcccgaagcctggcagcgagcggctgtccttcgtctctgccaagcagagcactgggcaagacacagaggcagagctccaggacgccacgctggccctccacgggctcacggtggaggacgagggcaactacacttgcgagtttgccaccttccccaaggggtccgtccgagggatgacctggctcagagtcatagccaagcccaagaaccaagctgaggcccagaaggtcacgttcagccaggaccctacgacagtggccctctgcatctccaaagagggccgcccacctgcccggatctcctggctctcatccctggactgggaagccaaagagactcaggtgtcagggaccctggccggaactgtcactgtcaccagccgcttcaccttggtgccctcgggccgagcagatggtgtcacggtcacctgcaaagtggagcatgagagcttcgaggaaccagccctgatacctgtgaccctctctgtacgctaccctcctgaagtgtccatctccggctatgatgacaactggtacctcggccgtactgatgccaccctgagctgtgacgtccgcagcaacccagagcccacgggctatgactggagcacgacctcaggcaccttcccgacctccgcagtggcccagggctcccagctggtcatccacgcagtggacagtctgttcaataccaccttcgtctgcacagtcaccaatgccgtgggcatgggccgcgctgagcaggtcatctttgtccgagagacccccaacacagcaggcgcaggggccacaggcggcatcatcgggggcatcatcgccgccatcattgctactgctgtggctgccacgggcatccttatctgccggcagcagcggaaggagcagacgctgcagggggcagaggaggacgaagacctggagggacctccctcctacaagccaccgaccccaaaagcgaagctggaggcacaggagatgccctcccagctcttcactctgggggcctcggagcacagcccactcaagaccccctactttgatgctggcgcctcatgcactgagcaggaaatgcctcgataccatgagctgcccaccttggaagaacggtcaggacccttgcaccctggagccacaagcctggggtcccccatcccggtgcctccagggccacctgctgtggaagacgtttccctggatctagaggatgaggagggggaggaggaggaagagtatctggacaagatcaaccccatctatgatgctctgtcctatagcagcccctctgattcctaccagggcaaaggctttgtcatgtcccgggccatgtatgtgtgagctgccatgcgcctggcgtctcacatctcacctgttgatcccttagctttcttgccaaggatctagtgccccctgacctctggccaggccactgtcagttaacacatatgcattccatttgtgatgtctaccttggtggctccactatgacccctaacccatgagcccagagaaattcaccgtgataatggaatcctggcaaccttatctcatgaggcaggaggtggggaaggtgcttctgcacaacctctgatcccaaggactcctctcccagactgtgaccttagaccatacctctcaccccccaatgcctcgactcccccaaaatcacaaagaagaccctagacctataatttgtcttcaggtagtaaattcccaataggtctgctggagtgggcgctgagggctccctgctgctcagacctgagccctccaggcagcagggtcccacttaccccctccccaccctgttccccaaaggtgggaaagaggggattccccagcccaaggcagggttttcccagcaccctcctgtaagcagaagtctcagggtccagacccttccctgagcccccacccccaccccaattcctgcctaccaagcaagcagccccagcctagggtcagacagggtgagcctcatacagactgtgccttgatggccccagccttgggagaagaatttactgttaacctggaagactactgaatcattttacccttgcccagtggaataggacctaaacatcccccttccggggaaagtgggtcatctgaattgggggtagcaattgatactgttttgtaaactacatttcctacaaaatatgaatttatactttgaccagg

SEQ ID NO: 166908 - DNA, 2112 bp, Homo sapiens
  Payload ID: 12857
  Gene Symbol: PVRL2
  Gene Name: poliovirus receptor-related 2 (herpesvirus entry mediator B)
  Uniprot ID: Q92692
  ENST ID: ENST00000252485
  CDS Start-End: 352-1791
gagcgagaatggaatcccggggaggaacaggggtggaatccggggggcggggtcagaacgccaggagggggcggggccggagccagggtcggcttgactcgggggagcagcgggtggatcctgtgacgtcagcgggttcgaaccgccggagctgagcgagaggccgggggtgccgagccgggcggggagagctgggccgggagagcagaacagggaggctagagcgcagcgggaaccggcccggagccggagccggagccccacaggcacctactaaaccgcccagccgatcggcccccacagagtggcccgcgggcctccggccgggcccagtcccctcccgggccctccatggcccgggccgctgccctcctgccgtcgagatcgccgccgacgccgctgctgtggccgctgctgctgctgctgctcctggaaaccggagcccaggatgtgcgagttcaagtgctacccgaggtgcgaggccagctcgggggcaccgtggagctgccgtgccacctgctgccacctgttcctggactgtacatctccctggtgacctggcagcgcccagatgcacctgcgaaccaccagaatgtggccgccttccaccctaagatgggtcccagcttccccagcccgaagcctggcagcgagcggctgtccttcgtctctgccaagcagagcactgggcaagacacagaggcagagctccaggacgccacgctggccctccacgggctcacggtggaggacgagggcaactacacttgcgagtttgccaccttccccaaggggtccgtccgagggatgacctggctcagagtcatagccaagcccaagaaccaagctgaggcccagaaggtcacgttcagccaggaccctacgacagtggccctctgcatctccaaagagggccgcccacctgcccggatctcctggctctcatccctggactgggaagccaaagagactcaggtgtcagggaccctggccggaactgtcactgtcaccagccgcttcaccttggtgccctcgggccgagcagatggtgtcacggtcacctgcaaagtggagcatgagagcttcgaggaaccagccctgatacctgtgaccctctctgtacgctaccctcctgaagtgtccatctccggctatgatgacaactggtacctcggccgtactgatgccaccctgagctgtgacgtccgcagcaacccagagcccacgggctatgactggagcacgacctcaggcaccttcccgacctccgcagtggcccagggctcccagctggtcatccacgcagtggacagtctgttcaataccaccttcgtctgcacagtcaccaatgccgtgggcatgggccgcgctgagcaggtcatctttgtccgagaaacccccagggcctcgccccgagatgtgggcccgctggtgtggggggccgtgggggggacactgctggtgctgctgcttctggctggggggtccttggccttcatcctgctgagggtgaggaggaggaggaagagccctggaggagcaggaggaggagccagtggcgacgggggattctacgatccgaaagctcaggtgttgggaaatggggaccccgtcttctggacaccagtagtccctggtcccatggaaccagatggcaaggatgaggaggaggaggaggaggaagagaaggcagagaaaggcctcatgttgcctccacccccagcactcgaggatgacatggagtcccagctggacggctccctcatctcacggcgggcagtttatgtgtgacctggacacagacagagacagagccaggcccggccctcccgcccccgacctgaccacgccggcctagggttccagactggttggacttgttcgtctggacgacactggagtggaacactgcctcccactttcttgggacttggagggaggtggaacagcacactggacttctcccgtctctagggctgcatggggagcccggggagctgagtagtggggatccagagaggacccccgcccccagagacttggttttggctccagccttcccctggccccgtgacactcaggagttaataaatgccttggaggaaaacatca

SEQ ID NO: 166909 - DNA, 650 bp, Homo sapiens
  Payload ID: 12857
  Gene Symbol: PVRL2
  Gene Name: poliovirus receptor-related 2 (herpesvirus entry mediator B)
  ENST ID: ENST00000585601
  CDS Start-End: 1-171
gtcatccacgcagtggacagtctgttcaataccaccttcgtctgcacagtcaccaatgccgtgggcatgggccgcgctgagcaggaggaggagccagtggcgacgggggattctacgatccgaaagctcaggtgttgggaaatggggaccccgtcttctggacaccagtagtccctggtcccatggaaccagatggcaaggatgaggaggaggaggaggaggaagagaaggcagagaaaggcctcatgttgcctccacccccagcactcgaggatgacatggagtcccagctggacggctccctcatctcacggcgggcagtttatgtgtgacctggacacagacagagacagagccaggcccggccctcccgcccccgacctgaccacgccggcctagggttccagactggttggacttgttcgtctggacgacactggagtggaacactgcctcccactttcttgggacttggagggaggtggaacagcacactggacttctcccgtctctagggctgcatggggagcccggggagctgagtagtggggatccagagaggacccccgcccccagagacttggttttggctccagccttcccctggccccgtgacactcaggagttaataaatgccttggaggaaaaca

SEQ ID NO: 166910 - DNA, 950 bp, Homo sapiens
  Payload ID: 12857
  Gene Symbol: PVRL2
  Gene Name: poliovirus receptor-related 2 (herpesvirus entry mediator B)
  ENST ID: ENST00000591581
  CDS Start-End: 1-632
ccaagcccaagaaccaagctgaggcccagaaggtcacgttcagccaggaccctacgacagtggccctctgcatctccaaagagggccgcccacctgcccggatctcctggctctcatccctggactgggaagccaaagagactcaggtgtcagggaccctggccggaactgtcactgtcaccagccgcttcaccttggtgccctcgggccgagcagatggtgtcacggtcacctgcaaagtggagcatgagagcttcgaggaaccagccctgatacctgtgaccctctctgtacgctaccctcctgaagtgtccatctccggctatgatgacaactggtacctcggccgtactgatgccaccctgagctgtgacgtccgcagcaacccagagcccacgggctatgactggagcacgacctcaggcaccttcccgacctccgcagtggcccagggctcccagctggtcatccacgcagtggacagtctgttcaataccaccttcgtctgcacagtcaccaatgccgtgggcatgggccgcgctgagcaggtcatctttgtccgagcactcgaggatgacatggagtcccagctggacggctccctcatctcacggcgggcagtttatgtgtgacctggacacagacagagacagagccaggcccggccctcccgcccccgacctgaccacgccggcctagggttccagactggttggacttgttcgtctggacgacactggagtggaacactgcctcccactttcttgggacttggagggaggtggaacagcacactggacttctcccgtctctagggctgcatggggagcccggggagctgagtagtggggatccagagaggacccccgcccccagagacttggttttggctccagccttcccctggccccgtgacactcaggagttaataaatgccttggaggaaaaca

SEQ ID NO: 166911 - DNA, 812 bp, Homo sapiens
  Payload ID: 12857
  Gene Symbol: PVRL2
  Gene Name: poliovirus receptor-related 2 (herpesvirus entry mediator B)
  ENST ID: ENST00000592018
  CDS Start-End: 1-163
gctgcagggggcagaggaggacgaagagaaatgcctcgataccatgagctgcccaccttggaagaacggtcaggacccttgcaccctggagccacaagcctggggtcccccatcccggtgcctccagggccacctgctgtggaagacgtttccctggatctagaggatgaggagggggaggaggaggaagagtatctggacaagatcaaccccatctatgatgctctgtcctatagcagcccctctgattcctaccagggcaaaggctttgtcatgtcccgggccatgtatgtgtgagctgccatgcgcctggcgtctcacatctcacctgttgatcccttagctttcttgccaaggatctagtgccccctgacctctggccaggccactgtcagttaacacatatgcattccatttgtgatgtctaccttggtggctccactatgacccctaacccatgagcccagagaaattcaccgtgataatggaatcctggcaaccttatctcatgaggcaggaggtggggaaggtgcttctgcacaacctctgatcccaaggactcctctcccagactgtgaccttagaccatacctctcaccccccaatgcctcgactcccccaaaatcacaaagaagaccctagacctataatttgtcttcaggtagtaaattcccaataggtctgctggagtgggcgctgagggctccctgctgctcagacctgagccctccaggcagcagggtcccacttaccccctccccaccctgttccccaaaggtgggaaagaggggattccccagcccaaggcaggg

SEQ ID NO: 166912 - DNA, 1549 bp, Homo sapiens
  Payload ID: 12858
  Gene Symbol: PVRL3
  Gene Name: poliovirus receptor-related 3
  Uniprot ID: Q9NQS3
  ENST ID: ENST00000319792
  CDS Start-End: 151-1251
ggccaagtgtcagccggcagcgacggcgctagagctgggagctggggacgcgcgcgccggaccttccacagcctccgcccagagcctgaggcgccggggccgggggagccggggggcgggcgggcgagcgggccggggggagggtgggggatggcgcggaccctgcggccgtccccgctgtgtcctggaggcggcaaagcacaactttcctccgcttctctcctcggagccgggctcctgctgcagcccccgacgccacctccgctgctgctgctgctcttcccgctgctgctcttctccaggctctgtggtgccttagctggaccaattattgtggagccacatgtcacagcagtatggggaaagaatgtttcattaaagtgtttaattgaagtaaatgaaaccataacacagatttcatgggagaagatacatggcaaaagttcacagactgttgcagttcaccatccccaatatggattctctgttcaaggagaatatcagggaagagtcttgtttaaaaattactcacttaatgatgcaacaattactctgcataacataggattctctgattctggaaaatacatctgcaaagctgttacattcccgcttggaaatgcccagtcctctacaactgtaactgtgttagttgaacccactgtgagcctgataaaagggccagattctttaattgatggaggaaatgaaacagtagcagccatttgcatcgcagccactggaaaacccgttgcacatattgactgggaaggtgatcttggtgaaatggaatccactacaacttcttttccaaatgaaacggcaacgattatcagccagtacaagctatttccaaccagatttgctagaggaaggcgaattacttgtgttgtaaaacatccagccttggaaaaggacatccgatactctttcatattagacatacagtatgctcctgaagtttcggtaacaggatatgatggaaattggtttgtaggaagaaaaggtgttaatctcaaatgtaatgctgatgcaaatccaccacccttcaaatctgtgtggagcaggttggatggacaatggcctgatggtttattggcttcagacaatactcttcattttgtccatccattgactttcaattattctggtgtttatatctgtaaagtgaccaattcccttggtcaaagaagtgaccaaaaagtcatctacatttcagcctacaattcagtggcatccctcaactgctgacatcgaggatctagcaacagaacctaaaaaattgcccttcccattgtcaactttggcaacaattaaggatgacacaattgccacgatcattgctagtgtagtgggtggggctctcttcatagtacttgtaagtgttttggctggaatattctgctataggagaagacggacgtttcgtggagactactttgccaagaactacattccaccatcagatatgcaaaaagaatcacaaatagatgttcttcaacaagatgagcttgattcttacccagacagtgtaaaaaaagaaaacaaa

SEQ ID NO: 166913 - DNA, 732 bp, Homo sapiens
  Payload ID: 12858
  Gene Symbol: PVRL3
  Gene Name: poliovirus receptor-related 3
  ENST ID: ENST00000486596
  CDS Start-End: 1-732
ggcgcggaccctgcggccgtccccgctgtgtcctggaggcggcaaagcacaactttcctccgcttctctcctcggagccgggctcctgctgcagcccccgacgccacctccgctgctgctgctgctcttcccgctgctgctcttctccaggctctgtggtgccttagctggaccaattattgtggagccacatgtcacagcagtatggggaaagaatgtttcattaaagtgtttaattgaagtaaatgaaaccataacacagatttcatgggagaagatacatggcaaaagttcacagactgttgcagttcaccatccccaatatggattctctgttcaaggagaatatcagggaagagtcttgtttaaaaattactcacttaatgatgcaacaattactctgcataacataggattctctgattctggaaaatacatctgcaaagctgttacattcccgcttggaaatgcccagtcctctacaactgtaactgtgttagatgctcctgaagtttcggtaacaggatatgatggaaattggtttgtaggaagaaaaggtgttaatctcaaatgtaatgctgatgcaaatccaccacccttcaaatctgtgtggagcaggttggatggacaatggcctgatggtttattggcttcagacaatactcttcattttgtccatccattgactttcaattattctggtgtttatatctgtaaagtgaccaattccct

SEQ ID NO: 166914 - DNA, 3664 bp, Homo sapiens
  Payload ID: 12858
  Gene Symbol: PVRL3
  Gene Name: poliovirus receptor-related 3
  Uniprot ID: Q9NQS3
  ENST ID: ENST00000485303
  CDS Start-End: 276-1925
agttcccaggagttcgacgcgggcgggtgccgaggggaggggagtggcggcggcggcgggcggctcccgcttcagcctcggcagtggcgtcggcgacggcggtgtcgaggcagccgccagcgttcggccaagtgtcagccggcagcgacggcgctagagctgggagctggggacgcgcgcgccggaccttccacagcctccgcccagagcctgaggcgccggggccgggggagccggggggcgggcgggcgagcgggccggggggagggtgggggatggcgcggaccctgcggccgtccccgctgtgtcctggaggcggcaaagcacaactttcctccgcttctctcctcggagccgggctcctgctgcagcccccgacgccacctccgctgctgctgctgctcttcccgctgctgctcttctccaggctctgtggtgccttagctggaccaattattgtggagccacatgtcacagcagtatggggaaagaatgtttcattaaagtgtttaattgaagtaaatgaaaccataacacagatttcatgggagaagatacatggcaaaagttcacagactgttgcagttcaccatccccaatatggattctctgttcaaggagaatatcagggaagagtcttgtttaaaaattactcacttaatgatgcaacaattactctgcataacataggattctctgattctggaaaatacatctgcaaagctgttacattcccgcttggaaatgcccagtcctctacaactgtaactgtgttagttgaacccactgtgagcctgataaaagggccagattctttaattgatggaggaaatgaaacagtagcagccatttgcatcgcagccactggaaaacccgttgcacatattgactgggaaggtgatcttggtgaaatggaatccactacaacttcttttccaaatgaaacggcaacgattatcagccagtacaagctatttccaaccagatttgctagaggaaggcgaattacttgtgttgtaaaacatccagccttggaaaaggacatccgatactctttcatattagacatacagtatgctcctgaagtttcggtaacaggatatgatggaaattggtttgtaggaagaaaaggtgttaatctcaaatgtaatgctgatgcaaatccaccacccttcaaatctgtgtggagcaggttggatggacaatggcctgatggtttattggcttcagacaatactcttcattttgtccatccattgactttcaattattctggtgtttatatctgtaaagtgaccaattcccttggtcaaagaagtgaccaaaaagtcatctacatttcagatcctcctactactaccacccttcagcctacaattcagtggcatccctcaactgctgacatcgaggatctagcaacagaacctaaaaaattgcccttcccattgtcaactttggcaacaattaaggatgacacaattgccacgatcattgctagtgtagtgggtggggctctcttcatagtacttgtaagtgttttggctggaatattctgctataggagaagacggacgtttcgtggagactactttgccaagaactacattccaccatcagatatgcaaaaagaatcacaaatagatgttcttcaacaagatgagcttgattcttacccagacagtgtaaaaaaagaaaacaaaaatccagtgaacaatctaatacgtaaagactatttagaagagcctgaaaaaactcagtggaacaatgtagaaaatctcaataggtttgaaagaccaatggattattatgaagatctaaaaatgggaatgaagtttgtcagtgatgaacattatgatgaaaacgaagatgacttagtttcacatgtagatggttccgtaatttccaggagggagtggtatgtttagcaaccactgaatgtgacttaactatgtacaatgttcattcacactagttgatcattttcagattgttcatactttttcttgaggaagaataagctttttcaagttgattttcaagcttactttttatattctaatctgacaaatgaaaatgtaaaatctgagttcagtgtatctaagctgctttacaattttttttcaatgctgtactactgtctcaagatttaaattttaatgcagagtactttattggtgtgaggcacacaggtaagaagaaatgtcaacattaaatgtatgacttacttggtacaaaaattttttaaaaagggaactaccttgacattgtgtattaaatgtttacctaagactataatctcaagtatgatgtttgtttaacatatacctctcaaaatttatcaccactcaatgacactgcatcaaaattgactataaaactaattcaagaaatatttatatatattttttaatatacaaaaaatatttagcctgatggaatggctttccttttcaaacattattttctaagtttctatacaaatgaaatctttacctctgcatattaatgagccttgccataattactgtagagtggcttttcaaagatattttgttgcactaaaactgtggtagtaaactcagtgaacatgatgtgtggaagagcataattagctggtcaatatttttgtccaaaatacctgcaagagtaataaaatacatacctttcaaacatgataattattagtttttttttttcctttctggaacatggattttggtacattagcagtagccttattttaatgctttatgtcctaaacatactaatagaaatgaaaagacgcagagagagcatttcggaatactgaagtactagttttagaaatgagactttcagccaacaatctatagaaagaattttatggaccatcttgttttagttatttaatgttgatgttgttcaaatgggtaaatgtacagaaagaaaattttagagtaaacttggaactttggatataactagaaaaaactagattatagaattagtcggtaacacttgctaatggacattggcattcatctcctttttcctcctaagtgtatgtatgtgttttaagatttctgtttttacgattaaaactggaaacatgaggttttttgtttttgtttttttacataattacatatattccttctgaatcatttatcttttgagaaagaaatgttacctaaacttcaaatgtgctttttgtttgtgaggtaattaaattgcttctacagtggaggcttacaaaattattgtgacaactattttgaagctgaaaggatagtttttctattgctaagtcatttgaaaaagtgaccattttgccagtgaaatgaagtggaagttagtaggagaatcataaattaaatatattattttgttaataaaaaggcaaagtagtaggtactttttaaaccctcccaaccagccctttctcaatattcatcaaatctaaaacatttagggggcaaaattctaacatgttcatggtatcttgcaaatagtgaaagctttattctgaaggattataaactagttttcttcattttaactagcactattttgtggaaattagaaacctcttttatttctcttcccaaaagtaatacttattataaggctgtagtatcaggttaaggatacagataaataaagttcacttatatcttcttacaaa

SEQ ID NO: 166915 - DNA, 586 bp, Homo sapiens
  Payload ID: 12858
  Gene Symbol: PVRL3
  Gene Name: poliovirus receptor-related 3
  ENST ID: ENST00000461477
  CDS Start-End: 197-586
ataagtgcatcttgagaataggtgatagaaagccttggctgcaggagacaagcttacaggggacgacagaggcagacaggcacagggagggagggaagaggaaagggctggagggaaaaaggcactagaccgagcgctgggagactggaagggaggcagaagttaagaaagaaaaaagaggtgggcagggtgtagaatggcttgtagccttggaggtgccttagctggaccaattattgtggagccacatgtcacagcagtatggggaaagaatgtttcattaaagtgtttaattgaagtaaatgaaaccataacacagatttcatgggagaagatacatggcaaaagttcacagactgttgcagttcaccatccccaatatggattctctgttcaaggagaatatcagggaagagtcttgtttaaaaattactcacttaatgatgcaacaattactctgcataacataggattctctgattctggaaaatacatctgcaaagctgttacattcccgcttggaaatgcccagtcctctacaactgtaactgtgttagttgaacccactgtgagcctgataaaaggg

SEQ ID NO: 166916 - DNA, 564 bp, Homo sapiens
  Payload ID: 12858
  Gene Symbol: PVRL3
  Gene Name: poliovirus receptor-related 3
  ENST ID: ENST00000491525
  CDS Start-End: 513-564
atcatcaggggatctcccggagcgatgcaggacaaggtgccttagctggaccaattattgtggagccacatgtcacagcagtatggggaaagaatgtttcattaaagtgtttaattgaagtaaatgaaaccataacacagatttcatgggagaagatacatggcaaaagttcacagactgttgcagttcaccatccccaatatggattctctgttcaaggagaatatcagggaagagtcttgtttaaaaattactcacttaatgatgcaacaattactctgcataacataggattctctgattctggaaaatacatctgcaaagctgttacattcccgcttggaaatgcccagtcctctacaactgtaactgtgttagttgaacccactgtgagcctgataaaagggccagattctttaattgatggaggaaatgaaacagtagcagccatttgcatcgcagccactggaaaacccgttgcacatattgactgggaaggtgatcttggtgaaatggaatccactacaacttcttttccaaatgaaacggcaacgattatcagcc

SEQ ID NO: 166917 - DNA, 314 bp, Homo sapiens
  Payload ID: 12858
  Gene Symbol: PVRL3
  Gene Name: poliovirus receptor-related 3
  ENST ID: ENST00000485506
  CDS Start-End: 1-96
cctgaacacttgcctttgcagactcagttcaaagaaagagaagttggcaatcttcagcactctacttactataatcctgggacaaaaacacattaagaggaagatggatcaatagttctcaaaggaaaaagatggcagcaacctataagaagatctgagcttctaggaatgatgggctattttttctatttttcagagacttttatagcttataaatacttatcagaagaaattagttccacagaatgacagtgaagttgtgatcacatcccaccaaattgtaattttatatccccttccttcaccaaggttaa

SEQ ID NO: 166918 - DNA, 530 bp, Homo sapiens
  Payload ID: 12858
  Gene Symbol: PVRL3
  Gene Name: poliovirus receptor-related 3
  ENST ID: ENST00000481766
  CDS Start-End: 26-530
ttgtgacttatggaagcttagtggtatggaagcaaaattttcttcaatatggcatccaggagattgtttttcttgcaagactattgactgcccaccattcattctgctaaataagttgagtagggaagacctgttgcattgtgccttagctggaccaattattgtggagccacatgtcacagcagtatggggaaagaatgtttcattaaagtgtttaattgaagtaaatgaaaccataacacagatttcatgggagaagatacatggcaaaagttcacagactgttgcagttcaccatccccaatatggattctctgttcaaggagaatatcagggaagagtcttgtttaaaaattactcacttaatgatgcaacaattactctgcataacataggattctctgattctggaaaatacatctgcaaagctgttacattcccgcttggaaatgcccagtcctctacaactgtaactgtgttagttgaacccactgtgagcctgataaaagggccagattctttaattgatg

SEQ ID NO: 166919 - DNA, 1876 bp, Homo sapiens
  Payload ID: 12858
  Gene Symbol: PVRL3
  Gene Name: poliovirus receptor-related 3
  Uniprot ID: Q9NQS3
  ENST ID: ENST00000493615
  CDS Start-End: 253-1716
aggctctgtggtaggtgaacctcggcggccggcgtgggctgagggagccgccactgagggtgcgggcgccgcggccggctctgccagccgttctctggagcagcgaggcggttggttgtgcgagcgagtgccgaggactttggctggaaacttttcgccgcgcccggggcgaggccctggaagggccaggccagcgaatgctgagccggcggcccgctgccctcccccgcggccgcgcgggtcgccgtgcggatggccgagggttggcgatggtgcttcgtgcgccgaactccgggtttgctccggggaccgttacttcctcgctcattctctgggaaccctcgtgccttagctggaccaattattgtggagccacatgtcacagcagtatggggaaagaatgtttcattaaagtgtttaattgaagtaaatgaaaccataacacagatttcatgggagaagatacatggcaaaagttcacagactgttgcagttcaccatccccaatatggattctctgttcaaggagaatatcagggaagagtcttgtttaaaaattactcacttaatgatgcaacaattactctgcataacataggattctctgattctggaaaatacatctgcaaagctgttacattcccgcttggaaatgcccagtcctctacaactgtaactgtgttagttgaacccactgtgagcctgataaaagggccagattctttaattgatggaggaaatgaaacagtagcagccatttgcatcgcagccactggaaaacccgttgcacatattgactgggaaggtgatcttggtgaaatggaatccactacaacttcttttccaaatgaaacggcaacgattatcagccagtacaagctatttccaaccagatttgctagaggaaggcgaattacttgtgttgtaaaacatccagccttggaaaaggacatccgatactctttcatattagacatacagtatgctcctgaagtttcggtaacaggatatgatggaaattggtttgtaggaagaaaaggtgttaatctcaaatgtaatgctgatgcaaatccaccacccttcaaatctgtgtggagcaggttggatggacaatggcctgatggtttattggcttcagacaatactcttcattttgtccatccattgactttcaattattctggtgtttatatctgtaaagtgaccaattcccttggtcaaagaagtgaccaaaaagtcatctacatttcagatgttccatttaagcagacctcttccatagctgtagctggagcggtaattggagctgttcttgcccttttcatcattgctatctttgtgactgtgctgctgactcctcgaaaaaaaagaccatcctatcttgacaaagtgattgaccttccacccacacataaaccacctcctctgtatgaagaacgatccccacctttgcctcagaaagacctatttcagcctgaacacttgcctttgcagactcagttcaaagaaagagaagttggcaatcttcagcactctaatggactaaatagcaggagttttgactatgaagatgagaatccagttggggaagatggcattcagcagatgtaccccctttacaatcaaatgtgctaccaagaccggagccctggcaaacatcatcaaaataacgaccctaagagagtctacatcgacccacgagaacattatgtgtgatttttctctttttccaatgggcgttctaacaaatgtttattcttagattggggagagaagctaaggccaatagttattttactgtctctcatataagaacagtcccactctaagggtattggaagtcttaatgaatgacgtaaagccaatagcaaatttc

SEQ ID NO: 166920 - DNA, 3502 bp, Homo sapiens
  Payload ID: 12859
  Gene Symbol: PVRL4
  Gene Name: poliovirus receptor-related 4
  Uniprot ID: Q96NY8
  ENST ID: ENST00000368012
  CDS Start-End: 304-1836
acgcacctgttctgacctgctgagcaggttcccaggtttctgccgtcgttgttggccacagcgtgggaagcagctctgggggagctcggagctcccgatcacggcttcttgggggtagctacggctgggtgtgtagaacggggccggggctggggctgggtcccctagtggagacccaagtgcgagaggcaagaactctgcagcttcctgccttctgggtcagttccttattcaagtctgcagccggctcccagggagatctcggtggaacttcagaaacgctgggcagtctgcctttcaaccatgcccctgtccctgggagccgagatgtgggggcctgaggcctggctgctgctgctgctactgctggcatcatttacaggccggtgccccgcgggtgagctggagacctcagacgtggtaactgtggtgctgggccaggacgcaaaactgccctgcttctaccgaggggactccggcgagcaagtggggcaagtggcatgggctcgggtggacgcgggcgaaggcgcccaggaactagcgctactgcactccaaatacgggcttcatgtgagcccggcttacgagggccgcgtggagcagccgccgcccccacgcaaccccctggacggctcagtgctcctgcgcaacgcagtgcaggcggatgagggcgagtacgagtgccgggtcagcaccttccccgccggcagcttccaggcgcggctgcggctccgagtgctggtgcctcccctgccctcactgaatcctggtccagcactagaagagggccagggcctgaccctggcagcctcctgcacagctgagggcagcccagcccccagcgtgacctgggacacggaggtcaaaggcacaacgtccagccgttccttcaagcactcccgctctgctgccgtcacctcagagttccacttggtgcctagccgcagcatgaatgggcagccactgacttgtgtggtgtcccatcctggcctgctccaggaccaaaggatcacccacatcctccacgtgtccttccttgctgaggcctctgtgaggggccttgaagaccaaaatctgtggcacattggcagagaaggagctatgctcaagtgcctgagtgaagggcagccccctccctcatacaactggacacggctggatgggcctctgcccagtggggtacgagtggatggggacactttgggctttcccccactgaccactgagcacagcggcatctacgtctgccatgtcagcaatgagttctcctcaagggattctcaggtcactgtggatgttcttgacccccaggaagactctgggaagcaggtggacctagtgtcagcctcggtggtggtggtgggtgtgatcgccgcactcttgttctgccttctggtggtggtggtggtgctcatgtcccgataccatcggcgcaaggcccagcagatgacccagaaatatgaggaggagctgaccctgaccagggagaactccatccggaggctgcattcccatcacacggaccccaggagccagccggaggagagtgtagggctgagagccgagggccaccctgatagtctcaaggacaacagtagctgctctgtgatgagtgaagagcccgagggccgcagttactccacgctgaccacggtgagggagatagaaacacagactgaactgctgtctccaggctctgggcgggccgaggaggaggaagatcaggatgaaggcatcaaacaggccatgaaccattttgttcaggagaatgggaccctacgggccaagcccacgggcaatggcatctacatcaatgggcggggacacctggtctgacccaggcctgcctcccttccctaggcctggctccttctgttgacatgggagattttagctcatcttgggggcctccttaaacacccccatttcttgcggaagatgctccccatcccactgactgcttgacctttacctccaacccttctgttcatcgggagggctccaccaattgagtctctcccaccatgcatgcaggtcactgtgtgtgtgcatgtgtgcctgtgtgagtgttgactgactgtgtgtgtgtggaggggtgactgtccgtggaggggtgactgtgtccgtggtgtgtattatgctgtcatatcagagtcaagtgaactgtggtgtatgtgccacgggatttgagtggttgcgtgggcaacactgtcagggtttggcgtgtgtgtcatgtggctgtgtgtgacctctgcctgaaaaagcaggtattttctcagaccccagagcagtattaatgatgcagaggttggaggagagaggtggagactgtggctcagacccaggtgtgcgggcatagctggagctggaatctgcctccggtgtgagggaacctgtctcctaccacttcggagccatgggggcaagtgtgaagcagccagtccctgggtcagccagaggcttgaactgttacagaagccctctgccctctggtggcctctgggcctgctgcatgtacatattttctgtaaatatacatgcgccgggagcttcttgcaggaatactgctccgaatcacttttaatttttttcttttttttttcttgccctttccattagttgtattttttatttatttttatttttatttttttttagagatggagtctcactatgttgctcaggctggccttgaactcctgggctcaagcaatcctcctgcctcagcctccctagtagctgggactttaagtgtacaccactgtgcctgctttgaatcctttacgaagagaaaaaaaaaattaaagaaagcctttagatttatccaatgtttactactgggattgcttaaagtgaggcccctccaacaccagggggttaattcctgtgattgtgaaaggggctacttccaaggcatcttcatgcaggcagccccttgggagggcacctgagagctggtagagtctgaaattagggatgtgagcctcgtggttactgagtaaggtaaaattgcatccaccattgtttgtgataccttagggaattgcttggacctggtgacaagggctcctgttcaatagtggtgttggggagagagagagcagtgattatagaccgagagagtaggagttgaggtgaggtgaaggaggtgctgggggtgagaatgtcgcctttccccctgggttttggatcactaattcaaggctcttctggatgtttctctgggttggggctggagttcaatgaggtttatttttagctggcccacccagatacactcagccagaatacctagatttagtacccaaactcttcttagtctgaaatctgctggatttctggcctaagggagaggctcccatccttcgttccccagccagcctaggacttcgaatgtggagcctgaagatctaagatcctaacatgtacattttatgtaaatatgtgcatatttgtacataaaatgatattctgtttttaaataaacagacaaaacttgttc

SEQ ID NO: 166921 - DNA, 2227 bp, Homo sapiens
  Payload ID: 12860
  Gene Symbol: PLK1
  Gene Name: polo-like kinase 1
  Uniprot ID: P53350
  ENST ID: ENST00000300093
  CDS Start-End: 112-1923
agtggcgcgcaggcttttgtaacgttcccagcgccgcgtttgaattcggggaggagcggagcggtgcggaggctctgctcggatcgaggtctgcagcgcagcttcgggagcatgagtgctgcagtgactgcagggaagctggcacgggcaccggccgaccctgggaaagccggggtccccggagttgcagctcccggagctccggcggcggctccaccggcgaaagagatcccggaggtcctagtggacccacgcagccggcggcgctatgtgcggggccgctttttgggcaagggcggctttgccaagtgcttcgagatctcggacgcggacaccaaggaggtgttcgcgggcaagattgtgcctaagtctctgctgctcaagccgcaccagagggagaagatgtccatggaaatatccattcaccgcagcctcgcccaccagcacgtcgtaggattccacggctttttcgaggacaacgacttcgtgttcgtggtgttggagctctgccgccggaggtctctcctggagctgcacaagaggaggaaagccctgactgagcctgaggcccgatactacctacggcaaattgtgcttggctgccagtacctgcaccgaaaccgagttattcatcgagacctcaagctgggcaaccttttcctgaatgaagatctggaggtgaaaataggggattttggactggcaaccaaagtcgaatatgacggggagaggaagaagaccctgtgtgggactcctaattacatagctcccgaggtgctgagcaagaaagggcacagtttcgaggtggatgtgtggtccattgggtgtatcatgtataccttgttagtgggcaaaccaccttttgagacttcttgcctaaaagagacctacctccggatcaagaagaatgaatacagtattcccaagcacatcaaccccgtggccgcctccctcatccagaagatgcttcagacagatcccactgcccgcccaaccattaacgagctgcttaatgacgagttctttacttctggctatatccctgcccgtctccccatcacctgcctgaccattccaccaaggttttcgattgctcccagcagcctggaccccagcaaccggaagcccctcacagtcctcaataaaggcttggagaaccccctgcctgagcgtccccgggaaaaagaagaaccagtggttcgagagacaggtgaggtggtcgactgccacctcagtgacatgctgcagcagctgcacagtgtcaatgcctccaagccctcggagcgtgggctggtcaggcaagaggaggctgaggatcctgcctgcatccccatcttctgggtcagcaagtgggtggactattcggacaagtacggccttgggtatcagctctgtgataacagcgtgggggtgctcttcaatgactcaacacgcctcatcctctacaatgatggtgacagcctgcagtacatagagcgtgacggcactgagtcctacctcaccgtgagttcccatcccaactccttgatgaagaagatcaccctccttaaatatttccgcaattacatgagcgagcacttgctgaaggcaggtgccaacatcacgccgcgcgaaggtgatgagctcgcccggctgccctacctacggacctggttccgcacccgcagcgccatcatcctgcacctcagcaacggcagcgtgcagatcaacttcttccaggatcacaccaagctcatcttgtgcccactgatggcagccgtgacctacatcgacgagaagcgggacttccgcacataccgcctgagtctcctggaggagtacggctgctgcaaggagctggccagccggctccgctacgcccgcactatggtggacaagctgctgagctcacgctcggccagcaaccgtctcaaggcctcctaatagctgccctcccctccggactggtgccctcctcactcccacctgcatctggggcccatactggttggctcccgcggtgccatgtctgcagtgtgccccccagccccggtggctgggcagagctgcatcatccttgcaggtgggggttgctgtataagttatttttgtacatgttcgggtgtgggttctacagccttgtccccctccccctcaaccccaccatatgaattgtacagaatatttctattgaattcggaactgtcctttccttggctttatgcacattaaacagatgtgaatattc

SEQ ID NO: 166922 - DNA, 711 bp, Homo sapiens
  Payload ID: 12860
  Gene Symbol: PLK1
  Gene Name: polo-like kinase 1
  ENST ID: ENST00000567897
  CDS Start-End: 396-711
tcagcttctggacgcgaggtgctggggggaggggtgctggtaatggacgctagggccctggagtacccagggaggagtcccagtctctcctggagctgcacaagaggaggaaagccctgactgagcctgaggcccgatactacctacggcaaattgtgcttggctgccagtacctgcaccgaaaccgagttattcatcgagacctcaagctgggcaaccttttcctgaatgaagatctggaggtgaaaataggggattttggactggcaaccaaagtcgaatatgacggggagaggaagaagaccctgtgtgggactcctaattacatagctcccgaggtgctgagcaagaaagggcacagtttcgaggtggatgtgtggtccattgggtgtatcatgtataccttgttagtgggcaaaccaccttttgagacttcttgcctaaaagagacctacctccggatcaagaagaatgaatacagtattcccaagcacatcaaccccgtggccgcctccctcatccagaagatgcttcagacagatcccactgcccgcccaaccattaacgagctgcttaatgacgagttctttacttctggctatatccctgcccgtctccccatcacctgcctgaccattccaccaaggttttcgattgctcccagcagcctggaccccagcaaccggaagcccctcacagtcctcaataaag

SEQ ID NO: 166923 - DNA, 582 bp, Homo sapiens
  Payload ID: 12860
  Gene Symbol: PLK1
  Gene Name: polo-like kinase 1
  ENST ID: ENST00000568568
  CDS Start-End: 408-582
agacttcgggccttccgggggagatacgagtcaggaaagggatctggtgctggggactcggagcttccggagtggggctgagagaggacccccagtctctcctggagctgcacaagaggaggaaagccctgactgagcctgaggcccgatactacctacggcaaattgtgcttggctgccagtacctgcaccgaaaccgagttattcatcgagacctcaagctgggcaaccttttcctgaatgaagatctggaggtgaaaataggggattttggactggcaaccaaagtcgaatatgacggggagaggaagaagaccctgtgtgggactcctaattacatagctcccgaggtgctgagcaagaaagggcacagtttcgaggtggatgtgtggtccattgggtgtatcatgtataccttgttagtgggcaaaccaccttttgagacttcttgcctaaaagagacctacctccggatcaagaagaatgaatacagtattcccaagcacatcaaccccgtggccgcctccctcatccagaagatgcttcagacagatcccactgcccgcccaaccattaacgagc

SEQ ID NO: 166924 - DNA, 910 bp, Homo sapiens
  Payload ID: 12860
  Gene Symbol: PLK1
  Gene Name: polo-like kinase 1
  ENST ID: ENST00000570220
  CDS Start-End: 65-586
ggggaggagcggagcggtgcggaggctctgctcggatcgaggtctgcagcgcagcttcgggagcatgagtgctgcagtgactgcagggaagctggcacgggcaccggccgaccctgggaaagccggggtccccggagttgcagctcccggagctccggcggcggctccaccggcgaaagagatcccggaggtcctagtggacccacgcagccggcggcgctatgtgcggggccgctttttgggcaagggcggctttgccaagtgcttcgagatctcggacgcggacaccaaggaggtgttcgcgggcaagattgtgcctaagtctctgctgctcaagccgcaccagagggagaagatgtccatggaaatatccattcaccgcagcctcgcccaccagcacgtcgtaggattccacggctttttcgaggacaacgacttcgtgttcgtggtgttggagctctgccgccggagggtgagtgtcgctgctggggaactggaactgcctgcggggcagttggagcgcccagacctggagctgctggaaagagtacccagcaagggagagcctgggacttggagctgctagagaagggtgctgggagcctcccgcttacgtatggaaagtgtctttgtctctcctggagctgcacaagaggaggaaagccctgactgagcctgaggcccgatactacctacggcaaattgtgcttggctgccagtacctgcaccgaaaccgagttattcatcgagacctcaagctgggcaaccttttcctgaatgaagatctggaggtgaaaataggggattttggactggcaaccaaagtcgaatatgacggggagaggaagaagaccctgtgtgggactcctaattacatagctcccgaggtgctgagcaagaaagggcacag

SEQ ID NO: 166925 - DNA, 2960 bp, Homo sapiens
  Payload ID: 12861
  Gene Symbol: PLK2
  Gene Name: polo-like kinase 2
  Uniprot ID: Q9NYY3
  ENST ID: ENST00000274289
  CDS Start-End: 302-2359
gcgcgcggctccgctgggaagcgagacccgggtggcgggacaagacttgcttcccggccacgcgcgctcggccggccgtggggcggggcataggccgtgacgtgatgtcgcgtatcgagtctccgcccccttcccgcctccccgtatataagacttcgccgagcgctctcactcgcacaagtggaccggggtgttgggtgctagtcggcaccagaggcaagggtgcgaggaccacggccggctcggacgtgtgaccgcgcctagggggtggcagcgggcagtgcggggcggcaaggcgaccatggagcttttgcggactatcacctaccagccagccgccagcaccaaaatgtgcgagcaggcgctgggcaagggttgcggagcggactcgaagaagaagcggccgccgcagccccccgaggaatcgcagccacctcagtcccaggcgcaagtgcccccggcggcccctcaccaccatcaccaccattcgcactcggggccggagatctcgcggattatcgtcgaccccacgactgggaagcgctactgccggggcaaagtgctgggaaagggtggctttgcaaaatgttacgagatgacagatttgacaaataacaaagtctacgccgcaaaaattattcctcacagcagagtagctaaacctcatcaaagggaaaagattgacaaagaaatagagcttcacagaattcttcatcataagcatgtagtgcagttttaccactacttcgaggacaaagaaaacatttacattctcttggaatactgcagtagaaggtcaatggctcatattttgaaagcaagaaaggtgttgacagagccagaagttcgatactacctcaggcagattgtgtctggactgaaataccttcatgaacaagaaatcttgcacagagatctcaaactagggaacttttttattaatgaagccatggaactaaaagttggggacttcggtctggcagccaggctagaacccttggaacacagaaggagaacgatatgtggtaccccaaattatctctctcctgaagtcctcaacaaacaaggacatggctgtgaatcagacatttgggccctgggctgtgtaatgtatacaatgttactagggaggcccccatttgaaactacaaatctcaaagaaacttataggtgcataagggaagcaaggtatacaatgccgtcctcattgctggctcctgccaagcacttaattgctagtatgttgtccaaaaacccagaggatcgtcccagtttggatgacatcattcgacatgacttttttttgcagggcttcactccggacagactgtcttctagctgttgtcatacagttccagatttccacttatcaagcccagctaagaatttctttaagaaagcagctgctgctctttttggtggcaaaaaagacaaagcaagatatattgacacacataatagagtgtctaaagaagatgaagacatctacaagcttaggcatgatttgaaaaagacttcaataactcagcaacccagcaaacacaggacagatgaggagctccagccacctaccaccacagttgccaggtctggaacacccgcagtagaaaacaagcagcagattggggatgctattcggatgatagtcagagggactcttggcagctgtagcagcagcagtgaatgccttgaagacagtaccatgggaagtgttgcagacacagtggcaagggttcttcggggatgtctggaaaacatgccggaagctgattgcattcccaaagagcagctgagcacatcatttcagtgggtcaccaaatgggttgattactctaacaaatatggctttgggtaccagctctcagaccacaccgtcggtgtccttttcaacaatggtgctcacatgagcctccttccagacaaaaaaacagttcactattacgcagagcttggccaatgctcagttttcccagcaacagatgctcctgagcaatttattagtcaagtgacggtgctgaaatacttttctcattacatggaggagaacctcatggatggtggagatctgcctagtgttactgatattcgaagacctcggctctacctccttcagtggctaaaatctgataaggccctaatgatgctctttaatgatggcacctttcaggtgaatttctaccatgatcatacaaaaatcatcatctgtagccaaaatgaagaataccttctcacctacatcaatgaggataggatatctacaactttcaggctgacaactctgctgatgtctggctgttcatcagaattaaaaaatcgaatggaatatgccctgaacatgctcttacaaagatgtaactgaaagacttttcgaatggaccctatgggactcctcttttccactgtgagatctacagggaagccaaaagaatgatctagagtatgttgaagaagatggacatgtggtggtacgaaaacaattcccctgtggcctgctggactggttggaaccagaacaggctaaggcatacagttcttgactttggacaatccaagagtgaaccagaatgcagttttccttgagatacctgttttaaaaggtttttcagacaattttgcagaaaggtgcattgattcttaaattctctctgttgagagcatttcagccagaggactttggaactgtgaatatacttcctgaaggggagggagaagggaggaagctcccatgttgtttaaaggctgtaattggagcagcttttggctgcgtaactgtgaactatggccatatataattttttttcattaatttttgaagatacttgtggctggaaaagtgcattccttgttaataaactttttatttattacagcccaaagagcagtatttattatcaaaatgtctttttttttatgttgaccattttaaaccgttggcaataaagagtatgaaaacgcagaaa

SEQ ID NO: 166926 - DNA, 2792 bp, Homo sapiens
  Payload ID: 12861
  Gene Symbol: PLK2
  Gene Name: polo-like kinase 2
  ENST ID: ENST00000617412
  CDS Start-End: 181-2196
tccgcccccttcccgcctccccgtatataagacttcgccgagcgctctcactcgcacaagtggaccggggtgttgggtgctagtcggcaccagaggcaagggtgcgaggaccacggccggctcggacgtgtgaccgcgcctagggggtggcagcgggcagtgcggggcggcaaggcgaccatggagcttttgcggactatcacctaccagccagccgccagcaccaaaatgtgcgagcaggcgctgggcaagggttgcggagcggactcgaagaagaagcggccgccgcagccccccgaggaatcgcagccacctcagtcccaggcgcaagtgcccccggcgatctcgcggattatcgtcgaccccacgactgggaagcgctactgccggggcaaagtgctgggaaagggtggctttgcaaaatgttacgagatgacagatttgacaaataacaaagtctacgccgcaaaaattattcctcacagcagagtagctaaacctcatcaaagggaaaagattgacaaagaaatagagcttcacagaattcttcatcataagcatgtagtgcagttttaccactacttcgaggacaaagaaaacatttacattctcttggaatactgcagtagaaggtcaatggctcatattttgaaagcaagaaaggtgttgacagagccagaagttcgatactacctcaggcagattgtgtctggactgaaataccttcatgaacaagaaatcttgcacagagatctcaaactagggaacttttttattaatgaagccatggaactaaaagttggggacttcggtctggcagccaggctagaacccttggaacacagaaggagaacgatatgtggtaccccaaattatctctctcctgaagtcctcaacaaacaaggacatggctgtgaatcagacatttgggccctgggctgtgtaatgtatacaatgttactagggaggcccccatttgaaactacaaatctcaaagaaacttataggtgcataagggaagcaaggtatacaatgccgtcctcattgctggctcctgccaagcacttaattgctagtatgttgtccaaaaacccagaggatcgtcccagtttggatgacatcattcgacatgacttttttttgcagggcttcactccggacagactgtcttctagctgttgtcatacagttccagatttccacttatcaagcccagctaagaatttctttaagaaagcagctgctgctctttttggtggcaaaaaagacaaagcaagatatattgacacacataatagagtgtctaaagaagatgaagacatctacaagcttaggcatgatttgaaaaagacttcaataactcagcaacccagcaaacacaggacagatgaggagctccagccacctaccaccacagttgccaggtctggaacacccgcagtagaaaacaagcagcagattggggatgctattcggatgatagtcagagggactcttggcagctgtagcagcagcagtgaatgccttgaagacagtaccatgggaagtgttgcagacacagtggcaagggttcttcggggatgtctggaaaacatgccggaagctgattgcattcccaaagagcagctgagcacatcatttcagtgggtcaccaaatgggttgattactctaacaaatatggctttgggtaccagctctcagaccacaccgtcggtgtccttttcaacaatggtgctcacatgagcctccttccagacaaaaaaacagttcactattacgcagagcttggccaatgctcagttttcccagcaacagatgctcctgagcaatttattagtcaagtgacggtgctgaaatacttttctcattacatggaggagaacctcatggatggtggagatctgcctagtgttactgatattcgaagacctcggctctacctccttcagtggctaaaatctgataaggccctaatgatgctctttaatgatggcacctttcaggtgaatttctaccatgatcatacaaaaatcatcatctgtagccaaaatgaagaataccttctcacctacatcaatgaggataggatatctacaactttcaggctgacaactctgctgatgtctggctgttcatcagaattaaaaaatcgaatggaatatgccctgaacatgctcttacaaagatgtaactgaaagacttttcgaatggaccctatgggactcctcttttccactgtgagatctacagggaagccaaaagaatgatctagagtatgttgaagaagatggacatgtggtggtacgaaaacaattcccctgtggcctgctggactggttggaaccagaacaggctaaggcatacagttcttgactttggacaatccaagagtgaaccagaatgcagttttccttgagatacctgttttaaaaggtttttcagacaattttgcagaaaggtgcattgattcttaaattctctctgttgagagcatttcagccagaggactttggaactgtgaatatacttcctgaaggggagggagaagggaggaagctcccatgttgtttaaaggctgtaattggagcagcttttggctgcgtaactgtgaactatggccatatataattttttttcattaatttttgaagatacttgtggctggaaaagtgcattccttgttaataaactttttatttattacagcccaaagagcagtatttattatcaaaatgtctttttttttatgttgaccattttaaaccgttggcaataaagagtatgaaaacgc

SEQ ID NO: 166927 - DNA, 2492 bp, Homo sapiens
  Payload ID: 12862
  Gene Symbol: PLK3
  Gene Name: polo-like kinase 3
  Uniprot ID: Q9H4B4
  ENST ID: ENST00000372201
  CDS Start-End: 240-2180
tgggggaggagcttctgggtgatgtaaggccgggaatgggagtggcctctcctcgactcgctgctaggaagggggcgggactctcggtgaccagacgccggggagggggcaggcgttcattgataaaacgctgggctcccctgggcgccagcgcagcgtagcaaatccaggcagcgccacgcgcggccggggccgggcggaaccgagaagccgggaccgcgctgcgacgcgccggccgcatggagcctgccgccggtttcctgtctccgcgccccttccagcgtgcggccgccgcgcccgctcccccggccgggcccgggccgcctccgagtgccttgcgcggacctgagctggagatgctggccgggctaccgacgtcagaccccgggcgcctcatcacggacccgcgcagcggccgcacctacctcaaaggccgcttgttgggcaaggggggcttcgcccgctgctacgaggccactgacacagagactggcagcgcctacgctgtcaaagtcatcccgcagagccgcgtcgccaagccgcatcagcgcgagaagatcctaaatgagattgagctgcaccgagacctgcagcaccgccacatcgtgcgtttttcgcaccactttgaggacgctgacaacatctacattttcttggagctctgcagccgaaagtccctggcccacatctggaaggcccggcacaccctgttggagccagaagtgcgctactacctgcggcagatcctttctggcctcaagtacttgcaccagcgcggcatcttgcaccgggacctcaagttgggaaattttttcatcactgagaacatggaactgaaggtgggggattttgggctggcagcccggttggagcctccggagcagaggaagaagaccatctgtggcacccccaactatgtggctccagaagtgctgctgagacagggccacggccctgaggcggatgtatggtcactgggctgtgtcatgtacacgctgctctgcgggagccctccctttgagacggctgacctgaaggagacgtaccgctgcatcaagcaggttcactacacgctgcctgccagcctctcactgcctgcccggcagctcctggccgccatccttcgggcctcaccccgagaccgcccctctattgaccagatcctgcgccatgacttctttaccaagggctacacccccgatcgactccctatcagcagctgcgtgacagtcccagacctgacaccccccaacccagctaggagtctgtttgccaaagttaccaagagcctctttggcagaaagaagaagagtaagaatcatgcccaggagagggatgaggtctccggtttggtgagcggcctcatgcgcacatccgttggccatcaggatgccaggccagaggctccagcagcttctggcccagcccctgtcagcctggtagagacagcacctgaagacagctcaccccgtgggacactggcaagcagtggagatggatttgaagaaggtctgactgtggccacagtagtggagtcagccctttgtgctctgagaaattgtatagccttcatgcccccagcggaacagaacccggcccccctggcccagccagagcctctggtgtgggtcagcaagtgggttgactactccaataagttcggctttgggtatcaactgtccagccgccgtgtggctgtgctcttcaacgatggcacacatatggccctgtcggccaacagaaagactgtgcactacaatcccaccagcacaaagcacttctccttctccgtgggtgctgtgccccgggccctgcagcctcagctgggtatcctgcggtacttcgcctcctacatggagcagcacctcatgaagggtggagatctgcccagtgtggaagaggtagaggtacctgctccgcccttgctgctgcagtgggtcaagacggatcaggctctcctcatgctgtttagtgatggcactgtccaggtgaacttctacggggaccacaccaagctgattctcagtggctgggagcccctccttgtgacttttgtggcccgaaatcgtagtgcttgtacttacctcgcttcccaccttcggcagctgggctgctctccagacctgcggcagcgactccgctatgctctgcgcctgctccgggaccgcagcccagcctaggacccaagccctgaggcctgaggcctgtgcctgtcaggctctggcccttgcctttgtggccttcccccttcctttggtgcctcactgggggctttgggccgaatcccccagggaatcagggaccagctttactggagttgggggcggcttgtcttcgctggctcctaccccatctccaagataagcctgagccttagctcccagctagggggcgttatttatggaccacttttatttattgtcagacacttatttattgggatgtgagccccaggggggcctcctcctaggataataaacaattttgcagaa

SEQ ID NO: 166928 - DNA, 3841 bp, Homo sapiens
  Payload ID: 12863
  Gene Symbol: PLK4
  Gene Name: polo-like kinase 4
  Uniprot ID: O00444
  ENST ID: ENST00000270861
  CDS Start-End: 275-3187
agcctatccggagcgatccatctcgttacgtcaccaccagcctagctcggacggcaagcggcgggagattttcaaaatgggagcccagaggcaccgcccaggcctcggaaggtgtcagggagaactttccgtggtttcagcgtcgtcgcctggagcggcggtttagagagccgagcctgatgggcgccaaggccggctggctgcttggagcgctgcctcgaagggactgcgtgaaggaagctaatccggagaacccaggccagagcctggaaatatggcgacctgcatcggggagaagatcgaggattttaaagttggaaatctgcttggtaaaggatcatttgctggtgtctacagagctgagtccattcacactggtttggaagttgcaatcaaaatgatagataagaaagccatgtacaaagcaggaatggtacagagagtccaaaatgaggtgaaaatacattgccaattgaaacatccttctatcttggagctttataactattttgaagatagcaattatgtgtatctggtattagaaatgtgccataatggagaaatgaacaggtatctaaagaatagagtgaaacccttctcagaaaatgaagctcgacacttcatgcaccagatcatcacagggatgttgtatcttcattctcatggtatactacaccgggacctcacactttctaacctcctactgactcgtaatatgaacatcaagattgctgattttgggctggcaactcaactgaaaatgccacatgaaaagcactatacattatgtggaactcctaactacatttcaccagaaattgccactcgaagtgcacatggccttgaatctgatgtttggtccctgggctgtatgttttatacattacttatcgggagaccacccttcgacactgacacagtcaagaacacattaaataaagtagtattggcagattatgaaatgccatcttttttgtcaatagaggccaaggaccttattcaccagttacttcgtagaaatccagcagatcgtttaagtctgtcttcagtattggaccatccttttatgtcccgaaattcttcaacaaaaagtaaagatttaggaactgtggaagactcaattgatagtgggcatgccacaatttctactgcaattacagcttcttccagtaccagtataagtggtagtttatttgacaaaagaagacttttgattggtcagccactcccaaataaaatgactgtatttccaaagaataaaagttcaactgatttttcttcttcaggagatggaaacagtttttatactcagtggggaaatcaagaaaccagtaatagtggaaggggaagagtaattcaagatgcagaagaaaggccacattctcgataccttcgtagagcttattcctctgatagatctggcacttctaatagtcagtctcaagcaaaaacatatacaatggaacgatgtcactcagcagaaatgctttcagtgtccaaaagatcaggaggaggtgaaaatgaagagaggtactcacccacagacaacaatgccaacatttttaacttctttaaagaaaagacatccagtagttctggatcttttgaaagacctgataacaatcaagcactctccaatcatctttgtccaggaaaaactccttttccatttgcagacccgacacctcagactgaaaccgtacaacagtggtttgggaatctgcaaataaatgctcatttaagaaaaactactgaatatgacagcatcagcccaaaccgggacttccagggccatccagatttgcagaaggacacatcaaaaaatgcctggactgatacaaaagtcaaaaagaactctgatgcttctgataatgcacattctgtaaaacagcaaaataccatgaaatatatgactgcacttcacagtaaacctgagataatccaacaagaatgtgtttttggctcagatcctctttctgaacagagcaagactaggggtatggagccaccatggggttatcagaatcgtacattaagaagcattacatctccgttggttgctcacaggttaaaaccaatcagacagaaaaccaaaaaggctgtggtgagcatacttgattcagaggaggtgtgtgtggagcttgtaaaggagtatgcatctcaagaatatgtgaaagaagttcttcagatatctagtgatggaaatacgatcactatttattatccaaatggtggtagaggttttcctcttgctgatagaccaccctcacctactgacaacatcagtaggtacagctttgacaatttaccagaaaaatactggcgaaaatatcaatatgcttccaggtttgtacagcttgtaagatctaaatctcccaaaatcacttattttacaagatatgctaaatgcattttgatggagaattctcctggtgctgattttgaggtttggttttatgatggggtaaaaatacacaaaacagaagatttcattcaggtgattgaaaagacagggaagtcttacactttaaaaagtgaaagtgaagttaatagcttgaaagaggagataaaaatgtatatggaccatgctaatgagggtcatcgtatttgtttagcactggaatccataatttcagaagaggaaaggaaaactaggagtgctccctttttcccaataatcataggaagaaaacctggtagtactagttcacctaaggccttatcacctcctccttctgtggattcaaattacccaacgagagagagagcatctttcaacagaatggtcatgcatagtgctgcttctccaacacaggcaccaatccttaatccctctatggttacaaatgaaggacttggtcttacaactacagcttctggaacagacatctcttctaatagtctaaaagattgtcttcctaaatcagcacaacttttgaaatctgtttttgtgaaaaatgttggttgggctacacagttaactagtggagctgtgtgggttcagtttaatgatgggtcccagttggttgtgcaggcaggagtgtcttctatcagttatacctcaccaaatggtcaaacaactaggtatggagaaaatgaaaaattaccagactacatcaaacagaaattacagtgtctgtcttccatccttttgatgttttctaatccgactcctaattttcattgattaaaactcctttcagacatataagtttaataaataacttttttgttgactttcaagtaaagtgattttttttaatttaacataaagtcttcagaaagcctttctatgaaagaattttaacctataatgtaaaggatgtattctgagagaacaaagcagaatgaaacttgagtcacttactaaatatagtggatataaaatagaacacctgactttgctcttagaccataacccccgaacttactatgttcatatatttgtattgaacaatcttttaaaagcaaaaatgtaaatgatgtgtagtttatttgtgcttttattgttttccctgcgtctcagacatgttgagaatcatggacaaaacctgctggaattttggaatttttgaagatgtaaataatgtgtatttatgttataagtaacatatgtaaacatgtatatttgttttatatttatttttgtaacaccagtgtctgatgaaacatttttgcaaatgcattttataaaaaaataaatatagtgataagttacattatcttttgattcatttaattaaatacttatttttaaataacttaccagtaaactcactttttaaattttgttgcctgttgaggagccaattaaattttaaatattaattttgcaaatgtt

SEQ ID NO: 166929 - DNA, 3431 bp, Homo sapiens
  Payload ID: 12863
  Gene Symbol: PLK4
  Gene Name: polo-like kinase 4
  ENST ID: ENST00000515069
  CDS Start-End: 227-2905
ggacggcaagcggcgggagattttcaaaatgggagcccagaggcaccgcccaggcctcggaaggtgtcagggagaactttccgtggtttcagcgtcgtcgcctggagcggcggtttagagagccgagcctgatgggcgccaaggccggctggctgcttggagcgctgcctcgaagggactgcgtgaaggaagctaatccggagaacccaggccagagcctggaaatatggcgacctgcatcggggagaagatcgaggattttaaagttggaaatctgcttggtaaaggatcatttgctggtgtctacagagctgagtccattcacactggtttggaagttgcaatcaaaatgatagataagaaagccatgtacaaagcaggaatggtacagagagtccaaaatgaggtgaaaatacattgccaattgaaacatccttctatcttggagctttataactattttgaagatagcaattatgtgtatctggtattagaaatgtgccataatggagaaatgaacaggtatctaaagaatagagtgaaacccttctcagaaaatgaagctcgacacttcatgcaccagatcatcacagggatgttgtatcttcattctcatggtatactacaccgggacctcacactttctaacctcctactgactcgtaatatgaacatcaagattgctgattttgggctggcaactcaactgaaaatgccacatgaaaagcactatacattatgtggaactcctaactacatttcaccagaaattgccactcgaagtgcacatggccttgaatctgatgtttggtccctgggctgtatgttttatacattacttatcgggagaccacccttcgacactgacacagtcaagaacacattaaataaagtagtattggcagattatgaaatgccatcttttttgtcaatagaggccaaggaccttattcaccagttacttcgtagaaatccagcagatcgtttaagtctgtcttcagtattggaccatccttttatgtcccgaaattcttcaacaaaaagtaaagatttaggaactgtggaagactcaattgatagtgggcatgccacaatttctactgcaattacagcttcttccagtaccagtataagtggtagtttatttgacaaaagaagacttttgattggtcagccactcccaaataaaatgactgtatttccaaagaataaaagttcaactgatttttcttcttcaggagatggaaacagtttttatactcagtggggaaatcaagaaaccagtaatagtggaaggggaagagtaattcaagatgcagaagaaaggccacattctcgataccttcgtagagcttattcctctgatagatctggcacttctaatagtcagtctcaagcaaaaacatatacaatggaacgatgtcactcagcagaaatgctttcagtgtccaaaagatcaggaggaggtgaaaatgaagagaggtactcacccacagacaacaatgccaacatttttaacttctttaaagaaaagacatccagtagttctggatcttttgaaagacctgataacaatcaagcactctccaatcatctttgtccaggaaaaactccttttccatttgcagacccgacacctcagactgaaaccgtacaacagtggtttgggaatctgcaaataaatgatcctctttctgaacagagcaagactaggggtatggagccaccatggggttatcagaatcgtacattaagaagcattacatctccgttggttgctcacaggttaaaaccaatcagacagaaaaccaaaaaggctgtggtgagcatacttgattcagaggaggtgtgtgtggagcttgtaaaggagtatgcatctcaagaatatgtgaaagaagttcttcagatatctagtgatggaaatacgatcactatttattatccaaatggtggtagaggttttcctcttgctgatagaccaccctcacctactgacaacatcagtaggtacagctttgacaatttaccagaaaaatactggcgaaaatatcaatatgcttccaggtttgtacagcttgtaagatctaaatctcccaaaatcacttattttacaagatatgctaaatgcattttgatggagaattctcctggtgctgattttgaggtttggttttatgatggggtaaaaatacacaaaacagaagatttcattcaggtgattgaaaagacagggaagtcttacactttaaaaagtgaaagtgaagttaatagcttgaaagaggagataaaaatgtatatggaccatgctaatgagggtcatcgtatttgtttagcactggaatccataatttcagaagaggaaaggaaaactaggagtgctccctttttcccaataatcataggaagaaaacctggtagtactagttcacctaaggccttatcacctcctccttctgtggattcaaattacccaacgagagagagagcatctttcaacagaatggtcatgcatagtgctgcttctccaacacaggcaccaatccttaatccctctatggttacaaatgaaggacttggtcttacaactacagcttctggaacagacatctcttctaatagtctaaaagattgtcttcctaaatcagcacaacttttgaaatctgtttttgtgaaaaatgttggttgggctacacagttaactagtggagctgtgtgggttcagtttaatgatgggtcccagttggttgtgcaggcaggagtgtcttctatcagttatacctcaccaaatggtcaaacaactaggtatggagaaaatgaaaaattaccagactacatcaaacagaaattacagtgtctgtcttccatccttttgatgttttctaatccgactcctaattttcattgattaaaactcctttcagacatataagtttaataaataacttttttgttgactttcaagtaaagtgattttttttaatttaacataaagtcttcagaaagcctttctatgaaagaattttaacctataatgtaaaggatgtattctgagagaacaaagcagaatgaaacttgagtcacttactaaatatagtggatataaaatagaacacctgactttgctcttagaccataacccccgaacttactatgttcatatatttgtattgaacaatcttttaaaagcaaaaatgtaaatgatgtgtagtttatttgtgcttttattgttttccctgcgtctcagacatgttgagaatcatggacaaaacctgctggaattttggaatttttgaagatgtaaataatgtgtatttatgttataagtaacatatgtaaacatgtatatttgttttatatttatttttgtaacaccagtgtctgatgaaacatttttgcaaatgcattttataaaaaaataaatatagtgataa

SEQ ID NO: 166930 - DNA, 3195 bp, Homo sapiens
  Payload ID: 12863
  Gene Symbol: PLK4
  Gene Name: polo-like kinase 4
  ENST ID: ENST00000507249
  CDS Start-End: 207-2936
ttttcaaaatgggagcccagaggcaccgcccaggcctcggaaggtgtcagggagaactttccgtggtttcagcgtcgtcgcctggagcggcggtttagagagccgagcctgatgggcgccaaggccggctggctgcttggagcgctgcctcgaagggactgcgtgaaggaagctaatccggagaacccaggccagagcctggaaatatggcgacctgcatcggggagaagatcgaggattttaaagttggaaatctgcttggtaaaggatcatttgctggtgtctacagagctgagtccattcacactggtttggaagttgcaatcaaaatgatagataagaaagccatgtacaaagcaggaatggtacagagagtccaaaatgaggtgaaaatacattgccaattgaaacatccttctatcttggagctttataactattttgaagatagcaattatgtgtatctggtattagaaatgtgccataatggagaaatgaacaggtatctaaagaatagagtgaaacccttctcagaaaatgaagctcgacacttcatgcaccagatcatcacagggatgttgtatcttcattctcatggtatactacaccgggacctcacactttctaacctcctactgactcgtaatatgaacatcaagattgctgattttgggctggcaactcaactgaaaatgccacatgaaaagcactatacattatgtggaactcctaactacatttcaccagaaattgccactcgaagtgcacatggccttgaatctgatgtttggtccctgggctgtatgttttatacattacttatcgggagaccacccttcgacactgacacagtcaagaacacattaaataaagtagtattggcagattatgaaatgccatcttttttgtcaatagaggccaaggaccttattcaccagttacttcgtagaaatccagcagatcgtttaagtctgtcttcagtattggaccatccttttatgtcccgaaattcttcaacaaaaagtaaagatttaggaactgtggaagactcaattgatagtgggcatgccacaatttctactgcaattacagcttcttccagtaccagtataagtggtagtttatttgacaaaagaagacttttgattggtcagccactcccaaataaaatgactgtatttccaaagaataaaagttcaactgatttttcttcttcaggagatggaaacagtttttatactcagtggggaaatcaagaaaccagtaatagtggaaggggaagagtaattcaagatgcagaagaaaggccacattctcgataccttcgtagagcttattcctctgatagatctggcacttctaatagtcagtctcaagcaaaaacatatacaatggaacgatgtcactcagcagaaatgctttcagtgtccaaaagatcaggaggaggtgaaaatgaagagagctccaatcatctttgtccaggaaaaactccttttccatttgcagacccgacacctcagactgaaaccgtacaacagtggtttgggaatctgcaaataaatgctcatttaagaaaaactactgaatatgacagcatcagcccaaaccgggacttccagggccatccagatttgcagaaggacacatcaaaaaatgcctggactgatacaaaagtcaaaaagaactctgatgcttctgataatgcacattctgtaaaacagcaaaataccatgaaatatatgactgcacttcacagtaaacctgagataatccaacaagaatgtgtttttggctcagatcctctttctgaacagagcaagactaggggtatggagccaccatggggttatcagaatcgtacattaagaagcattacatctccgttggttgctcacaggttaaaaccaatcagacagaaaaccaaaaaggctgtggtgagcatacttgattcagaggagatcactatttattatccaaatggtggtagaggttttcctcttgctgatagaccaccctcacctactgacaacatcagtaggtacagctttgacaatttaccagaaaaatactggcgaaaatatcaatatgcttccaggtttgtacagcttgtaagatctaaatctcccaaaatcacttattttacaagatatgctaaatgcattttgatggagaattctcctggtgctgattttgaggtttggttttatgatggggtaaaaatacacaaaacagaagatttcattcaggtgattgaaaagacagggaagtcttacactttaaaaagtgaaagtgaagttaatagcttgaaagaggagataaaaatgtatatggaccatgctaatgagggtcatcgtatttgtttagcactggaatccataatttcagaagaggaaaggaaaactaggagtgctccctttttcccaataatcataggaagaaaacctggtagtactagttcacctaaggccttatcacctcctccttctgtggattcaaattacccaacgagagagagagcatctttcaacagaatggtcatgcatagtgctgcttctccaacacaggcaccaatccttaatccctctatggttacaaatgaaggacttggtcttacaactacagcttctggaacagacatctcttctaatagtctaaaagattgtcttcctaaatcagcacaacttttgaaatctgtttttgtgaaaaatgttggttgggctacacagttaactagtggagctgtgtgggttcagtttaatgatgggtcccagttggttgtgcaggcaggagtgtcttctatcagttatacctcaccaaatggtcaaacaactaggtatggagaaaatgaaaaattaccagactacatcaaacagaaattacagtgtctgtcttccatccttttgatgttttctaatccgactcctaattttcattgattaaaactcctttcagacatataagtttaataaataacttttttgttgactttcaagtaaagtgattttttttaatttaacataaagtcttcagaaagcctttctatgaaagaattttaacctataatgtaaaggatgtattctgagagaacaaagcagaatgaaacttgagtcacttactaaatatagtggatataaaatagaacacctgactttgctcttagaccataacccccgaacttactatgttcatatattt

SEQ ID NO: 166931 - DNA, 3060 bp, Homo sapiens
  Payload ID: 12863
  Gene Symbol: PLK4
  Gene Name: polo-like kinase 4
  Uniprot ID: O00444
  ENST ID: ENST00000514379
  CDS Start-End: 233-3022
gggaaggggagcgaacgaagctaacggctgcggggcgggcaccgaggtgcttagggagggtcccaacggcccagacccctgctgtttaggggcggagcggcccgcccctcaagagacaagagtagggaaggcgggacaggattttaaagttggaaatctgcttggtaaaggatcatttgctggtgtctacagagctgagtccattcacactggtttggaagttgcaatcaaaatgatagataagaaagccatgtacaaagcaggaatggtacagagagtccaaaatgaggtgaaaatacattgccaattgaaacatccttctatcttggagctttataactattttgaagatagcaattatgtgtatctggtattagaaatgtgccataatggagaaatgaacaggtatctaaagaatagagtgaaacccttctcagaaaatgaagctcgacacttcatgcaccagatcatcacagggatgttgtatcttcattctcatggtatactacaccgggacctcacactttctaacctcctactgactcgtaatatgaacatcaagattgctgattttgggctggcaactcaactgaaaatgccacatgaaaagcactatacattatgtggaactcctaactacatttcaccagaaattgccactcgaagtgcacatggccttgaatctgatgtttggtccctgggctgtatgttttatacattacttatcgggagaccacccttcgacactgacacagtcaagaacacattaaataaagtagtattggcagattatgaaatgccatcttttttgtcaatagaggccaaggaccttattcaccagttacttcgtagaaatccagcagatcgtttaagtctgtcttcagtattggaccatccttttatgtcccgaaattcttcaacaaaaagtaaagatttaggaactgtggaagactcaattgatagtgggcatgccacaatttctactgcaattacagcttcttccagtaccagtataagtggtagtttatttgacaaaagaagacttttgattggtcagccactcccaaataaaatgactgtatttccaaagaataaaagttcaactgatttttcttcttcaggagatggaaacagtttttatactcagtggggaaatcaagaaaccagtaatagtggaaggggaagagtaattcaagatgcagaagaaaggccacattctcgataccttcgtagagcttattcctctgatagatctggcacttctaatagtcagtctcaagcaaaaacatatacaatggaacgatgtcactcagcagaaatgctttcagtgtccaaaagatcaggaggaggtgaaaatgaagagaggtactcacccacagacaacaatgccaacatttttaacttctttaaagaaaagacatccagtagttctggatcttttgaaagacctgataacaatcaagcactctccaatcatctttgtccaggaaaaactccttttccatttgcagacccgacacctcagactgaaaccgtacaacagtggtttgggaatctgcaaataaatgctcatttaagaaaaactactgaatatgacagcatcagcccaaaccgggacttccagggccatccagatttgcagaaggacacatcaaaaaatgcctggactgatacaaaagtcaaaaagaactctgatgcttctgataatgcacattctgtaaaacagcaaaataccatgaaatatatgactgcacttcacagtaaacctgagataatccaacaagaatgtgtttttggctcagatcctctttctgaacagagcaagactaggggtatggagccaccatggggttatcagaatcgtacattaagaagcattacatctccgttggttgctcacaggttaaaaccaatcagacagaaaaccaaaaaggctgtggtgagcatacttgattcagaggaggtgtgtgtggagcttgtaaaggagtatgcatctcaagaatatgtgaaagaagttcttcagatatctagtgatggaaatacgatcactatttattatccaaatggtggtagaggttttcctcttgctgatagaccaccctcacctactgacaacatcagtaggtacagctttgacaatttaccagaaaaatactggcgaaaatatcaatatgcttccaggtttgtacagcttgtaagatctaaatctcccaaaatcacttattttacaagatatgctaaatgcattttgatggagaattctcctggtgctgattttgaggtttggttttatgatggggtaaaaatacacaaaacagaagatttcattcaggtgattgaaaagacagggaagtcttacactttaaaaagtgaaagtgaagttaatagcttgaaagaggagataaaaatgtatatggaccatgctaatgagggtcatcgtatttgtttagcactggaatccataatttcagaagaggaaaggaaaactaggagtgctccctttttcccaataatcataggaagaaaacctggtagtactagttcacctaaggccttatcacctcctccttctgtggattcaaattacccaacgagagagagagcatctttcaacagaatggtcatgcatagtgctgcttctccaacacaggcaccaatccttaatccctctatggttacaaatgaaggacttggtcttacaactacagcttctggaacagacatctcttctaatagtctaaaagattgtcttcctaaatcagcacaacttttgaaatctgtttttgtgaaaaatgttggttgggctacacagttaactagtggagctgtgtgggttcagtttaatgatgggtcccagttggttgtgcaggcaggagtgtcttctatcagttatacctcaccaaatggtcaaacaactaggtatggagaaaatgaaaaattaccagactacatcaaacagaaattacagtgtctgtcttccatccttttgatgttttctaatccgactcctaattttcattgattaaaactcctttcagacatataagtttaataaataac

SEQ ID NO: 166932 - DNA, 3123 bp, Homo sapiens
  Payload ID: 12863
  Gene Symbol: PLK4
  Gene Name: polo-like kinase 4
  Uniprot ID: O00444
  ENST ID: ENST00000513090
  CDS Start-End: 209-3025
gattttcaaaatgggagcccagaggcaccgcccaggcctcggaaggtgtcagggagaactttccgtggtttcagcgtcgtcgcctggagcggcggtttagagagccgagcctgatgggcgccaaggccggctggctgcttggagcgctgcctcgaagggactgcgtgaaggaagctaatccggagaacccaggccagagcctggaaatatggcgacctgcatcggggagaagatcgaggattttaaagttggaaatctgcttggtaaaggatcatttgctggtgtctacagagctgagtccattcacactggtttggaagttgcaatcaaaatgctttataactattttgaagatagcaattatgtgtatctggtattagaaatgtgccataatggagaaatgaacaggtatctaaagaatagagtgaaacccttctcagaaaatgaagctcgacacttcatgcaccagatcatcacagggatgttgtatcttcattctcatggtatactacaccgggacctcacactttctaacctcctactgactcgtaatatgaacatcaagattgctgattttgggctggcaactcaactgaaaatgccacatgaaaagcactatacattatgtggaactcctaactacatttcaccagaaattgccactcgaagtgcacatggccttgaatctgatgtttggtccctgggctgtatgttttatacattacttatcgggagaccacccttcgacactgacacagtcaagaacacattaaataaagtagtattggcagattatgaaatgccatcttttttgtcaatagaggccaaggaccttattcaccagttacttcgtagaaatccagcagatcgtttaagtctgtcttcagtattggaccatccttttatgtcccgaaattcttcaacaaaaagtaaagatttaggaactgtggaagactcaattgatagtgggcatgccacaatttctactgcaattacagcttcttccagtaccagtataagtggtagtttatttgacaaaagaagacttttgattggtcagccactcccaaataaaatgactgtatttccaaagaataaaagttcaactgatttttcttcttcaggagatggaaacagtttttatactcagtggggaaatcaagaaaccagtaatagtggaaggggaagagtaattcaagatgcagaagaaaggccacattctcgataccttcgtagagcttattcctctgatagatctggcacttctaatagtcagtctcaagcaaaaacatatacaatggaacgatgtcactcagcagaaatgctttcagtgtccaaaagatcaggaggaggtgaaaatgaagagaggtactcacccacagacaacaatgccaacatttttaacttctttaaagaaaagacatccagtagttctggatcttttgaaagacctgataacaatcaagcactctccaatcatctttgtccaggaaaaactccttttccatttgcagacccgacacctcagactgaaaccgtacaacagtggtttgggaatctgcaaataaatgctcatttaagaaaaactactgaatatgacagcatcagcccaaaccgggacttccagggccatccagatttgcagaaggacacatcaaaaaatgcctggactgatacaaaagtcaaaaagaactctgatgcttctgataatgcacattctgtaaaacagcaaaataccatgaaatatatgactgcacttcacagtaaacctgagataatccaacaagaatgtgtttttggctcagatcctctttctgaacagagcaagactaggggtatggagccaccatggggttatcagaatcgtacattaagaagcattacatctccgttggttgctcacaggttaaaaccaatcagacagaaaaccaaaaaggctgtggtgagcatacttgattcagaggaggtgtgtgtggagcttgtaaaggagtatgcatctcaagaatatgtgaaagaagttcttcagatatctagtgatggaaatacgatcactatttattatccaaatggtggtagaggttttcctcttgctgatagaccaccctcacctactgacaacatcagtaggtacagctttgacaatttaccagaaaaatactggcgaaaatatcaatatgcttccaggtttgtacagcttgtaagatctaaatctcccaaaatcacttattttacaagatatgctaaatgcattttgatggagaattctcctggtgctgattttgaggtttggttttatgatggggtaaaaatacacaaaacagaagatttcattcaggtgattgaaaagacagggaagtcttacactttaaaaagtgaaagtgaagttaatagcttgaaagaggagataaaaatgtatatggaccatgctaatgagggtcatcgtatttgtttagcactggaatccataatttcagaagaggaaaggaaaactaggagtgctccctttttcccaataatcataggaagaaaacctggtagtactagttcacctaaggccttatcacctcctccttctgtggattcaaattacccaacgagagagagagcatctttcaacagaatggtcatgcatagtgctgcttctccaacacaggcaccaatccttaatccctctatggttacaaatgaaggacttggtcttacaactacagcttctggaacagacatctcttctaatagtctaaaagattgtcttcctaaatcagcacaacttttgaaatctgtttttgtgaaaaatgttggttgggctacacagttaactagtggagctgtgtgggttcagtttaatgatgggtcccagttggttgtgcaggcaggagtgtcttctatcagttatacctcaccaaatggtcaaacaactaggtatggagaaaatgaaaaattaccagactacatcaaacagaaattacagtgtctgtcttccatccttttgatgttttctaatccgactcctaattttcattgattaaaactcctttcagacatataagtttaataaataacttttttgttgactttcaagtaaagtgattttttttaatttaacataaagtcttcagaaag

SEQ ID NO: 166933 - DNA, 596 bp, Homo sapiens
  Payload ID: 12863
  Gene Symbol: PLK4
  Gene Name: polo-like kinase 4
  ENST ID: ENST00000508113
  CDS Start-End: 1-596
ttcagatatctagtgatggaaatacgaaaaatactggcgaaaatatcaatatgcttccagggtcatcgtatttgtttagcactggaatccataatttcagaagaggaaaggaaaactaggagtgctccctttttcccaataatcataggaagaaaacctggtagtactagttcacctaaggccttatcacctcctccttctgtggattcaaattacccaacgagagagagagcatctttcaacagaatggtcatgcatagtgctgcttctccaacacaggcaccaatccttaatccctctatggttacaaatgaaggacttggtcttacaactacagcttctggaacagacatctcttctaatagtctaaaagattgtcttcctaaatcagcacaacttttgaaatctgtttttgtgaaaaatgttggttgggctacacagttaactagtggagctgtgtgggttcagtttaatgatgggtcccagttggttgtgcaggcaggagtgtcttctatcagttatacctcaccaaatggtcaaacaactaggtatggagaaaatgaaaaattaccagactacatcaaacagaaattaca

SEQ ID NO: 166934 - DNA, 900 bp, Homo sapiens
  Payload ID: 12864
  Gene Symbol: PLK5
  Gene Name: polo-like kinase 5
  Uniprot ID: Q496M5
  ENST ID: ENST00000588430
  CDS Start-End: 1-900
atgtacacggtgctgactggcaccccacccttcatggcctcacccctgtcggagatgtaccaaaacatccgtgagggccactaccccgaacccgctcacctgtctgccaatgcgcgccgcctcatcgtgcacctcctagcacccaacccggccgagcggcccagcctggaccacctgctgcaggacgacttcttcacacagggtttcactccagaccggctgccggcccactcctgccacagtccccccatcttcgccatacccccgcctctgggcaggatcttccggaaggtgggccagcggctgctcacccagtgccggccaccctgccccttcacgcctaaagaggcctcgggtccaggagaaggtgggccagaccctgactccatggagtgggacggcgagagctccctgtctgcgaaagaggttccctgcctggaaggccccatccacctggtcgcacaagggaccctgcagagtgacctggccgggcccgaggggagccggcggccagaggtggaggcggccctcagacacctgcagctgtgcctggatgtaggccccccggccacacaggaccccctgggagagcagcagcccatcctctgggcccccaaatgggtggattattccagcaaatacggctttggctaccagctcttggacggggggcgcacgggacggcacccacatggccctgcgaccccccggagggtgagcttcagtggagtcccggcccaactggtgctgagtggcgagggtgagggtttgcagctcaccctctgggagcaggggtcccctggcacctcctactccctggacgtcccgcggagccacggctgcgcccccaccaccggacagcaccttcaccacgccctccgcatgctgcagagtatctag

SEQ ID NO: 166935 - DNA, 2106 bp, Homo sapiens
  Payload ID: 12864
  Gene Symbol: PLK5
  Gene Name: polo-like kinase 5
  Uniprot ID: Q496M5
  ENST ID: ENST00000334770
  CDS Start-End: 890-1900
tgggtgttgtgttgtgtgtccatgcatggtgactctgtgtctgggcgttgcgtgtttgtgtgtcgtattcaggcgtggtgttgtgcatccggtgctgtcttctggtccgtggcctctatgcaccaggcgtggatgtgtctgtgtctgtgtctctgtgccttcttgtgtgcatcatgtcttgtgtgtccaggcgggagggtgggagctgtgtgttgttttttccccggtgtgtgtgtggagagacctggacgcgcctgcgtccctggctgccctgtgcctctgtacgcgctgccagcttgcacacccgtgcacacctgcccactgatctgctgacccctccccacagggcgccttcagccgctgctacaagctgacagacatgtccaccagcgccgtgttcgccctcaaggtggtgccgtgtggcggggctggggccgggtggcttcgcccgcagggaaaggtggagcgtgagattgccctgcatagccgcctgcgaccccgcaacatcgtggctttccacggacactttgctgaccgcgaccacgtgtacatggtgctggagtactgcagccgccagtctttggcccacgtgctgagggcgcggcagatcctgacggagccagaagtgcgcgactacctgcggggcctggtcagcggcctgcgctacctgcaccagcggtgcatcctgcaccgcgacctgaagctcagtaacttcttccttaacaagaacatggaggtgaagattggagacctgggactggcggccaaggtggggccagggggccgctgccacagagtactctgtgggacccctaacttcctggaccctgaggttgtctccagaaacggtcactcctgccagtaggacatctgggctctgggctgcatcatgtacacggtgctgactggcaccccacccttcatggcctcacccctgtcggagatgtaccaaaacatccgtgagggccactaccccgaacccgctcacctgtctgccaatgcgcgccgcctcatcgtgcacctcctagcacccaacccggccgagcggcccagcctggaccacctgctgcaggacgacttcttcacacagggtttcactccagaccggctgccggcccactcctgccacagtccccccatcttcgccatacccccgcctctgggcaggatcttccggaaggtgggccagcggctgctcacccagtgccggccaccctgccccttcacgcctaaagaggcctcgggtccaggagaaggtgggccagaccctgactccatggagtgggacggcgagagctccctgtctgcgaaagaggttccctgcctggaaggccccatccacctggtcgcacaagggaccctgcagagtgacctggccgggcccgaggggagccggcggccagaggtggaggcggccctcagacacctgcagctgtgcctggatgtaggccccccggccacacaggaccccctgggagagcagcagcccatcctctgggcccccaaatgggtggattattccagcaaatacggctttggctaccagctcttggacggggggcgcacgggacggcacccacatggccctgcgaccccccggagggaggggaccctccccacacctgtgccacctgctggacccggcctctgcctcctgcgcttcctggcctctgagcacgccctgctgctgctgttcagcaatgggatggtgcaggtgagcttcagtggagtcccggcccaactggtgctgagtggcgagggtgagggtttgcagctcaccctctgggagcaggggtcccctggcacctcctactccctggacgtcccgcggagccacggctgcgcccccaccaccggacagcaccttcaccacgccctccgcatgctgcagagtatctagtgcccctgagggtcagagtggacccctgcatggtagtgccagggacccaggctccatttccattcctgtggctcccccagaggggctgtcctgggggagggctggggggcacacgggaggtgggttcttgccttgtggcatgactgttcaacccagactttgctgggatctcttcctttttcattaaagacaatttgaaatgctgt

SEQ ID NO: 166936 - DNA, 1930 bp, Homo sapiens
  Payload ID: 12864
  Gene Symbol: PLK5
  Gene Name: polo-like kinase 5
  Uniprot ID: Q496M5
  ENST ID: ENST00000454744
  CDS Start-End: 717-1727
ctcagagcggccccggagcggccgcagcgcggtggtctcggcccggctgcgccagagtccgcgcgatggagccccggccgcggcggcggcgcaggagtcgccccctggtcgccgccttcctgcgagacccgggctcgggccgcgtgtacaggcgcgggaagctgatcggcaagggcgccttcagccgctgctacaagctgacagacatgtccaccagcgccgtgttcgccctcaaggtggtgccgtgtggcggggctggggccgggtggcttcgcccgcagggaaaggtggagcgtgagattgccctgcatagccgcctgcgaccccgcaacatcgtggctttccacggacactttgctgaccgcgaccacgtgtacatggtgctggagtactgcagccgccagtctttggcccacgtgctgagggcgcggcagatcctgacggagccagaagtgcgcgactacctgcggggcctggtcagcggcctgcgctacctgcaccagcggtgcatcctgcaccgcgacctgaagctcagtaacttcttccttaacaagaacatggaggtgaagattggagacctgggactggcggccaaggtggggccagggggccgctgccacagagtactctgtgggacccctaacttcctggaccctgaggttgtctccagaaacggtcactcctgccagtaggacatctgggctctgggctgcatcatgtacacggtgctgactggcaccccacccttcatggcctcacccctgtcggagatgtaccaaaacatccgtgagggccactaccccgaacccgctcacctgtctgccaatgcgcgccgcctcatcgtgcacctcctagcacccaacccggccgagcggcccagcctggaccacctgctgcaggacgacttcttcacacagggtttcactccagaccggctgccggcccactcctgccacagtccccccatcttcgccatacccccgcctctgggcaggatcttccggaaggtgggccagcggctgctcacccagtgccggccaccctgccccttcacgcctaaagaggcctcgggtccaggagaaggtgggccagaccctgactccatggagtgggacggcgagagctccctgtctgcgaaagaggttccctgcctggaaggccccatccacctggtcgcacaagggaccctgcagagtgacctggccgggcccgaggggagccggcggccagaggtggaggcggccctcagacacctgcagctgtgcctggatgtaggccccccggccacacaggaccccctgggagagcagcagcccatcctctgggcccccaaatgggtggattattccagcaaatacggctttggctaccagctcttggacggggggcgcacgggacggcacccacatggccctgcgaccccccggagggaggggaccctccccacacctgtgccacctgctggacccggcctctgcctcctgcgcttcctggcctctgagcacgccctgctgctgctgttcagcaatgggatggtgcaggtgagcttcagtggagtcccggcccaactggtgctgagtggcgagggtgagggtttgcagctcaccctctgggagcaggggtcccctggcacctcctactccctggacgtcccgcggagccacggctgcgcccccaccaccggacagcaccttcaccacgccctccgcatgctgcagagtatctagtgcccctgagggtcagagtggacccctgcatggtagtgccagggacccaggctccatttccattcctgtggctcccccagaggggctgtcctgggggagggctggggggcacacgggaggtgggttcttgccttgtggcatgactgttcaacccagactttgctgggatctcttcctttttcattaaagacaatttgaaatgc

SEQ ID NO: 166937 - DNA, 4128 bp, Homo sapiens
  Payload ID: 12865
  Gene Symbol: PARG
  Gene Name: poly (ADP-ribose) glycohydrolase
  Uniprot ID: Q86W56
  ENST ID: ENST00000402038
  CDS Start-End: 137-3067
ggcagaggctgcaatctcggcactttgggaggccaaggcaggcgctgagaaggaggcgcagtccatctctctcagggttagtgaatgaggctctccgcccgggccggcccggggacagtgcgctgctggtcccagcatgaatgcgggccccggctgtgaaccctgcaccaagcgaccccgctggggcgccgctacaacttcgccggctgcttcggacgcccggagctttcccagcaggcagaggcgcgtcctcgaccccaaggacgctcacgtgcagttcagggtcccaccgtcctcgccagcctgcgtcccagggcgggcgggacagcacagaggcagcgccacctcgcttgttttcaaacaaaagactattaccagttggatggacactaaaggaatcaagacagcggaatcagaaagtttggatagtaaagaaaacaacaatacaagaatagaatccatgatgagttctgtacaaaaagataacttttaccaacataatgtagaaaaattagaaaatgtttctcagctaagtcttgataagtcacccactgaaaaaagtacacagtatttgaaccagcatcagactgcagcaatgtgtaagtggcaaaatgaagggaaacacacggagcagcttttggaaagtgaacctcaaacagtaaccctggtaccagagcagtttagtaatgctaacattgatcggtcacctcaaaatgatgatcacagtgacacagatagtgaagagaatagagacaatcaacagtttctcacaactgtaaagcttgcaaatgcaaagcagactacagaagatgaacaggccagagaagccaaaagccaccagaagtgcagcaagtcttgcgatcctggggaagactgtgcaagttgtcagcaagatgagatagatgtggtgccagagagtccattgtcagatgttggctctgaggatgttggtactgggccaaaaaatgacaacaaattgactagacaagaaagttgcctaggaaattctcctccatttgagaaggaaagtgaacccgagtcaccgatggatgtggataattctaaaaatagttgtcaagactcagaagcagatgaggagacaagtccaggttttgatgaacaagaagatggtagttcctcccaaacagcaaataaaccttcaaggttccaagcaagagacgctgacattgaatttaggaaacggtactctactaagggcggtgaagttagattacatttccaatttgaaggaggagagagtcgcactggaatgaatgatttaaatgctaaactacctggaaatatttctagcctgaatgtagaatgcagaaattctaagcaacatggaaaaaaggattctaaaatcacagatcatttcatgagactgcccaaagcagaggacagaagaaaagaacagtgggaaaccaaacatcaaagaacagaaaggaagatccctaaatacgttccacctcacctttctccagataagaagtggcttggaactcccattgaggagatgagaagaatgcctcggtgtgggatccggctgcctctcttgagaccatctgccaatcacacagtaactattcgggtagatcttttgcgagcaggagaagttcctaaaccttttccaacacattataaagatttgtgggataacaagcatgttaaaatgccttgttcagaacaaaatttgtacccagtggaagatgagaatggtgagcgaactgcggggagccggtgggagctcattcagactgcacttctcaacaaatttacacgaccccaaaacttgaaggatgctattctgaaatacaatgtggcatattctaagaaatgggactttacagctttgatcgatttctgggataaggtacttgaagaagcagaagctcaacatttatatcagtccatcttgcctgatatggtgaaaattgcactctgtctgccaaatatttgcacccagccaataccactcctgaaacagaagatgaatcattccatcacaatgtcgcaggaacagattgccagtcttttagctaatgctttcttctgcacatttccacgacgaaatgctaagatgaaatcggagtattctagttacccagacattaacttcaatcgattgtttgagggacgttcatcaaggaaaccggagaaacttaaaacgctcttctgctactttagaagagtcacagagaaaaaacctactgggttggtgacatttacaagacagagtcttgaagattttccagaatgggaaagatgtgaaaaacccttgacacgattgcatgtcacttacgaaggtaccatagaagaaaatggccaaggcatgctacaggtggattttgcaaatcgttttgttggaggtggtgtaaccagtgcaggacttgtgcaagaagaaatccgctttttaatcaatcctgagttgattatttcacggctcttcactgaggtgctggatcacaatgaatgtctaattatcacaggtactgagcagtacagtgaatacacaggctatgctgagacatatcgttggtcccggagccacgaagatgggagtgaaagggacgactggcagcggcgctgcactgagatcgttgccatcgatgctcttcacttcagacgctacctcgatcagtttgtgcctgagaaaatgagacgcgagctgaacaaggcttactgtggatttctccgtcctggagtttcttcagagaatctttctgcagtggccacaggaaactggggctgtggtgcctttgggggtgatgccaggttaaaagccttaatacagatattggcagctgctgcagctgagcgagatgtggtttatttcacctttggggactcagaattgatgagagacatttacagcatgcacattttccttactgaaaggaaactcactgttggagatgtgtataagctgttgctacgatactacaatgaagaatgcagaaactgttccacccctggaccagacatcaagctttatccattcatataccatgctgtcgagtcctgtgcagagaccgctgaccattcagggcaaaggacagggacctgaggagccgagcgaatagcatctcctcccacctcccaccagagacgtcctgtttgagctgtcaggtgtaatatatgaattgacttaagttaatataaatgtgtacataatccacatttgtagtcaaggacgcaatctcttccacacatgtgcagttgtcagttggtacatctaaactccctccatcctgactcacgtggacttagatatgttttgtttctattttcttctatttcagtttttcattctttgatgtttatttcttttgtccatcagatctcttgtgaaatcccatggaaggttgtgctcagcctgtcgggtctctttcttcctgcccatatattataccagttgcttctgcagcccgcagatgccagcgatgccaggaaacaagttgaaatccaggaatctctttaactgattttgctaaaaatctccctgtgagccttccactcaactcttaatatgcttgcattgtttaagtttttaaattctgaaaattaataattagggtttttttcatatgtgttgcataatgcaaacctcctaggttaaaatagtttctttatttaagatagaataatttccagaaattgtacttttgaggtatcatttttatctgtaatggtttgtctgtcttttttcctctgatcagtatttttttataccagttttggagactggctgagatgaaaggaaatgtggaataaaaggaggttttcctgatgtggtgtaaagaaaacagattcaagagaattgaagattttttttgtttcttggtacttttttctttttaaattaggactaatgtttcttttgtggtgcttgaggcatattcatataaccaaagtttgagaactgggaacttcatgctgatttgtacatattgaagtttctctggtattcaaaggttatatagtgaatgaattttcattaataaatcactttgtcagaaactcccatatcatctatattttatatatgtatatataaacgtatgctctttaagtgtgtctatatgtgagcacataaaatctaaataaaattggactggtgggaaacaa

SEQ ID NO: 166938 - DNA, 3473 bp, Homo sapiens
  Payload ID: 12865
  Gene Symbol: PARG
  Gene Name: poly (ADP-ribose) glycohydrolase
  ENST ID: ENST00000614063
  CDS Start-End: 262-513
ccggtggtgggaaagtgaacgaatcccgaatcaaagcggcgcattgaggcaggtggggtgccagtggaagagggaaggcaggcgagtgtttacggcctgacttgggaggccggcggatcagcaattgcagaagcaggcagcggcagagagggaatggtgcaggcaggcgctgagaaggaggcgcagtccatctctctcagggttagtgaatgaggctctccgcccgggccggcccggggacagtgcgctgctggtcccagcatgaatgcgggccccggctgtgaaccctgcaccaagcgaccccgctggggcgccgctacaacttcgccggctgcttcggacgcccggagctttcccagcaggcagaggcgcgtcctcgaccccaaggacgctcacgtgcagttcagggtcccaccgtcctcgccagcctgcgtcccagggcgggcgggacagcacagaggcagcgccacctcgcttgtttggatagtaaagaaaacaacaatacaagaatagaatccatgatgagttctgtacaaaaagataacttttaccaacataatgtagaaaaattagaaaatgtttctcagctaagtcttgataagtcacccactgaaaaaagtacacagtatttgaaccagcatcagactgcagcaatgtgtaagtggcaaaatgaagggaaacacacggagcagcttttggaaagtgaacctcaaacagtaaccctggtaccagagcagtttagtaatgctaacattgatcggtcacctcaaaatgatgatcacagtgacacagatagtgaagagaatagagacaatcaacagtttctcacaactgtaaagcttgcaaatgcaaagcagactacagaagatgaacaggccagagaagccaaaagccaccagaagtgcagcaagtcttgcgatcctggggaagactgtgcaagttgtcagcaagatgagatagatgtggtgccagagagtccattgtcagatgttggctctgaggatgttggtactgggccaaaaaatgacaacaaattgactagacaagaaagttgcctaggaaattctcctccatttgagaaggaaagtgaacccgagtcaccgatggatgtggataattctaaaaatagttgtcaagactcagaagcagatgaggagacaagtccaggttttgatgaacaagaagatggtagttcctcccaaacagcaaataaaccttcaaggttccaagcaagagacgctgacattgaatttaggaaacggtactctactaagggcggtgaagttagattacatttccaatttgaaggaggagagagtcgcactggaatgaatgatttaaatgctaaactacctggaaatatttctagcctgaatgtagaatgcagaaattctaagcaacatggaaaaaaggattctaaaatcacagatcatttcatgagactgcccaaagcagaggacagaagaaaagaacagtgggaaaccaaacatcaaagaacagaaaggaagatccctaaatacgttccacctcacctttctccagataagaagtggcttggaactcccattgaggagatgagaagaatgcctcggtgtgggatccggctgcctctcttgagaccatctgccaatcacacagtaactattcgggtagatcttttgcgagcaggagaagttcctaaaccttttccaacacattataaagatttgtgggataacaagcatgttaaaatgccttgttcagaacaaaatttgtacccagtggaagatgagaatggtgagcgaactgcggggagccggtgggagctcattcagactgcacttctcaacaaatttacacgaccccaaaacttgaaggatgctattctgaaatacaatgtggcatattctaagaaatgggactttacagctttgatcgatttctgggataaggtacttgaagaagcagaagctcaacatttatatcagtccatcttgcctgatatggtgaaaattgcactctgtctgccaaatatttgcacccagccaataccactcctgaaacagaagatgaatcattccatcacaatgtcgcaggaacagattgccagtcttttagctaatgctttcttctgcacatttccacgacgaaatgctaagatgaaatcggagtattctagttacccagacattaacttcaatcgattgtttgagggacgttcatcaaggaaaccggagaaacttaaaacgctcttctgctactttagaagagtcacagagaaaaaacctactgggttggtgacatttacaagacagagtcttgaagattttccagaatgggaaagatgtgaaaaacccttgacacgattgcatgtcacttacgaaggtaccatagaagaaaatggccaaggcatgctacaggtggattttgcaaatcgttttgttggaggtggtgtaaccagtgcaggacttgtgcaagaagaaatccgctttttaatcaatcctgagttgattatttcacggctcttcactgaggtgctggatcacaatgaatgtctaattatcacaggtactgagcagtacagtgaatacacaggctatgctgagacatatcgttggtcccggagccacgaagatgggagtgaaagggacgactggcagcggcgctgcactgagatcgttgccatcgatgctcttcacttcagacgctacctcgatcagtttgtgcctgagaaaatgagacgcgagctgaacaaggcttactgtggatttctccgtcctggagtttcttcagagaatctttctgcagtggccacaggaaactggggctgtggtgcctttgggggtgatgccaggttaaaagccttaatacagatattggcagctgctgcagctgagcgagatgtggtttatttcacctttggggactcagaattgatgagagacatttacagcatgcacattttccttactgaaaggaaactcactgttggagatgtgtataagctgttgctacgatactacaatgaagaatgcagaaactgttccacccctggaccagacatcaagctttatccattcatataccatgctgtcgagtcctgtgcagagaccgctgaccattcagggcaaaggacagggacctgaggagccgagcgaatagcatctcctcccacctcccaccagagacgtcctgtttgagctgtcaggtgtaatatatgaattgacttaagttaatataaatgtgtacataatccacatttgtagtcaaggacgcaatctcttccacacatgtgcagttgtcagttggtacatctaaactccctccatcctgactcacgtggacttagatatgttttgtttctattttcttctatttcagtttttcattctttgatgtttatttcttttgtccatcagatctcttgtgaaatcccatggaaggttgtgctcagcctgtcgggtctctttcttcctgcccatatattataccag

SEQ ID NO: 166939 - DNA, 1487 bp, Homo sapiens
  Payload ID: 12865
  Gene Symbol: PARG
  Gene Name: poly (ADP-ribose) glycohydrolase
  ENST ID: ENST00000610922
  CDS Start-End: 274-507
gacggcagctttccggtggtgggaaagtgaacgaatcccgaatcaaagcggcgcattgaggcaggtggggtgccagtggaagagggaaggcaggcgagtgtttacggcctgacttgggaggccggcggatcagcaattgcagaagcaggcagcggcagagagggaatggtgcaggcaggcgctgagaaggaggcgcagtccatctctctcagggttagtgaatgaggctctccgcccgggccggcccggggacagtgcgctgctggtcccagcatgaatgcgggccccggctgtgaaccctgcaccaagcgaccccgctggggcgccgctacaacttcgccggctgcttcggacgcccggagctttcccagcaggcagaggcgcgtcctcgaccccaaggacgctcacgtgcagttcagggtcccaccgtcctcgccagcctgcgtcccagggcgggcgggacagcacagaggcagcgccacctcgcttgatgtgaaaaacccttgacacgattgcatgtcacttacgaaggtaccatagaagaaaatggccaaggcatgctacaggtggattttgcaaatcgttttgttggaggtggtgtaaccagtgcaggacttgtgcaagaagaaatccgctttttaatcaatcctgagttgattatttcacggctcttcactgaggtgctggatcacaatgaatgtctaattatcacaggtactgagcagtacagtgaatacacaggctatgctgagacatatcgttggtcccggagccacgaagatgggagtgaaagggacgactggcagcggcgctgcactgagatcgttgccatcgatgctcttcacttcagacgctacctcgatcagtttgtgcctgagaaaatgagacgcgagctgaacaaggcttactgtggatttctccgtcctggagtttcttcagagaatctttctgcagtggccacaggaaactggggctgtggtgcctttgggggtgatgccaggttaaaagccttaatacagatattggcagctgctgcagctgagcgagatgtggtttatttcacctttggggactcagaattgatgagagacatttacagcatgcacattttccttactgaaaggaaactcactgttggagatgtgtataagctgttgctacgatactacaatgaagaatgcagaaactgttccacccctggaccagacatcaagctttatccattcatataccatgctgtcgagtcctgtgcagagaccgctgaccattcagggcaaaggacagggacctgaggagccgagcgaatagcatctcctcccacctcccaccagagacgtcctgtttgagctgtcaggtgtaatatatgaattgacttaagttaatataaatgtgtacataatccacatttgtagtcaaggacgcaatctcttccacacatgtgcagttgtcagttggtacatctaaactccctccatcctgactcacgt

SEQ ID NO: 166940 - DNA, 3197 bp, Homo sapiens
  Payload ID: 12865
  Gene Symbol: PARG
  Gene Name: poly (ADP-ribose) glycohydrolase
  Uniprot ID: Q86W56
  ENST ID: ENST00000616448
  CDS Start-End: 261-3191
cggtggtgggaaagtgaacgaatcccgaatcaaagcggcgcattgaggcaggtggggtgccagtggaagagggaaggcaggcgagtgtttacggcctgacttgggaggccggcggatcagcaattgcagaagcaggcagcggcagagagggaatggtgcaggcaggcgctgagaaggaggcgcagtccatctctctcagggttagtgaatgaggctctccgcccgggccggcccggggacagtgcgctgctggtcccagcatgaatgcgggccccggctgtgaaccctgcaccaagcgaccccgctggggcgccgctacaacttcgccggctgcttcggacgcccggagctttcccagcaggcagaggcgcgtcctcgaccccaaggacgctcacgtgcagttcagggtcccaccgtcctcgccagcctgcgtcccagggcgggcgggacagcacagaggcagcgccacctcgcttgttttcaaacaaaagactattaccagttggatggacactaaaggaatcaagacagcggaatcagaaagtttggatagtaaagaaaacaacaatacaagaatagaatccatgatgagttctgtacaaaaagataacttttaccaacataatgtagaaaaattagaaaatgtttctcagctaagtcttgataagtcacccactgaaaaaagtacacagtatttgaaccagcatcagactgcagcaatgtgtaagtggcaaaatgaagggaaacacacggagcagcttttggaaagtgaacctcaaacagtaaccctggtaccagagcagtttagtaatgctaacattgatcggtcacctcaaaatgatgatcacagtgacacagatagtgaagagaatagagacaatcaacagtttctcacaactgtaaagcttgcaaatgcaaagcagactacagaagatgaacaggccagagaagccaaaagccaccagaagtgcagcaagtcttgcgatcctggggaagactgtgcaagttgtcagcaagatgagatagatgtggtgccagagagtccattgtcagatgttggctctgaggatgttggtactgggccaaaaaatgacaacaaattgactagacaagaaagttgcctaggaaattctcctccatttgagaaggaaagtgaacccgagtcaccgatggatgtggataattctaaaaatagttgtcaagactcagaagcagatgaggagacaagtccaggttttgatgaacaagaagatggtagttcctcccaaacagcaaataaaccttcaaggttccaagcaagagacgctgacattgaatttaggaaacggtactctactaagggcggtgaagttagattacatttccaatttgaaggaggagagagtcgcactggaatgaatgatttaaatgctaaactacctggaaatatttctagcctgaatgtagaatgcagaaattctaagcaacatggaaaaaaggattctaaaatcacagatcatttcatgagactgcccaaagcagaggacagaagaaaagaacagtgggaaaccaaacatcaaagaacagaaaggaagatccctaaatacgttccacctcacctttctccagataagaagtggcttggaactcccattgaggagatgagaagaatgcctcggtgtgggatccggctgcctctcttgagaccatctgccaatcacacagtaactattcgggtagatcttttgcgagcaggagaagttcctaaaccttttccaacacattataaagatttgtgggataacaagcatgttaaaatgccttgttcagaacaaaatttgtacccagtggaagatgagaatggtgagcgaactgcggggagccggtgggagctcattcagactgcacttctcaacaaatttacacgaccccaaaacttgaaggatgctattctgaaatacaatgtggcatattctaagaaatgggactttacagctttgatcgatttctgggataaggtacttgaagaagcagaagctcaacatttatatcagtccatcttgcctgatatggtgaaaattgcactctgtctgccaaatatttgcacccagccaataccactcctgaaacagaagatgaatcattccatcacaatgtcgcaggaacagattgccagtcttttagctaatgctttcttctgcacatttccacgacgaaatgctaagatgaaatcggagtattctagttacccagacattaacttcaatcgattgtttgagggacgttcatcaaggaaaccggagaaacttaaaacgctcttctgctactttagaagagtcacagagaaaaaacctactgggttggtgacatttacaagacagagtcttgaagattttccagaatgggaaagatgtgaaaaacccttgacacgattgcatgtcacttacgaaggtaccatagaagaaaatggccaaggcatgctacaggtggattttgcaaatcgttttgttggaggtggtgtaaccagtgcaggacttgtgcaagaagaaatccgctttttaatcaatcctgagttgattatttcacggctcttcactgaggtgctggatcacaatgaatgtctaattatcacaggtactgagcagtacagtgaatacacaggctatgctgagacatatcgttggtcccggagccacgaagatgggagtgaaagggacgactggcagcggcgctgcactgagatcgttgccatcgatgctcttcacttcagacgctacctcgatcagtttgtgcctgagaaaatgagacgcgagctgaacaaggcttactgtggatttctccgtcctggagtttcttcagagaatctttctgcagtggccacaggaaactggggctgtggtgcctttgggggtgatgccaggttaaaagccttaatacagatattggcagctgctgcagctgagcgagatgtggtttatttcacctttggggactcagaattgatgagagacatttacagcatgcacattttccttactgaaaggaaactcactgttggagatgtgtataagctgttgctacgatactacaatgaagaatgcagaaactgttccacccctggaccagacatcaagctttatccattcatataccatgctgtcgagtcctgtgcagagaccgctgaccattcagggcaaaggacagggacctgaggagcc

SEQ ID NO: 166941 - DNA, 570 bp, Homo sapiens
  Payload ID: 12866
  Gene Symbol: PARP1
  Gene Name: poly (ADP-ribose) polymerase 1
  ENST ID: ENST00000366790
  CDS Start-End: 54-521
gtttctaggtcgtggcgtcgggcttccggagctttggcggcagctaggggaggatggcggagtcttcggataagctctatcgagtcgagtacgccaagagcgggcgcgcctcttgcaagaaatgcagcgagagcatccccaaggactcgctccggatggccatcatggtgcagtcgcccatgtttgatggaaaagtcccacactggtaccacttctcctgcttctggaaggtgggccactccatccggcaccctgacgttgaggtggatgggttctctgagcttcggtgggatgaccagcagaaagtcaagaagacagcggaagctggaggagtgacaggtgtgtacatactggggcagcatgggcattcagcccccaccctgaagctcccaggagggcctcgtctcagagagcaaagcaaacctcccccagcttgccctctcccacatgtgcagatcaagcgtatggtgcccatgttatttcagcaacacctcctggactcagcatcatctgttgcatgatatttggtattttgtttttccaggtgcttggaatgtagcctttaaagtt

SEQ ID NO: 166942 - DNA, 553 bp, Homo sapiens
  Payload ID: 12866
  Gene Symbol: PARP1
  Gene Name: poly (ADP-ribose) polymerase 1
  ENST ID: ENST00000366792
  CDS Start-End: 147-473
ggcggtggccggtgcggcgtgttcggtggcggctctggccgctcaggcgcctgcggctgggtgagcgcacgcgaggcggcgaggcggcagcgtgtttctaggtcgtggcgtcgggcttccggagctttggcggcagctaggggaggatggcggagtcttcggataagctctatcgagtcgagtacgccaagagcgggcgcgcctcttgcaagaaatgcagcgagagcatccccaaggactcgctccggatggccatcatggtgcagtcgcccatgtttgatggaaaagtcccacactggtaccacttctcctgcttctggaaggtgggccactccatccggcaccctgacgttgaggtggatgggttctctgagcttcggtgggatgaccagcagaaagtcaagaagacagcggaagctggaggagtgacagaacctccaataccatgtggaatagaagtgatgggaagatagcttcgtcttattcctaatcttaggcaaaggccaggatggaattggtagcaaggcagagaagactctgggtgactttgcag

SEQ ID NO: 166943 - DNA, 3958 bp, Homo sapiens
  Payload ID: 12866
  Gene Symbol: PARP1
  Gene Name: poly (ADP-ribose) polymerase 1
  Uniprot ID: P09874
  ENST ID: ENST00000366794
  CDS Start-End: 145-3189
cggtggccggtgcggcgtgttcggtggcggctctggccgctcaggcgcctgcggctgggtgagcgcacgcgaggcggcgaggcggcagcgtgtttctaggtcgtggcgtcgggcttccggagctttggcggcagctaggggaggatggcggagtcttcggataagctctatcgagtcgagtacgccaagagcgggcgcgcctcttgcaagaaatgcagcgagagcatccccaaggactcgctccggatggccatcatggtgcagtcgcccatgtttgatggaaaagtcccacactggtaccacttctcctgcttctggaaggtgggccactccatccggcaccctgacgttgaggtggatgggttctctgagcttcggtgggatgaccagcagaaagtcaagaagacagcggaagctggaggagtgacaggcaaaggccaggatggaattggtagcaaggcagagaagactctgggtgactttgcagcagagtatgccaagtccaacagaagtacgtgcaaggggtgtatggagaagatagaaaagggccaggtgcgcctgtccaagaagatggtggacccggagaagccacagctaggcatgattgaccgctggtaccatccaggctgctttgtcaagaacagggaggagctgggtttccggcccgagtacagtgcgagtcagctcaagggcttcagcctccttgctacagaggataaagaagccctgaagaagcagctcccaggagtcaagagtgaaggaaagagaaaaggcgatgaggtggatggagtggatgaagtggcgaagaagaaatctaaaaaagaaaaagacaaggatagtaagcttgaaaaagccctaaaggctcagaacgacctgatctggaacatcaaggacgagctaaagaaagtgtgttcaactaatgacctgaaggagctactcatcttcaacaagcagcaagtgccttctggggagtcggcgatcttggaccgagtagctgatggcatggtgttcggtgccctccttccctgcgaggaatgctcgggtcagctggtcttcaagagcgatgcctattactgcactggggacgtcactgcctggaccaagtgtatggtcaagacacagacacccaaccggaaggagtgggtaaccccaaaggaattccgagaaatctcttacctcaagaaattgaaggttaaaaaacaggaccgtatattccccccagaaaccagcgcctccgtggcggccacgcctccgccctccacagcctcggctcctgctgctgtgaactcctctgcttcagcagataagccattatccaacatgaagatcctgactctcgggaagctgtcccggaacaaggatgaagtgaaggccatgattgagaaactcggggggaagttgacggggacggccaacaaggcttccctgtgcatcagcaccaaaaaggaggtggaaaagatgaataagaagatggaggaagtaaaggaagccaacatccgagttgtgtctgaggacttcctccaggacgtctccgcctccaccaagagccttcaggagttgttcttagcgcacatcttgtccccttggggggcagaggtgaaggcagagcctgttgaagttgtggccccaagagggaagtcaggggctgcgctctccaaaaaaagcaagggccaggtcaaggaggaaggtatcaacaaatctgaaaagagaatgaaattaactcttaaaggaggagcagctgtggatcctgattctggactggaacactctgcgcatgtcctggagaaaggtgggaaggtcttcagtgccacccttggcctggtggacatcgttaaaggaaccaactcctactacaagctgcagcttctggaggacgacaaggaaaacaggtattggatattcaggtcctggggccgtgtgggtacggtgatcggtagcaacaaactggaacagatgccgtccaaggaggatgccattgagcacttcatgaaattatatgaagaaaaaaccgggaacgcttggcactccaaaaatttcacgaagtatcccaaaaagttctaccccctggagattgactatggccaggatgaagaggcagtgaagaagctgacagtaaatcctggcaccaagtccaagctccccaagccagttcaggacctcatcaagatgatctttgatgtggaaagtatgaagaaagccatggtggagtatgagatcgaccttcagaagatgcccttggggaagctgagcaaaaggcagatccaggccgcatactccatcctcagtgaggtccagcaggcggtgtctcagggcagcagcgactctcagatcctggatctctcaaatcgcttttacaccctgatcccccacgactttgggatgaagaagcctccgctcctgaacaatgcagacagtgtgcaggccaaggtggaaatgcttgacaacctgctggacatcgaggtggcctacagtctgctcaggggagggtctgatgatagcagcaaggatcccatcgatgtcaactatgagaagctcaaaactgacattaaggtggttgacagagattctgaagaagccgagatcatcaggaagtatgttaagaacactcatgcaaccacacacaatgcgtatgacttggaagtcatcgatatctttaagatagagcgtgaaggcgaatgccagcgttacaagccctttaagcagcttcataaccgaagattgctgtggcacgggtccaggaccaccaactttgctgggatcctgtcccagggtcttcggatagccccgcctgaagcgcccgtgacaggctacatgtttggtaaagggatctatttcgctgacatggtctccaagagtgccaactactgccatacgtctcagggagacccaataggcttaatcctgttgggagaagttgcccttggaaacatgtatgaactgaagcacgcttcacatatcagcaagttacccaagggcaagcacagtgtcaaaggtttgggcaaaactacccctgatccttcagctaacattagtctggatggtgtagacgttcctcttgggaccgggatttcatctggtgtgaatgacacctctctactatataacgagtacattgtctatgatattgctcaggtaaatctgaagtatctgctgaaactgaaattcaattttaagacctccctgtggtaattgggagaggtagccgagtcacacccggtggctctggtatgaattcacccgaagcgcttctgcaccaactcacctggccgctaagttgctgatgggtagtacctgtactaaaccacctcagaaaggattttacagaaacgtgttaaaggttttctctaacttctcaagtcccttgttttgtgttgtgtctgtggggaggggttgttttggggttgtttttgttttttcttgccaggtagataaaactgacatagagaaaaggctggagagagattctgttgcatagactagtcctatggaaaaaaccaagcttcgttagaatgtctgccttactggtttccccagggaaggaaaaatacacttccacccttttttctaagtgttcgtctttagttttgattttggaaagatgttaagcatttatttttagttaaaaataaaaactaatttcatactatttagattttcttttttatcttgcacttattgtcccctttttagttttttttgtttgcctcttgtggtgaggggtgtgggaagaccaaaggaaggaacgctaacaatttctcatacttagaaacaaaaagagctttccttctccaggaatactgaacatgggagctcttgaaatatgtagtattaaaagttgcatttgaaattcttgactttcttatgggcacttttgtcttccaaattaaaactctaccacaaatatacttacccaagggctaatagtaatactcgattaaaaatgcagatgccttctcta

SEQ ID NO: 166944 - DNA, 477 bp, Homo sapiens
  Payload ID: 12866
  Gene Symbol: PARP1
  Gene Name: poly (ADP-ribose) polymerase 1
  ENST ID: ENST00000629232
  CDS Start-End: 151-477
gaacggcggtggccggtgcggcgtgttcggtggcggctctggccgctcaggcgcctgcggctgggtgagcgcacgcgaggcggcgaggcggcagcgtgtttctaggtcgtggcgtcgggcttccggagctttggcggcagctaggggaggatggcggagtcttcggataagctctatcgagtcgagtacgccaagagcgggcgcgcctcttgcaagaaatgcagcgagagcatccccaaggactcgctccggatggccatcatggtgcagtcgcccatgtttgatggaaaagtcccacactggtaccacttctcctgcttctggaaggtgggccactccatccggcaccctgacgttgaggtggatgggttctctgagcttcggtgggatgaccagcagaaagtcaagaagacagcggaagctggaggagtgacagaacctccaataccatgtggaatagaagtgatgggaagatag

SEQ ID NO: 166945 - DNA, 1886 bp, Homo sapiens
  Payload ID: 12867
  Gene Symbol: PARP2
  Gene Name: poly (ADP-ribose) polymerase 2
  Uniprot ID: Q9UGN5
  ENST ID: ENST00000250416
  CDS Start-End: 28-1779
ggttgatgacgtcagcgttcgaattccatggcggcgcggcggcgacggagcaccggcggcggcagggcgagagcattaaatgaaagcaaaagagttaataatggcaacacggctccagaagactcttcccctgccaagaaaactcgtagatgccagagacaggagtcgaaaaagatgcctgtggctggaggaaaagctaataaggacaggacagaagacaagcaagatggtatgccaggaaggtcatgggccagcaaaagggtctctgaatctgtgaaggccttgctgttaaagggcaaagctcctgtggacccagagtgtacagccaaggtggggaaggctcatgtgtattgtgaaggaaatgatgtctatgatgtcatgctaaatcagaccaatctccagttcaacaacaacaagtactatctgattcagctattagaagatgatgcccagaggaacttcagtgtttggatgagatggggccgagttgggaaaatgggacagcacagcctggtggcttgttcaggcaatctcaacaaggccaaggaaatctttcagaagaaattccttgacaaaacgaaaaacaattgggaagatcgagaaaagtttgagaaggtgcctggaaaatatgatatgctacagatggactatgccaccaatactcaggatgaagaggaaacaaagaaagaggaatctcttaaatctcccttgaagccagagtcacagctagatcttcgggtacaggagttaataaagttgatctgtaatgttcaggccatggaagaaatgatgatggaaatgaagtataataccaagaaagccccacttgggaagctgacagtggcacaaatcaaggcaggttaccagtctcttaagaagattgaggattgtattcgggctggccagcatggacgagctctcatggaagcatgcaatgaattctacaccaggattccgcatgactttggactccgtactcctccactaatccggacacagaaggaactgtcagaaaaaatacaattactagaggctttgggagacattgaaattgctattaagctggtgaaaacagagctacaaagcccagaacacccattggaccaacactatagaaacctacattgtgccttgcgcccccttgaccatgaaagttatgagttcaaagtgatttcccagtacctacaatctacccatgctcccacacacagcgactataccatgaccttgctggatttgtttgaagtggagaaggatggtgagaaagaagccttcagagaggaccttcataacaggatgcttctatggcatggttccaggatgagtaactgggtgggaatcttgagccatgggcttcgaattgccccacctgaagctcccatcacaggttacatgtttgggaaaggaatctactttgctgacatgtcttccaagagtgccaattactgctttgcctctcgcctaaagaatacaggactgctgctcttatcagaggtagctctaggtcagtgtaatgaactactagaggccaatcctaaggccgaaggattgcttcaaggtaaacatagcaccaaggggctgggcaagatggctcccagttctgcccacttcgtcaccctgaatgggagtacagtgccattaggaccagcaagtgacacaggaattctgaatccagatggttataccctcaactacaatgaatatattgtatataaccccaaccaggtccgtatgcggtaccttttaaaggttcagtttaatttccttcagctgtggtgaatgttgatattaaataaaccagagatctgatcttcaagcaagaaaataagcagtgttgtacttgtgaattttgtgatattttatgtaataaaaactgtacaggtcta

SEQ ID NO: 166946 - DNA, 1881 bp, Homo sapiens
  Payload ID: 12867
  Gene Symbol: PARP2
  Gene Name: poly (ADP-ribose) polymerase 2
  Uniprot ID: Q9UGN5
  ENST ID: ENST00000429687
  CDS Start-End: 61-1773
ctagtgacactgggcccgcgattccttggagcgggttgatgacgtcagcgttcgaattccatggcggcgcggcggcgacggagcaccggcggcggcagggcgagagcattaaatgaaagcaaaagagttaataatggcaacacggctccagaagactcttcccctgccaagaaaactcgtagatgccagagacaggagtcgaaaaagatgcctgtggctggaggaaaagctaataaggacaggacagaagacaagcaagatgaatctgtgaaggccttgctgttaaagggcaaagctcctgtggacccagagtgtacagccaaggtggggaaggctcatgtgtattgtgaaggaaatgatgtctatgatgtcatgctaaatcagaccaatctccagttcaacaacaacaagtactatctgattcagctattagaagatgatgcccagaggaacttcagtgtttggatgagatggggccgagttgggaaaatgggacagcacagcctggtggcttgttcaggcaatctcaacaaggccaaggaaatctttcagaagaaattccttgacaaaacgaaaaacaattgggaagatcgagaaaagtttgagaaggtgcctggaaaatatgatatgctacagatggactatgccaccaatactcaggatgaagaggaaacaaagaaagaggaatctcttaaatctcccttgaagccagagtcacagctagatcttcgggtacaggagttaataaagttgatctgtaatgttcaggccatggaagaaatgatgatggaaatgaagtataataccaagaaagccccacttgggaagctgacagtggcacaaatcaaggcaggttaccagtctcttaagaagattgaggattgtattcgggctggccagcatggacgagctctcatggaagcatgcaatgaattctacaccaggattccgcatgactttggactccgtactcctccactaatccggacacagaaggaactgtcagaaaaaatacaattactagaggctttgggagacattgaaattgctattaagctggtgaaaacagagctacaaagcccagaacacccattggaccaacactatagaaacctacattgtgccttgcgcccccttgaccatgaaagttatgagttcaaagtgatttcccagtacctacaatctacccatgctcccacacacagcgactataccatgaccttgctggatttgtttgaagtggagaaggatggtgagaaagaagccttcagagaggaccttcataacaggatgcttctatggcatggttccaggatgagtaactgggtgggaatcttgagccatgggcttcgaattgccccacctgaagctcccatcacaggttacatgtttgggaaaggaatctactttgctgacatgtcttccaagagtgccaattactgctttgcctctcgcctaaagaatacaggactgctgctcttatcagaggtagctctaggtcagtgtaatgaactactagaggccaatcctaaggccgaaggattgcttcaaggtaaacatagcaccaaggggctgggcaagatggctcccagttctgcccacttcgtcaccctgaatgggagtacagtgccattaggaccagcaagtgacacaggaattctgaatccagatggttataccctcaactacaatgaatatattgtatataaccccaaccaggtccgtatgcggtaccttttaaaggttcagtttaatttccttcagctgtggtgaatgttgatattaaataaaccagagatctgatcttcaagcaagaaaataagcagtgttgtacttgtgaattttgtgatattttatgtaataaaaactgtacaggtctac

SEQ ID NO: 166947 - DNA, 717 bp, Homo sapiens
  Payload ID: 12867
  Gene Symbol: PARP2
  Gene Name: poly (ADP-ribose) polymerase 2
  ENST ID: ENST00000529465
  CDS Start-End: 15-347
agcgttcgaattccatggcggcgcggcggcgacggagcaccggcggcggcagggcgagagcattaaatgaaagcaaaagagttaataatggcaacacggctccagaagactcttcccctgccaagaaaactcgtagatgccagagacaggagtcgaaaaagatgcctgtggctggaggaaaagctaataaggacaggacagaagacaagcaagatgaatctgtgaaggccttgctgttaaagggcaaagctcctgtggacccagagtgtacagccaaggtggggaaggctcatgtgtattgtgaaggaaatgatgtctatgatgtcatgctaaatcagattccttgacaaaacgaaaaacaattgggaagatcgagaaaagtttgagaaggtgcctggaaaatatgatatgctacagatggactatgccaccaatactcaggatgaagaggaaacaaagaaagaggaatctcttaaatctcccttgaagccagagtcacagctagatcttcgggtacaggagttaataaagttgatctgtaatgttcaggccatggaagaaatgatgatggaaatgaagtataataccaagaaagccccacttggcaggttaccagtctcttaagaagattgaggattgtattcgggctggccagcatggacgagctctcatggaagcatgcaatgaattctacaccaggattccgcatgactttgg

SEQ ID NO: 166948 - DNA, 1980 bp, Homo sapiens
  Payload ID: 12867
  Gene Symbol: PARP2
  Gene Name: poly (ADP-ribose) polymerase 2
  ENST ID: ENST00000527915
  CDS Start-End: 6-1601
attccatggcggcgcggcggcgacggagcaccggcggcggcagggcgagagcattaaatgaaagcaaaagagttaataatggcaacacggctccagaagactcttcccctgccaagaaaactcgtagatgccagagacaggagtcgaaaaagatgcctgtggctggaggaaaagctaataaggacaggacagaagacaagcaagatggtatgccaggaaggtcatgggccagcaaaagggtctctgaatctgtgaaggccttgctgttaaagggcaaagctcctgtggacccagagtgtacagccaaggtggggaaggctcatgtgtattgtgaaggaaatgatgtctatgatgtcatgctaaatcagaccaatctccagttcaacaacaacaagtactatctgattcagctattagaagatgatgcccagaggaacttcagtgtttggatgagatggggccgagttgggaaaatgggacagcacagcctggtggcttgttcaggcaatctcaacaaggccaaggaaatctttcagaagaaattccttgacaaaacgaaaaacaattgggaagatcgagaaaagtttgagaaggtgcctggaaaatatgatatgctacagatggactatgccaccaatactcaggatgaagaggaaacaaagaaagaggaatctcttaaatctcccttgaagccagagtcacagctagatcttcgggtacaggagttaataaagttgatctgtaatgttcaggccatggaagaaatgatgatggaaatgaagtataataccaagaaagccccacttgggaagctgacagtggcacaaatcaaggcaggttaccagtctcttaagaagattgaggattgtattcgggctggccagcatggacgagctctcatggaagcatgcaatgaattctacaccaggattccgcatgactttggactccgtactcctccactaatccggacacagaaggaactgtcagaaaaaatacaattactagaggctttgggagacattgaaattgctattaagctggtgaaaacagagctacaaagcccagaacacccattggaccaacactatagaaacctacattgtgccttgcgcccccttgaccatgaaagttatgagttcaaagtgatttcccagtacctacaatctacccatgctcccacacacagcgactataccatgaccttgctggatttgtttgaagtggagaaggatggtgagaaagaagccttcagagaggaccttcataacaggatgcttctatggcatggttccaggatgagtaactgggtgggaatcttgagccatgggcttcgaattgccccacctgaagctcccatcacaggttacatgtttgggaaaggaatctactttgctgacatgtcttccaagagtgccaattactgctttgcctctcgcctaaagaatacaggactgctgctcttatcagaggtagctctaggtcagtgtaatgaactactagaggccaatcctaaggccgaaggattgcttcaaggtaaacatagcaccaaggggctgggcaagatggctcccagttctgcccacttcgtcaccctgtaagtactcagaaccaggaggactagaagactccttttggccagataagactacgttctctattgcagcttctgaaccagagactgatgttgacacactttttttccatttggcaggaatgggagtacagtgccattaggaccagcaagtgacacaggaattctgaatccagatggttataccctcaactacaatgaatatattgtatataaccccaaccaggtccgtatgcggtaccttttaaaggttcagtttaatttccttcagctgtggtgaatgttgatattaaataaaccagagatctgatcttcaagcaagaaaataagcagtgttgtacttgtgaattttgtgatattttatgtaataaaaactgtacaggtct

SEQ ID NO: 166949 - DNA, 635 bp, Homo sapiens
  Payload ID: 12867
  Gene Symbol: PARP2
  Gene Name: poly (ADP-ribose) polymerase 2
  ENST ID: ENST00000539930
  CDS Start-End: 1-532
gaaggaactgtcagaaaaaatacaattactagaggctttgggagacattgaaattgctattaagctggtgaaaacagagctacaaagcccagaacacccattggaccaacactatagaaacctacattgtgccttgcgcccccttgaccatgaaagttatgagttcaaagtgatttcccagtacctacaatctacccatgctcccacacacagcgactataccatgaccttgctggatttgtttgaagtggagaaggatggtgagaaagaagccttcagagaggaccttcataacaggatgcttctatggcatggttccaggatgagtaactgggtgggaatcttgagccatgggcttcgaattgccccacctgaagctcccatcacaggttacatgtttgggaaaggaatctactttgctgacatgtcttccaagagtgccaattactgctttgcctctcgcctaaagaatacaggactgctgctcttatcagaggaatgggagtacagtgccattaggaccagcaagtgacacaggaattctgaatccagatggttataccctcaactacaatgaatatattgtatataaccccaaccaggtccgtatgcggtaccttttaaaggttcagttt

SEQ ID NO: 166950 - DNA, 1090 bp, Homo sapiens
  Payload ID: 12868
  Gene Symbol: PARP10
  Gene Name: poly (ADP-ribose) polymerase family, member 10
  ENST ID: ENST00000313059
  CDS Start-End: 72-1090
ggcttgctgaggggcaggcacaggagtcctggctgagctcatggcctgaggctgcctagcggccacggggaatggttgcaatggcggaggcagaggcaggggtggcagtggaggtccgtggactgccccctgccgtgcccgacgagctgctcactctctactttgaaaaccgccgacgctctggagggggacctgtgttgagctggcagagactgggctgtgggggcgtcctcaccttcagagagcctgcagatgtccgtgtcctggaggagcaggcccagaatctgggcctggaggggaccttggtgtccctggcccgggttccccaggcccgagcggtgcgtgtggtgggggatggtgcctctgtggacctgctgttgctggagttgtacctggagaatgagcgccgcagtggtggggggcccctggaggacctgcaacgcctacccgggcccctgggcactgttgcctccttccagcagtggcaagtggcagaacgagtgttgcagcaggagcaccggttgcagggctcagagctgagccttgtcccccactacgacatcctggagcccgaggagctggctgagaacaccagtggaggggaccacccgtccacccaggggcctagggctaccaagcatgctctcctgaggaccggagggttggtgacggctctgcagggtgcagggactgtgacaatgggctctggcgaggaaccagggcagtcaggggcctctctgaggacaggtcccatggtgcagggtagagggattatgacaacaggctctggccaggaaccagggcagtcagggacctctctgaggacaggtcccatggggtctctgggacaggcagagcaagtcagctcgatgcccatggggtctctggaacatgaggggctggtaagcctgaggcctgtggggttgcaggaacaggaggggcccatgagcctggggcctgtggggtctgcaggcccagtggagacctctaaggggttgctggggcaggagggcctggtggaaattgccatggactcaccagagcaagaggggctggtgggtcccatggagatcaccatggggtctctgga

SEQ ID NO: 166951 - DNA, 3497 bp, Homo sapiens
  Payload ID: 12868
  Gene Symbol: PARP10
  Gene Name: poly (ADP-ribose) polymerase family, member 10
  Uniprot ID: Q53GL7
  ENST ID: ENST00000313028
  CDS Start-End: 96-3173
gttttcctgctcccagcagggttaggcttgctgaggggcaggcacaggagtcctggctgagctcatggcctgaggctgcctagcggccacggggaatggttgcaatggcggaggcagaggcaggggtggcagtggaggtccgtggactgccccctgccgtgcccgacgagctgctcactctctactttgaaaaccgccgacgctctggagggggacctgtgttgagctggcagagactgggctgtgggggcgtcctcaccttcagagagcctgcagacgccgagagggtcttggcccaggcagatcacgaactacatggtgcccagctgagcctgcggccagctccaccacgagcccctgcacgcctgctgctccaaggactgccccctggcaccacgccccagcgcttggagcagcatgtccaggccttgctgcgggcctcggggctcccagtacagccttgctgtgccttggccagcccccggccagaccgggctctggtccagttgcccaagcccctttctgaggcagatgtccgtgtcctggaggagcaggcccagaatctgggcctggaggggaccttggtgtccctggcccgggttccccaggcccgagcggtgcgtgtggtgggggatggtgcctctgtggacctgctgttgctggagttgtacctggagaatgagcgccgcagtggtggggggcccctggaggacctgcaacgcctacccgggcccctgggcactgttgcctccttccagcagtggcaagtggcagaacgagtgttgcagcaggagcaccggttgcagggctcagagctgagccttgtcccccactacgacatcctggagcccgaggagctggctgagaacaccagtggaggggaccacccgtccacccaggggcctagggctaccaagcatgctctcctgaggaccggagggttggtgacggctctgcagggtgcagggactgtgacaatgggctctggcgaggaaccagggcagtcaggggcctctctgaggacaggtcccatggtgcagggtagagggattatgacaacaggctctggccaggaaccagggcagtcagggacctctctgaggacaggtcccatggggtctctgggacaggcagagcaagtcagctcgatgcccatggggtctctggaacatgaggggctggtaagcctgaggcctgtggggttgcaggaacaggaggggcccatgagcctggggcctgtggggtctgcaggcccagtggagacctctaaggggttgctggggcaggagggcctggtggaaattgccatggactcaccagagcaagaggggctggtgggtcccatggagatcaccatggggtctctggagaaggcagggcctgtgagcccaggatgtgtgaagctggcagggcaggagggcctggtggagatggtgctattgatggagccaggggcgatgcgcttcctgcagctctaccatgaggaccttcttgcgggcctgggagacgtcgctctcttgccacttgaaggaccggatatgactggctttcggctctgtggagcccaggcttcctgccaggcggctgaggagtttctgcggagcctgctgggcagcattagctgccatgtgttgtgcctggagcacccgggcagcgccaggtttctcctgggcccagaagggcagcaccttctccaggggctggaggctcagttccagtgtgtctttgggacagagcgcctggccacagccacgttggacacaggccttgaagaggtggaccctaccgaggccctcccagtgctccctggcaacgcccacaccctgtggaccccagacagtacaggtggtgaccaggaggacgtgagcctggaggaggtccgagaactgctggccaccctggagggcctagacctagacggggaggactggctgcctcgggagctggaggaggaagggcctcaggagcagccagaggaggaggtgaccccagggcatgaggaggaggagcctgtggcccccagcactgtggcacccaggtggctggaggaggaggccgctctgcagctggccctccaccggtcactggagcctcaaggtcaggtggctgagcaggaggaggctgctgccctgcggcaagccctaaccctctccctgctggagcagcccccgttggaggcagaagagcccccagatggggggactgatggcaaggcccagctggtggtgcactcggcctttgagcaggatgtggaggagctggaccgggcgctcagggctgccttggaggtccacgtccaggaggagacggtggggccctggcgccgcacactgcctgcagagctgcgtgctcgcctggagcggtgccatggtgtgagtgttgccctgcgtggtgactgcaccatcctccgtggcttcggggcccaccctgcccgtgctgcccgccacttggtggcacttctggctggcccctgggatcagagtttggcctttcccttggcagcttcaggccctaccttggcggggcagacgctgaaggggccctggaacaacctggagcgtctggcagagaacaccggggagttccaggaggtggtgcgggccttctacgacaccctggacgctgcccgcagcagcatccgcgtcgttcgtgtggagcgcgtgtcgcacccgctgctgcagcagcagtatgagctgtaccgggagcgcctgctgcagcgatgcgagcggcgcccggtggagcaggtgctgtaccacggcacgacggcaccggcagtgcctgacatctgcgcccacggcttcaaccgcagcttctgcggccgcaacgccacggtctacgggaagggcgtgtatttcgccaggcgcgcctccctgtcggtgcaggaccgctactcgccccccaacgccgatggccataaggcggtgttcgtggcacgggtgctgactggcgactacgggcagggccgccgcggtctgcgggcgccccctctgcggggtcctggccacgtgctcctgcgctacgacagcgccgtggactgcatctgccagcccagcatcttcgtcatcttccacgacacccaggcgctgcccacccacctcatcacctgcgagcacgtgccccgcgcttcccccgacgacccctctgggctcccgggccgctccccagacacttaaccgaaggggccaccctctggcctcctgcttcccaggctcccagctccgcacaggctgatgctccccgcccccaactgtggccgcctgagctgtccccggggacgcccctgcctccctctgcgggctccagaaggcggtgtgggggatggcggtcagcagcggccgaggggggccgggctaggtcccagcctgggccgaccccaccaccaggggtcagcagagcccaggaggcgacaccgcccgcccgccgctcccagacctcgcccgagtcggctctgttgtttgaataaacgtgaacgtgaacccaggcggaagggacccggg

SEQ ID NO: 166952 - DNA, 899 bp, Homo sapiens
  Payload ID: 12868
  Gene Symbol: PARP10
  Gene Name: poly (ADP-ribose) polymerase family, member 10
  ENST ID: ENST00000528136
  CDS Start-End: 514-899
gaagcgcgtgaggaccggacgggcggcgccgtggggccttcccagggctctaggccgcctttagggtgggggaggggccgggcgaggggacgaccgccagcctcgggatttggggcttgggtcgtttctcacaagcaaccggaggcctgcgccgctgccggcgtctcccgggtgggagctcagcgcggaggctggggtctcggccggggacgtgtggggtgtgcccggaccctcccctccgcatcccgccccttaagcagctttaaggggccggagccggcggctatttctatcccaggaaatccccgggccatctgtgaccaacaaaggcccgagcccccccacccccgcgagcccaacaacagggcccaacggcccctggctccggggtggggggatcgggcctggatcggctgccggtgcctgccagtgggcagggttaggcttgctgaggggcaggcacaggagtcctggctgagctcatggcctgaggctgcctagcggccacggggaatggttgcaatggcggaggcagaggcaggggtggcagtggaggtccgtggactgccccctgccgtgcccgacgagctgctcactctctactttgaaaaccgccgacgctctggagggggacctgtgttgagctggcagagactgggctgtgggggcgtcctcaccttcagagagcctgcagacgccgagagggtcttggcccaggcagatcacgaactacatggtgcccagctgagcctgcggccagctccaccacgagcccctgcacgcctgctgctccaaggactgccccctggcaccacgccccagcgcttggagcagcatgtccaggccttgctgcgggcctcggggctcccagtacagccttgctgtgccttggccagccc

SEQ ID NO: 166953 - DNA, 3469 bp, Homo sapiens
  Payload ID: 12868
  Gene Symbol: PARP10
  Gene Name: poly (ADP-ribose) polymerase family, member 10
  ENST ID: ENST00000524918
  CDS Start-End: 88-3138
gctcccagcagggttaggcttgctgaggggcaggcacaggagtcctggctgagctcatggcctgaggctgcctagcggccacggggaatggttgcaatggcggaggcagaggcaggggtggcagtggaggtccgtggactgccccctgccgtgcccgacgagctgctcactctctactttgaaaaccgccgacgctctggagggggacctgtgttgagctggcagagactgggctgtgggggcgtcctcaccttcagagagcctgcagacgccgagagggtcttggcccaggcagatcacgaactacatggtgcccagctgagcctgcggccagctccaccacgagcccctgcacgcctgctgctccaaggactgccccctggcaccacgccccagcgcttggagcagcatgtccaggccttgctgcgggcctcggggctcccagtacagccttgctgtgccttggccagcccccggccagaccgggctctggtccagttgcccaagcccctttctgaggcagatgtccgtgtcctggaggagcaggcccagaatctgggcctggaggggaccttggtgtccctggcccgggttccccaggcccgagcggtgcgtgtggtgggggatggtgcctctgtggacctgctgttgctggagttgtacctggagaatgagcgccgcagtggtggggggcccctggaggacctgcaacgcctacccgggcccctgggcactgttgcctccttccagcagtggcaagtggcagaacgagtgttgcagcaggagcaccggttgcagggctcagagctgagccttgtcccccactacgacatcctggagcccgaggagctggctgagaacaccagtggaggggaccacccgtccacccaggggcctagggctaccaagcatgctctcctgaggaccggagggttggtgacggctctgcagggtgcagggactgtgacaatgggctctggcgaggaaccagggcagtcaggggcctctctgaggacaggtcccatggtgcagggtagagggattatgacaacaggctctggccaggaaccagggcagtcagggacctctctgaggacaggtcccatggggtctctgggacaggcagagcaagtcagctcgatgcccatggggtctctggaacatgaggggctggtaagcctgaggcctgtggggttgcaggaacaggaggggcccatgagcctggggcctgtggggtctgcaggcccagtggagacctctaaggggttgctggggcaggagggcctggtggaaattgccatggactcaccagagcaagaggggctggtgggtcccatggagatcaccatggggtctctggagaaggcagggcctgtgagcccaggatgtgtgaagctggcagggcaggagggcctggtggagatggtgctattgatggagccaggggcgatgcgcttcctgcagctctaccatgaggaccttcttgcgggcctgggagacgtcgctctcttgccacttgaaggaccggatatgactggctttcggctctgtggagcccaggcttcctgccaggcggctgaggagtttctgcggagcctgctgggcagcattagctgccatgtgttgtgcctggagcacccgggcagcgccaggtttctcctgggcccagaagggcagcaccttctccaggggctggaggctcagttccagtgtgtctttgggacagagcgcctggccacagccacgttggacacaggccttgaagaggtggaccctaccgaggccctcccagtgctccctggcaacgcccacaccctgtggaccccagacagtacagaggaggtccgagaactgctggccaccctggagggcctagacctagacggggaggactggctgcctcgggagctggaggaggaagggcctcaggagcagccagaggaggaggtgaccccagggcatgaggaggaggagcctgtggcccccagcactgtggcacccaggtggctggaggaggaggccgctctgcagctggccctccaccggtcactggagcctcaaggtcaggtggctgagcaggaggaggctgctgccctgcggcaagccctaaccctctccctgctggagcagcccccgttggaggcagaagagcccccagatggggggactgatggcaaggcccagctggtggtgcactcggcctttgagcaggatgtggaggagctggaccgggcgctcagggctgccttggaggtccacgtccaggaggagacggtggggccctggcgccgcacactgcctgcagagctgcgtgctcgcctggagcggtgccatggtgtgagtgttgccctgcgtggtgactgcaccatcctccgtggcttcggggcccaccctgcccgtgctgcccgccacttggtggcacttctggctggcccctgggatcagagtttggcctttcccttggcagcttcaggccctaccttggcggggcagacgctgaaggggccctggaacaacctggagcgtctggcagagaacaccggggagttccaggaggtggtgcgggccttctacgacaccctggacgctgcccgcagcagcatccgcgtcgttcgtgtggagcgcgtgtcgcacccgctgctgcagcagcagtatgagctgtaccgggagcgcctgctgcagcgatgcgagcggcgcccggtggagcaggtgctgtaccacggcacgacggcaccggcagtgcctgacatctgcgcccacggcttcaaccgcagcttctgcggccgcaacgccacggtctacgggaagggcgtgtatttcgccaggcgcgcctccctgtcggtgcaggaccgctactcgccccccaacgccgatggccataaggcggtgttcgtggcacgggtgctgactggcgactacgggcagggccgccgcggtctgcgggcgccccctctgcggggtcctggccacgtgctcctgcgctacgacagcgccgtggactgcatctgccagcccagcatcttcgtcatcttccacgacacccaggcgctgcccacccacctcatcacctgcgagcacgtgccccgcgcttcccccgacgacccctctgggctcccgggccgctccccagacacttaaccgaaggggccaccctctggcctcctgcttcccaggctcccagctccgcacaggctgatgctccccgcccccaactgtggccgcctgagctgtccccggggacgcccctgcctccctctgcgggctccagaaggcggtgtgggggatggcggtcagcagcggccgaggggggccgggctaggtcccagcctgggccgaccccaccaccaggggtcagcagagcccaggaggcgacaccgcccgcccgccgctcccagacctcgcccgagtcggctctgttgtttgaataaacgtgaacgtgaacccaggcggaagggacccgggaactctg

SEQ ID NO: 166954 - DNA, 685 bp, Homo sapiens
  Payload ID: 12868
  Gene Symbol: PARP10
  Gene Name: poly (ADP-ribose) polymerase family, member 10
  ENST ID: ENST00000528625
  CDS Start-End: 170-685
gggggcgggggcggcaggccgcgcggcgcagcgggtcagaggcgctcctgggctcgggccggggactcaccggtggccgggcgccgcaggccgggttaggcttgctgaggggcaggcacaggagtcctggctgagctcatggcctgaggctgcctagcggccacggggaatggttgcaatggcggaggcagaggcaggggtggcagtggaggtccgtggactgccccctgccgtgcccgacgagctgctcactctctactttgaaaaccgccgacgctctggagggggacctgtgttgagctggcagagactgggctgtgggggcgtcctcaccttcagagagcctgcagacgccgagagggtcttggcccaggcagatcacgaactacatggtgcccagctgagcctgcggccagctccaccacgagcccctgcacgcctgctgctccaaggactgccccctggcaccacgccccagcgcttggagcagcatgtccaggccttgctgcgggcctcggggctcccagtacagccttgctgtgccttggccagcccccggccagaccgggctctggtccagttgcccaagcccctttctgaggcagatgtccgtgtcctggaggagcaggcccagaatctgggcctggaggggaccttggtgtccctggcccgggttccccaggcc

SEQ ID NO: 166955 - DNA, 578 bp, Homo sapiens
  Payload ID: 12868
  Gene Symbol: PARP10
  Gene Name: poly (ADP-ribose) polymerase family, member 10
  ENST ID: ENST00000531537
  CDS Start-End: 146-578
ctttctgtggtgaggattagcggcagcaaggaatgcagtggagccattaccttgtcaccttctgagcagggttaggcttgctgaggggcaggcacaggagtcctggctgagctcatggcctgaggctgcctagcggccacggggaatggttgcaatggcggaggcagaggcaggggtggcagtggaggtccgtggactgccccctgccgtgcccgacgagctgctcactctctactttgaaaaccgccgacgctctggagggggacctgtgttgagctggcagagactgggctgtgggggcgtcctcaccttcagagagcctgcagacgccgagagggtcttggcccaggcagatcacgaactacatggtgcccagctgagcctgcggccagctccaccacgagcccctgcacgcctgctgctccaaggactgccccctggcaccacgccccagcgcttggagcagcatgtccaggccttgctgcgggcctcggggctcccagtacagccttgctgtgccttggccagcccccggccagaccgggctctggtccagttgcccaagcccctttctgagg

SEQ ID NO: 166956 - DNA, 3027 bp, Homo sapiens
  Payload ID: 12868
  Gene Symbol: PARP10
  Gene Name: poly (ADP-ribose) polymerase family, member 10
  ENST ID: ENST00000527262
  CDS Start-End: 64-2358
gaggggcaggcacaggagtcctggctgagctcatggcctgaggctgcctagcggccacggggaatggttgcaatggcggaggcagaggcaggggtggcagtggaggtccgtggactgccccctgccgtgcccgacgagctgctcactctctactttgaaaaccgccgacgctctggagggggacctgtgttgagctggcagagactgggctgtgggggcgtcctcaccttcagagagcctgcagacgccgagagggtcttggcccaggcagatcacgaactacatggtgcccagctgagcctgcggccagctccaccacgagcccctgcacgcctgctgctccaaggactgccccctggcaccacgccccagcgcttggagcagcatgtccaggccttgctgcgggcctcggggctcccagtacagccttgctgtgccttggccagcccccggccagaccgggctctggtccagttgcccaagcccctttctgaggcagatgtccgtgtcctggaggagcaggcccagaatctgggcctggaggggaccttggtgtccctggcccgggttccccaggcccgagcggtgcgtgtggtgggggatggtgcctctgtggacctgctgttgctggagttgtacctggagaatgagcgccgcagtggtggggggcccctggaggacctgcaacgcctacccgggcccctgggcactgttgcctccttccagcagtggcaagtggcagaacgagtgttgcagcaggagcaccggttgcagggctcagagctgagccttgtcccccactacgacatcctggagcccgaggagctggctgagaacaccagtggaggggaccacccgtccacccaggggcctagggctaccaagcatgctctcctgaggaccggagggttggtgacggctctgcagggtgcagggactgtgacaatgggctctggcgaggaaccagggcagtcaggggcctctctgaggacaggtcccatggtgcagggtagagggattatgacaacaggctctggccaggaaccagggcagtcagggacctctctgaggacaggtcccatggggtctctgggacaggcagagcaagtcagctcgatgcccatggggtctctggaacatgaggggctggtaagcctgaggcctgtggggttgcaggaacaggaggggcccatgagcctggggcctgtggggtctgcaggcccagtggagacctctaaggggttgctggggcaggagggcctggtggaaattgccatggactcaccagagcaagaggggctggtgggtcccatggagatcaccatggggtctctggagaaggcagggcctgtgagcccaggatgtgtgaagctggcagggcaggagggcctggtggagatggtgctattgatggagccaggggcgatgcgcttcctgcagctctaccatgaggaccttcttgcgggcctgggagacgtcgctctcttgccacttgaaggaccggatatgactggctttcggctctgtggagcccaggcttcctgccaggcggctgaggagtttctgcggagcctgctgggcagcattagctgccatgtgttgtgcctggagcacccgggcagcgccaggtttctcctgggcccagaagggcagcaccttctccaggggctggaggctcagttccagtgtgtctttgggacagagcgcctggccacagccacgttggacacaggccttgaagaggtggaccctaccgaggccctcccagtgctccctggcaacgcccacaccctgtggaccccagacagtacaggtggtgaccaggaggacgtgagcctggaggaggtccgagaactgctggccaccctggagggcctagacctagacggggaggactggctgcctcgggagctggaggaggaagggcctcaggagcagccagaggaggaggtgaccccagggcatgaggaggaggagcctgtggcccccagcactgtggcacccaggtggctggaggaggaggccgctctgcagctggccctccaccggtcactggagcctcaaggtcaggtggctgagcaggaggaggctgctgccctgcggcaagccctaaccctctccctgctggagcagcccccgttggaggcagaagagcccccagatggggggactgatggcaaggcccagctggtggtgcactcggcctttgagcaggatgtggaggagctggaccgggcgctcagggctgccttggaggtccacgtccaggaggagacggtggggccctggcgccgcacactgcctgcagagctgcgtgctcgcctggagcggtgccatggttggcggggcagacgctgaaggggccctggaacaacctggagcgtctggcagagaacaccggggagttccaggaggtggtgcgggccttctacgacaccctggacgctgcccgcagcagcatccgcgtcgttcgtgtggagcgcgtgtcgcacccgctgctgcagcagcagtatgagctgtaccgggagcgcctgctgcagcgatgcgagcggcgcccggtggagcaggtgctgtaccacggcacgacggcaccggcagtgcctgacatctgcgcccacggcttcaaccgcagcttctgcggccgcaacgccacggtctacgggaagggcgtgtatttcgccaggcgcgcctccctgtcggtgcaggaccgctactcgccccccaacgccgatggccataaggcggtgttcgtggcacgggtgctgactggcgactacgggcagggccgccgcggtctgcgggcgccccctctgcggggtcctggccacgtgctcctgcgctacgacagcgccgtggactgcatctgccagcccagcatcttcgtcatcttccacgacacccaggcgctgcccacccacctcatcacctgcgagcacgtgccccgcgcttcccccgacgacccctctgggctcccgggccgctccccagacacttaaccgaaggggccaccctctggcctcctgcttc

SEQ ID NO: 166957 - DNA, 500 bp, Homo sapiens
  Payload ID: 12868
  Gene Symbol: PARP10
  Gene Name: poly (ADP-ribose) polymerase family, member 10
  ENST ID: ENST00000531707
  CDS Start-End: 258-500
atgctcagcacctggcaggtgtgagggaccaggagcagggttgagaaggttgctgggggcgttgaaggccagccttggccgggggcgggcctggagacccagcactttgtgtgcagagggtgtcatggacacagaggcttggagatcctgagtgaggggcagtgactcaggccccttgcagggttaggcttgctgaggggcaggcacaggagtcctggctgagctcatggcctgaggctgcctagcggccacggggaatggttgcaatggcggaggcagaggcaggggtggcagtggaggtccgtggactgccccctgccgtgcccgacgagctgctcactctctactttgaaaaccgccgacgctctggagggggacctgtgttgagctggcagagactgggctgtgggggcgtcctcaccttcagagagcctgcagacgccgagagggtcttggcccaggcagatcacgaactacatggtgcccagctgagcctgcgg

SEQ ID NO: 166958 - DNA, 589 bp, Homo sapiens
  Payload ID: 12868
  Gene Symbol: PARP10
  Gene Name: poly (ADP-ribose) polymerase family, member 10
  ENST ID: ENST00000528914
  CDS Start-End: 183-589
gcgcaactccacctgcttctgggaacccagggggaagcaagggaagaccgtgacctttgccccgggctgtggggagccccggagcctgggcccggagaagcgccagggttaggcttgctgaggggcaggcacaggagtcctggctgagctcatggcctgaggctgcctagcggccacggggaatggttgcaatggcggaggcagaggcaggggtggcagtggaggtccgtggactgccccctgccgtgcccgacgagctgctcactctctactttgaaaaccgccgacgctctggagggggacctgtgttgagctggcagagactgggctgtgggggcgtcctcaccttcagagagcctgcagacgccgagagggtcttggcccaggcagatcacgaactacatggtgcccagctgagcctgcggccagctccaccacgagcccctgcacgcctgctgctccaaggactgccccctggcaccacgccccagcgcttggagcagcatgtccaggccttgctgcgggcctcggggctcccagtacagccttgctgtgccttggccagcccccggccagaccgggctctggt

SEQ ID NO: 166959 - DNA, 529 bp, Homo sapiens
  Payload ID: 12868
  Gene Symbol: PARP10
  Gene Name: poly (ADP-ribose) polymerase family, member 10
  ENST ID: ENST00000529311
  CDS Start-End: 210-529
agtctgcttgtggtgtgagtggtgcctgtggcaggccctctgcagccagggtcggcgtaatggataacctgtgatgagttccattagagaaaacgtggaaaaagcagggatggatttacccttgtagaagcagggttaggcttgctgaggggcaggcacaggagtcctggctgagctcatggcctgaggctgcctagcggccacggggaatggttgcaatggcggaggcagaggcaggggtggcagtggaggtccgtggactgccccctgccgtgcccgacgagctgctcactctctactttgaaaaccgccgacgctctggagggggacctgtgttgagctggcagagactgggctgtgggggcgtcctcaccttcagagagcctgcagacgccgagagggtcttggcccaggcagatcacgaactacatggtgcccagctgagcctgcggccagctccaccacgagcccctgcacgcctgctgctccaaggactgccccctggcaccacgccccagcgcttggagca

SEQ ID NO: 166960 - DNA, 3404 bp, Homo sapiens
  Payload ID: 12868
  Gene Symbol: PARP10
  Gene Name: poly (ADP-ribose) polymerase family, member 10
  ENST ID: ENST00000525773
  CDS Start-End: 190-3303
acttttgttttcctgctcccagcagggttaggcttgctgaggggcaggcacaggagtcctggctgagctcatggcctgaggctgcctagcggccacggggaatgtaagtgctgtatgtggggccacccataatgggggagcattgaggacacaccttggaggggcctggggaggggcaggaggggtggaatgggctgtttccctacccacctgatgccccgtcccagggttgcaatggcggaggcagaggcaggggtggcagtggaggtccgtggactgccccctgccgtgcccgacgagctgctcactctctactttgaaaaccgccgacgctctggagggggacctgtgttgagctggcagagactgggctgtgggggcgtcctcaccttcagagagcctgcagacgccgagagggtcttggcccaggcagatcacgaactacatggtgcccagctgagcctgcggccagctccaccacgagcccctgcacgcctgctgctccaaggactgccccctggcaccacgccccagcgcttggagcagcatgtccaggccttgctgcgggcctcggggctcccagtacagccttgctgtgccttggccagcccccggccagaccgggctctggtccagttgcccaagcccctttctgaggcagatgtccgtgtcctggaggagcaggcccagaatctgggcctggaggggaccttggtgtccctggcccgggttccccaggcccgagcggtgcgtgtggtgggggatggtgcctctgtggacctgctgttgctggagttgtacctggagaatgagcgccgcagtggtggggggcccctggaggacctgcaacgcctacccgggcccctgggcactgttgcctccttccagcagtggcaagtggcagaacgagtgttgcagcaggagcaccggttgcagggctcagagctgagccttgtcccccactacgacatcctggagcccgaggagctggctgagaacaccagtggaggggaccacccgtccacccaggggcctagggctaccaagcatgctctcctgaggaccggagggttggtgacggctctgcagggtgcagggactgtgacaatgggctctggcgaggaaccagggcagtcaggggcctctctgaggacaggtcccatggtgcagggtagagggattatgacaacaggctctggccaggaaccagggcagtcagggacctctctgaggacaggtcccatggggtctctgggacaggcagagcaagtcagctcgatgcccatggggtctctggaacatgaggggctggtaagcctgaggcctgtggggttgcaggaacaggaggggcccatgagcctggggcctgtggggtctgcaggcccagtggagacctctaaggggttgctggggcaggagggcctggtggaaattgccatggactcaccagagcaagaggggctggtgggtcccatggagatcaccatggggtctctggagaaggcagggcctgtgagcccaggatgtgtgaagctggcagggcaggagggcctggtggagatggtgctattgatggagccaggggcgatgcgcttcctgcagctctaccatgaggaccttcttgcgggcctgggagacgtcgctctcttgccacttgaaggaccggatatgactggctttcggctctgtggagcccaggcttcctgccaggcggctgaggagtttctgcggagcctgctgggcagcattagctgccatgtgttgtgcctggagcacccgggcagcgccaggtttctcctgggcccagaagggcagcaccttctccaggggctggaggctcagttccagtgtgtctttgggacagagcgcctggccacagccacgttggacacaggccttgaagaggtggaccctaccgaggccctcccagtgctccctggcaacgcccacaccctgtggaccccagacagtacaggtggtgaccaggaggacgtgagcctggaggaggtccgagaactgctggccaccctggagggcctagacctagacggggaggactggctgcctcgggagctggaggaggaagggcctcaggagcagccagaggaggaggtgaccccagggcatgaggaggaggagcctgtggcccccagcactgtggcacccaggtggctggaggaggaggccgctctgcagctggccctccaccggtcactggagcctcaaggtcaggtggctgagcaggaggaggctgctgccctgcggcaagccctaaccctctccctgctggagcagcccccgttggaggcagaagagcccccagatggggggactgatggcaaggcccagctggtggtgcactcggcctttgagcaggatgtggaggagctggaccgggcgctcagggctgccttggaggtccacgtccaggaggagacggtggggccctggcgccgcacactgcctgcagagctgcgtgctcgcctggagcggtgccatggtgtgagtgttgccctgcgtggtgactgcaccatcctccgtggcttcggggcccaccctgcccgtgctgcccgccacttggtggcacttctggctggcccctgggatcagagtttggcctttcccttggcagcttcaggccctaccttggcggggcagacgctgaaggggccctggaacaacctggagcgtctggcagagaacaccggggagttccaggaggtggtgcgggccttctacgacaccctggacgctgcccgcagcagcatccgcgtcgttcgtgtggagcgcgtgtcgcacccgctgctgcagcagcagtatgagctgtaccgggagcgcctgctgcagcgatgcgagcggcgcccggtggagcaggtgctgtaccacggcacgacggcaccggcagtgcctgacatctgcgcccacggcttcaaccgcagcttctgcggccgcaacgccacggtctacgggaagggcgtgtatttcgccaggcgcgcctccctgtcggtgcaggaccgctactcgccccccaacgccgatggccataaggcggtgttcgtggcacgggtgctgactggcgactacgggcagggccgccgcggtctgcgggcgccccctctgcggggtcctggccacgtgctcctgcgctacgacagcgccgtggactgcatctgccagcccagcatcttcgtcatcttccacgacacccaggcgctgcccacccacctcatcacctgcgagcacgtgccccgcgcttcccccgacgacccctctgggctcccgggccgctccccagacacttaaccgaaggggccaccctctggcctcctgcttcccaggctcccagctccgcacaggctgatgctccccgcccccaactgtggccgcctgagctgtccccgggg

SEQ ID NO: 166961 - DNA, 481 bp, Homo sapiens
  Payload ID: 12868
  Gene Symbol: PARP10
  Gene Name: poly (ADP-ribose) polymerase family, member 10
  ENST ID: ENST00000532311
  CDS Start-End: 233-481
agacaaggaacagtggaacagttggcttgacgacagcgtcgggacccagccctgcgcaactccacctgcttctgggaacccagggggaagcaagggaagaccgtgacctttgccccgggctgtggggagccccggagcctgggcccggagaagcgcggttaggcttgctgaggggcaggcacaggagtcctggctgagctcatggcctgaggctgcctagcggccacggggaatggttgcaatggcggaggcagaggcaggggtggcagtggaggtccgtggactgccccctgccgtgcccgacgagctgctcactctctactttgaaaaccgccgacgctctggagggggacctgtgttgagctggcagagactgggctgtgggggcgtcctcaccttcagagagcctgcagacgccgagagggtcttggcccaggcagatcacgaactacatggtgcccagctgagcctgcggccagct

SEQ ID NO: 166962 - DNA, 564 bp, Homo sapiens
  Payload ID: 12868
  Gene Symbol: PARP10
  Gene Name: poly (ADP-ribose) polymerase family, member 10
  ENST ID: ENST00000525486
  CDS Start-End: 126-564
ctggtgctgctatgggcctgtctgcacctccgtttccctttctgtgcagggttaggcttgctgaggggcaggcacaggagtcctggctgagctcatggcctgaggctgcctagcggccacggggaatggttgcaatggcggaggcagaggcaggggtggcagtggaggtccgtggactgccccctgccgtgcccgacgagctgctcactctctactttgaaaaccgccgacgctctggagggggacctgtgttgagctggcagagactgggctgtgggggcgtcctcaccttcagagagcctgcagacgccgagagggtcttggcccaggcagatcacgaactacatggtgcccagctgagcctgcggccagctccaccacgagcccctgcacgcctgctgctccaaggactgccccctggcaccacgccccagcgcttggagcagcatgtccaggccttgctgcgggcctcggggctcccagtacagccttgctgtgccttggccagcccccggccagaccgggctctggtccagttgcccaagcccctttctgaggcaggtg

SEQ ID NO: 166963 - DNA, 939 bp, Homo sapiens
  Payload ID: 12868
  Gene Symbol: PARP10
  Gene Name: poly (ADP-ribose) polymerase family, member 10
  ENST ID: ENST00000525879
  CDS Start-End: 405-939
gatttggggcttgggtcgtttctcacaagcaaccggaggcctgcgccgctgccggcgtctcccgggtgggagctcagcgcggaggctggggtctcggccggggacgtgtggggtgtgcccggaccctcccctccgcatcccgccccttaagcagctttaaggggccggagccggcggctatttctatcccaggaaatccccgggccatctgtgaccaacaaaggcccgagcccccccacccccgcgagcccaacaacagggcccaacggcccctggctccggggtggggggatcgggcctggatcggctgccggtgcctgccagtgggggttaggcttgctgaggggcaggcacaggagtcctggctgagctcatggcctgaggctgcctagcggccacggggaatggttgcaatggcggaggcagaggcaggggtggcagtggaggtccgtggactgccccctgccgtgcccgacgagctgctcactctctactttgaaaaccgccgacgctctggagggggacctgtgttgagctggcagagactgggctgtgggggcgtcctcaccttcagagagcctgcagacgccgagagggtcttggcccaggcagatcacgaactacatggtgcccagctgagcctgcggccagctccaccacgagcccctgcacgcctgctgctccaaggactgccccctggcaccacgccccagcgcttggagcagcatgtccaggccttgctgcgggcctcggggctcccagtacagccttgctgtgccttggccagcccccggccagaccgggctctggtccagttgcccaagcccctttctgaggcagatgtccgtgtcctggaggagcaggcccagaatctgggcctggaggggaccttggtgtccctggcccgggttccccaggcccgagcggtgcgtgtggtgg

SEQ ID NO: 166964 - DNA, 588 bp, Homo sapiens
  Payload ID: 12868
  Gene Symbol: PARP10
  Gene Name: poly (ADP-ribose) polymerase family, member 10
  ENST ID: ENST00000530478
  CDS Start-End: 323-588
cagtccccacttccctcctcactctcttgggagcgaggcctcttaccattgttctggcgtgaggaaaggcctgctgttgcctcaccaagcccactcgtgaacccgctgatgccgagcccgcctgcctgagtcttgatcgctgacttgagctcgtgattctcccgaatgagccgcaccaacttcttcagttcctcattttcccgcaccagcctctctatctgatgccgaagcccttcataattgcagggttaggcttgctgaggggcaggcacaggagtcctggctgagctcatggcctgaggctgcctagcggccacggggaatggttgcaatggcggaggcagaggcaggggtggcagtggaggtccgtggactgccccctgccgtgcccgacgagctgctcactctctactttgaaaaccgccgacgctctggagggggacctgtgttgagctggcagagactgggctgtgggggcgtcctcaccttcagagagcctgcagacgccgagagggtcttggcccaggcagatcacgaactacatggtgcccagctgagcctgcggccagctccaccacgagcccctgc

SEQ ID NO: 166965 - DNA, 696 bp, Homo sapiens
  Payload ID: 12868
  Gene Symbol: PARP10
  Gene Name: poly (ADP-ribose) polymerase family, member 10
  ENST ID: ENST00000529842
  CDS Start-End: 265-696
attaccttgtcaccttctgaggttacttgtgacgatgccaatgatggtgtgagatggggaggtgcaggcaggacagaaagctgcaggaatgggcaggcaagacctgaggcgggaggaaggctgtgctgcaatgcacattcttggagaccaagggtggggaaccgcccatgctcagcacctggcagcagggttaggcttgctgaggggcaggcacaggagtcctggctgagctcatggcctgaggctgcctagcggccacggggaatggttgcaatggcggaggcagaggcaggggtggcagtggaggtccgtggactgccccctgccgtgcccgacgagctgctcactctctactttgaaaaccgccgacgctctggagggggacctgtgttgagctggcagagactgggctgtgggggcgtcctcaccttcagagagcctgcagacgccgagagggtcttggcccaggcagatcacgaactacatggtgcccagctgagcctgcggccagctccaccacgagcccctgcacgcctgctgctccaaggactgccccctggcaccacgccccagcgcttggagcagcatgtccaggccttgctgcgggcctcggggctcccagtacagccttgctgtgccttggccagcccccggccagaccgggctctggtccagttgcccaagcccctttctgag

SEQ ID NO: 166966 - DNA, 4424 bp, Homo sapiens
  Payload ID: 12869
  Gene Symbol: PARP11
  Gene Name: poly (ADP-ribose) polymerase family, member 11
  Uniprot ID: Q9NR21
  ENST ID: ENST00000228820
  CDS Start-End: 146-1162
gggagggggaggaggaaggccttcgtaaaggttgcatctccgtcccttcgctcccggggacccgcgggaaaaaaaaaaatccaacacccaggccccgcggctagccccttcccacaggctctctccgctcgattttgtcaccgttatgtgggaagcgaatccagagatgtttcacaaagcagaagaattattttctaaaacaacaaacaatgaagtggatgacatggacacgtcagatacccagtggggctggttttacttggcagaatgtgggaagtggcacatgtttcagccggataccaacagtcagtgttcagttagcagtgaagatatcgaaaaaagcttcaaaacaaacccttgtggctccatttcttttactacttccaaattcagctacaagatagactttgcagaaatgaagcaaatgaatctcaccactggaaagcagcgcttaataaaaagagcccccttttctatcagtgctttcagttacatctgtgaaaacgaggccatccctatgccaccacactgggagaatgtgaatactcaagtaccatatcagcttattcctctgcacaatcaaacacatgaatataatgaagttgctaatctctttgggaagacgatggatcgcaaccgaattaaaagaattcagagaattcaaaacctagatttgtgggagttcttttgcaggaaaaaggctcagctcaagaaaaaaagaggtgtgcctcagattaatgaacaaatgctgtttcatggtaccagcagtgaatttgtggaagcaatctgcattcataactttgattggagaataaatggtatacatggtgctgtctttggaaaaggaacctattttgctagagatgctgcttattccagtcgtttctgcaaagatgacataaagcatgggaacacattccaaattcatggtgtcagcttgcaacagcggcatctgtttagaacatataaatctatgtttcttgctcgagtgctaattggagattacataaacggagactccaaatacatgcgacctccttccaaagacgggagctatgtgaatttatatgacagctgtgtggatgatacctggaacccaaagatctttgtggtttttgatgccaaccaaatctatcctgagtacttgatagactttcattgatttcacttccaaatctcggtggtcaaggaagctttattcttttttgcaggaaggtttgctcttcagtcatctagccactaaatgttaattatctgatacttttgaaacagatatgaaaaaaagtggcctccatataaaaagacatactgacttcaaggttggtttttgttgttttgtttttgcctgtttcttgtagtcttgtttgttaaaagttgatatcattgatgttttaacacataggggtgaaagataccattcaaaatggaatcagctgagtctcaactaatgtggtcattgagatctttaaagtttacgtgtgtgttatcaggataaatgattttagtttaaatagacttattcgtataaatgttgaaaaaaaatacagacataaatgtgtccctttagaggaattgatcctttgtaaattgaattcaggtagtagtatcatccaccaatccatctgttgctttgttggtcttctgaaggggggatttaaaactctgaaacagtctgagcaccttgagagaaatcagaaacaagacaattatttgcagtgctgtcaaacaagccagaaggagaaaatcaaggtagaatgccccactttccagttgccttaggatagcaggctgcagcctcagacttgatcctgtcattctcctctgtctcccacatctgaattgataattgctgcaaaatgtcattagcctacacttcatccatcagggctcttggattcttacaccacgacttgctgtgcaaggtgtttattgcatcttcaaagtgaaactttaaattattattcaaacatttattttccttttgttttaaaaagagtccctacaatgatcacttctaagatttttttttaccttcccctctgcagcacacacagctattcaacaatgatttctaaaattcatatttcaaatttgtatctctccattttgaaacattatagaaagcatgggatgcttgagacaaatctggtttctcctttgaagtagctgttgacaacctactctcttgaaaagttagatataattcttaatcatgtttagtggaaatttgtttacctgttccatctgttttgctgtttcattgtaaggaagatgagaagtgttggaacagcttccctcccctaaaggtattctagcagaggcgagacagcaacttggcgggcatgttgcataggagttaagtaccagatggggaattgcccatgtgatggtgaagagtctctcacattgattttcttccttttctcctcttctctcctccttctcttctctcctctttctcttctcttctttctcttctcttctgtcttcctcttcctcttctcttcctctcctcttcctctttctctctcttcctttttctcttcctctttctctttctctttctcttctcttctctctctcttccttccttctttctttccttccttccttccttccttccttccttccttccttctttccctccctccctccctccctcctccctttttctttttctttctttttttttggtttggcagagtcttgctctgttgcccaggctgcagtgcagtggtgtgatctcggctcactgcaacctccacctcccgggttcaagcaattctcttgcctcagcttctccagttactgggactacaggtgcataccaccatgcccggctaatttttgtatttttagtagaggcggggttttgtcatgttggccaggctgatctcaaactcctgacctcaggtgatccgcctgcctcagccttccaaagtgctgagattacaggcatgagccgctgtacccggcctgattttctatgattctgcctttaaaagacagcacgtataccaagcctttttcagaaagcttttctcttaactccttctaatgctgaattttctctctattatcctcacccaattttggctgagagttagtgtacacaatttaacttcttagaaaaattccagtgtctatgcttatattgctcacttgaatcatttgaattagaaagggatctacaaataataaaagcaaagagtgcagacagattagggatagtaattcttaaagtgccatctatcccagatttccgttatagaccagcatatgtgtaattgtgcagtgggaggtaagtagtacccaggacattgcatgtacaatactttgaaacaaagtggcaacaaagatttcctggctcaggtatgcaccccagctgctggtttagatgaagtgctgagaatatttagaaaaagcgctttaaaaagcatctagagattatcatgaaaataattggagacaaagtcactaggctgctttgtgagaggcagcataccatggctctaaacccgttcacaaaaaacaatgttagagacattaggaattcaggttttgaaaatctttttttcgatttatttgtaatttacataccaaaaaaccacattaaaatagtcctcccttcaacatggctatcttttttcaagttttatatgcatagctctctcagcacttgaatggaaaaactgttacagcatttgggagttgtttttcttttagactttgcagatcttatctcaaggtgactaggaacccagagctaagtatctgtgaggcaatctctgcgaacgctgaacttacctagttggtttctatgaaatatgtagaatgcactgcagtagccattgtaagaaggtactataccggttttttggggcttgttgttgttgtttggtctgagaatgtactgccaacccctcttttataagagagaactgattttgatacatattttaaaatatgatagtacagagttaatggatgttaaaattttatttctttgttttggtaagtagattaaatcgagaatcatataatcagtacatttgagaattatataaccagtatataataatactggacacaaccatttgccatcttttcctgttatcatcccatagagtgggtggggagaatgaatagacataaacctagaataatgataaatggtttttaaaactctatattgaatacattccagctgataatgacttttctttttcaccttggtgatatcagcctcagggtaaaaaaaaaagtttcataaatcttttagttataaacaggaaagttttatattagtgtgtcatttcatttctagactgttgatggtgatgatgataaagaatttggagccaattttgatatatgaatgtattgcttttacatgtgatgattaaagctctccattagcagtt

SEQ ID NO: 166967 - DNA, 539 bp, Homo sapiens
  Payload ID: 12869
  Gene Symbol: PARP11
  Gene Name: poly (ADP-ribose) polymerase family, member 11
  ENST ID: ENST00000450737
  CDS Start-End: 400-539
agatctgactggccaacgtcgggcggaagtcgggaggttgggtggtctgtaaacgctggcttgtgacagggagggggaggaggaaggccttcgtaaaggttgcatctccgtcccttcgctcccggggacccgcgggaaaaaaaaaaatccaacacccaggccccgcggctagccccttcccacaggctctctccgctcgattttgtcaccgttatgtgggaagcgaatccatgtatttgcatgcccgagtctttgagccgtgctataccagtttgtccagattgtttatactagcaatgcagtttacggtgaagacctgccttccctctgggaatctggagcttcagtaacaggagatgtttcacaaagcagaagaattattttctaaaacaacaaacaatgaagtggatgacatggacacgtcagatacccagtggggctggttttacttggcagaatgtgggaagtggcacatgtttcagccggataccaacagtcagtgttcagttagcagtgaagatatcgaaaaaagcttcaaa

SEQ ID NO: 166968 - DNA, 2428 bp, Homo sapiens
  Payload ID: 12869
  Gene Symbol: PARP11
  Gene Name: poly (ADP-ribose) polymerase family, member 11
  ENST ID: ENST00000416739
  CDS Start-End: 208-927
gactggccaacgtcgggcggaagtcgggaggttgggtggtctgtaaacgctggcttgtgacagggagggggaggaggaaggccttcgtaaaggttgcatctccgtcccttcgctcccggggacccgcgggaaaaaaaaaaatccaacacccaggccccgcggctagccccttcccacaggctctctccgctcgattttgtcaccgttatgtgggaagcgaatccagagatgtttcacaaagcagaagaattattttctaaaacaacaaacaatgaagtggatgacatggacacgtcagatacccagtggggctggttttacttggcagaatgtgggaagtggcacatgtttcagccggataccaacagtcagtgttcagttagcagtgaagatatcgaaaaaagcttcaaaacaaacccttgtggctccatttcttttactacttccaaattcagctacaagatagactttgcagaaatgaagcaaatgaatctcaccactggaaagcagcgcttaataaaaagagcccccttttctatcagtgctttcagttacatctgtgaaaacgaggccatccctatgccaccacactgggagaatgtgaatactcaagtaccatatcagcttattcctctgcacaatcaaacacatgaatataatgaagttgctaatctctttgggaagacgatggatcgcaaccgaattaaaagaattcagagaattcaaaacctagatttgtgggagttcttttgcaggaaaaaggctcagctcaagaaaaaaagaggtgtgcctcagattaatgaacaaatgctgtttcatggtaccagcagtgaatttgtggaagcaatctgcattcataactttgattggagaataaatggtatacatggtgctgtctttggaaaagataacatgtggaagctgtaggcattataagcccacgtttgatgaacagtctcagagaatcagcgtgcaagctcatttcctccactttattcctataagaagaagatcaagcctcaacttgggagccagctgatctgaattttattcctggctttgctgtctgattcagtgtgaccttggataactcaccagagagggaaggttcacttttcagaaggttaagtgcatggaaagaacctctgatggaaatcaaggagtactgacagcacgatgtggaaaataagagagaaaagaaaaaaaggaagatggaaattctgacaaggaaattaagatgcatgtccatggatgttttttgttttgatgatagcaaaagagtgatatatttgcataacaatatgaggacactgaggcaactcccctcaccccagggcacatagctaggaagtggcaaagccaatctggctggagtaccctgtactagccactctgctactctgctgcttttaagtctgtattaatggcaagcacgcgcgcacgcgcacacacacaactcctttatccttgccatcgtctttcaaagataagaatcaaagaccaaagcgtccttagatgttgtatcagagttcaagcaagggacagaaatcaccgcagaaatttggacagggaaaatttaatataaagaattgttgactatgtaaagttctgttaactactgaaaggggaaaaagaactctaagaagcagcaaggcagttaactgcagaaagtggcttctacacctaagactaagggaaaaatgaacaaggaaggaacttacaaactattggaaaaggtccctgcaaggctggattcagacctctgaggagagttcctggttgttacaggaacatgctgcctgtagtcctggtgccaaggaaacttgctgaagggtacccgctgttaaactgcatagggcagcctgccactgctgtaaaccctgaccgggataaccgcgtgccgatctgcctgccactatatgggaaaacagaaaactagatgaagaagaaaaaggcctctgtcttccagccatgcattgttccttccacactccttattgtcaaagcctaacatggagccagctggcaaaggaaaagtgtggcctgtagagttcagccccagtattacaaagcaggatgaagaaactgggattggagctgaaagacaataaattaataactgatacagatggaaagtacatttttcaacccaaggatagaaagaagccccaaacatcatcacacaaaaggaagacagattggctgagagaggcatttacattaaaaaaataaaatactgaaggtttacagggacacatctcttggagtagagcagcctacctccaaggtattggataagcaagacaaggtgttataaagcctattgtgtaaatatatacagaagactgagaggttttcaaccgaataaatgaatgcctggtacagcgttaatatagctgagaaattcatcctgtaacaagttgagtca

SEQ ID NO: 166969 - DNA, 1197 bp, Homo sapiens
  Payload ID: 12869
  Gene Symbol: PARP11
  Gene Name: poly (ADP-ribose) polymerase family, member 11
  ENST ID: ENST00000453942
  CDS Start-End: 122-679
gtaaaggttgcatctccgtcccttcgctcccggggacccgcgggaaaaaaaaaaatccaacacccaggccccgcggctagccccttcccacaggctctctccgctcgattttgtcaccgttatgtgggaagcgaatccagagatgtttcacaaagcagaagaattattttctaaaacaacaaacaatgaagtggatgacatggacacgtcagatacccagtggggctggttttacttggcagaatgtgggaagtggcacatgtttcagccggataccaacagtcagtgttcagttagcagtgaagatatcgaaaaaagcttcaaaacaaacccttgtggctccatttcttttactacttccaaattcagctacaagatagactttgcagaaatgaagcaaatgaatctcaccactggaaagcagcgcttaataaaaagagcccccttttctatcagtgctttcagttacatctgtgaaaacgaggccatccctatgccaccacactgggagaatgtgaatactcaagtaccatatcagcttattcctctgcacaatcaaacacatgaatataatgaagttgctaatctctttgggaagacgatggatcgcaaccgaattaaaagaattcagagaattcaaaacctagatttgtgggagttcttttgcagatacaggtgaagtgtttactccatccctgtcctactctccttctttcctcctgagattggaaaaaggctcagctcaagaaaaaaagaggtgtgcctcagattaatgaacaaatgctgtttcatggtaccagcagtgaatttgtggaagcaatctgcattcataactttgattggagaataaatggtatacatggtgctgtctttggaaaaggaacctattttgctagagatgctgcttattccagtcgtttctgcaaagatgacataaagcatgggaacacattccaaattcatggtgtcagcttgcaacagcggcatctgtttagaacatataaatctatgtttcttgctcgagtgctaattggagattacataaacggagactccaaatacatgcgacctccttccaaagacgggagctatgtgaatttatatgacagctgtgtggatgatacctggaacccaaagatctttgtggtttttgatgccaaccaaatctatcctgagtacttgatagactttcattga

SEQ ID NO: 166970 - DNA, 4406 bp, Homo sapiens
  Payload ID: 12869
  Gene Symbol: PARP11
  Gene Name: poly (ADP-ribose) polymerase family, member 11
  Uniprot ID: Q9NR21
  ENST ID: ENST00000427057
  CDS Start-End: 371-1144
ccttcgtaaaggttgcatctccgtcccttcgctcccggggacccgcgggaaaaaaaaaaatccaacacccaggccccgcggctagccccttcccacaggctctctccgctcgattttgtcaccgttatgtgggaagcgaatccatgtatttgcatgcccgagtctttgagccgtgctataccagtttgtccagattgtttatactagcaatgcagtttacggtgaagacctgccttccctctgggaatctggagcttcagtaacaggagatgtttcacaaagcagaagaattattttctaaaacaacaaacaatgaagtggatgacatggacacgtcagatacccagtggggctggttttacttggcagaatgtgggaagtggcacatgtttcagaaatgaagcaaatgaatctcaccactggaaagcagcgcttaataaaaagagcccccttttctatcagtgctttcagttacatctgtgaaaacgaggccatccctatgccaccacactgggagaatgtgaatactcaagtaccatatcagcttattcctctgcacaatcaaacacatgaatataatgaagttgctaatctctttgggaagacgatggatcgcaaccgaattaaaagaattcagagaattcaaaacctagatttgtgggagttcttttgcaggaaaaaggctcagctcaagaaaaaaagaggtgtgcctcagattaatgaacaaatgctgtttcatggtaccagcagtgaatttgtggaagcaatctgcattcataactttgattggagaataaatggtatacatggtgctgtctttggaaaaggaacctattttgctagagatgctgcttattccagtcgtttctgcaaagatgacataaagcatgggaacacattccaaattcatggtgtcagcttgcaacagcggcatctgtttagaacatataaatctatgtttcttgctcgagtgctaattggagattacataaacggagactccaaatacatgcgacctccttccaaagacgggagctatgtgaatttatatgacagctgtgtggatgatacctggaacccaaagatctttgtggtttttgatgccaaccaaatctatcctgagtacttgatagactttcattgatttcacttccaaatctcggtggtcaaggaagctttattcttttttgcaggaaggtttgctcttcagtcatctagccactaaatgttaattatctgatacttttgaaacagatatgaaaaaaagtggcctccatataaaaagacatactgacttcaaggttggtttttgttgttttgtttttgcctgtttcttgtagtcttgtttgttaaaagttgatatcattgatgttttaacacataggggtgaaagataccattcaaaatggaatcagctgagtctcaactaatgtggtcattgagatctttaaagtttacgtgtgtgttatcaggataaatgattttagtttaaatagacttattcgtataaatgttgaaaaaaaatacagacataaatgtgtccctttagaggaattgatcctttgtaaattgaattcaggtagtagtatcatccaccaatccatctgttgctttgttggtcttctgaaggggggatttaaaactctgaaacagtctgagcaccttgagagaaatcagaaacaagacaattatttgcagtgctgtcaaacaagccagaaggagaaaatcaaggtagaatgccccactttccagttgccttaggatagcaggctgcagcctcagacttgatcctgtcattctcctctgtctcccacatctgaattgataattgctgcaaaatgtcattagcctacacttcatccatcagggctcttggattcttacaccacgacttgctgtgcaaggtgtttattgcatcttcaaagtgaaactttaaattattattcaaacatttattttccttttgttttaaaaagagtccctacaatgatcacttctaagatttttttttaccttcccctctgcagcacacacagctattcaacaatgatttctaaaattcatatttcaaatttgtatctctccattttgaaacattatagaaagcatgggatgcttgagacaaatctggtttctcctttgaagtagctgttgacaacctactctcttgaaaagttagatataattcttaatcatgtttagtggaaatttgtttacctgttccatctgttttgctgtttcattgtaaggaagatgagaagtgttggaacagcttccctcccctaaaggtattctagcagaggcgagacagcaacttggcgggcatgttgcataggagttaagtaccagatggggaattgcccatgtgatggtgaagagtctctcacattgattttcttccttttctcctcttctctcctccttctcttctctcctctttctcttctcttctttctcttctcttctgtcttcctcttcctcttctcttcctctcctcttcctctttctctctcttcctttttctcttcctctttctctttctctttctcttctcttctctctctcttccttccttctttctttccttccttccttccttccttccttccttccttccttctttccctccctccctccctccctcctccctttttctttttctttctttttttttggtttggcagagtcttgctctgttgcccaggctgcagtgcagtggtgtgatctcggctcactgcaacctccacctcccgggttcaagcaattctcttgcctcagcttctccagttactgggactacaggtgcataccaccatgcccggctaatttttgtatttttagtagaggcggggttttgtcatgttggccaggctgatctcaaactcctgacctcaggtgatccgcctgcctcagccttccaaagtgctgagattacaggcatgagccgctgtacccggcctgattttctatgattctgcctttaaaagacagcacgtataccaagcctttttcagaaagcttttctcttaactccttctaatgctgaattttctctctattatcctcacccaattttggctgagagttagtgtacacaatttaacttcttagaaaaattccagtgtctatgcttatattgctcacttgaatcatttgaattagaaagggatctacaaataataaaagcaaagagtgcagacagattagggatagtaattcttaaagtgccatctatcccagatttccgttatagaccagcatatgtgtaattgtgcagtgggaggtaagtagtacccaggacattgcatgtacaatactttgaaacaaagtggcaacaaagatttcctggctcaggtatgcaccccagctgctggtttagatgaagtgctgagaatatttagaaaaagcgctttaaaaagcatctagagattatcatgaaaataattggagacaaagtcactaggctgctttgtgagaggcagcataccatggctctaaacccgttcacaaaaaacaatgttagagacattaggaattcaggttttgaaaatctttttttcgatttatttgtaatttacataccaaaaaaccacattaaaatagtcctcccttcaacatggctatcttttttcaagttttatatgcatagctctctcagcacttgaatggaaaaactgttacagcatttgggagttgtttttcttttagactttgcagatcttatctcaaggtgactaggaacccagagctaagtatctgtgaggcaatctctgcgaacgctgaacttacctagttggtttctatgaaatatgtagaatgcactgcagtagccattgtaagaaggtactataccggttttttggggcttgttgttgttgtttggtctgagaatgtactgccaacccctcttttataagagagaactgattttgatacatattttaaaatatgatagtacagagttaatggatgttaaaattttatttctttgttttggtaagtagattaaatcgagaatcatataatcagtacatttgagaattatataaccagtatataataatactggacacaaccatttgccatcttttcctgttatcatcccatagagtgggtggggagaatgaatagacataaacctagaataatgataaatggtttttaaaactctatattgaatacattccagctgataatgacttttctttttcaccttggtgatatcagcctcagggtaaaaaaaaaagtttcataaatcttttagttataaacaggaaagttttatattagtgtgtcatttcatttctagactgttgatggtgatgatgataaagaatttggagccaattttgatatatgaatgtattgcttttacatgtgatgattaaagctctccattagcagtt

SEQ ID NO: 166971 - DNA, 4299 bp, Homo sapiens
  Payload ID: 12869
  Gene Symbol: PARP11
  Gene Name: poly (ADP-ribose) polymerase family, member 11
  ENST ID: ENST00000458162
  CDS Start-End: 142-294
gggggaggaggaaggccttcgtaaaggttgcatctccgtcccttcgctcccggggacccgcgggaaaaaaaaaaatccaacacccaggccccgcggctagccccttcccacaggctctctccgctcgattttgtcaccgttatgtgggaagcgaatccagagatgtttcacaaagcagaagaattattttctaaaacaacaaacaatgaagtggatgacatggacacgtcagatacccagtggggctggttttacttggcagaatgtgggaagtggcacatgtttcagaaatgaagcaaatgaatctcaccactggaaagcagcgcttaataaaaagagcccccttttctatcagtgctttcagttacatctgtgaaaacgaggccatccctatgccaccacactgggagaatgtgaatactcaagtaccatatcagcttattcctctgcacaatcaaacacatgaatataatgaagttgctaatctctttgggaagacgatggatcgcaaccgaattaaaagaattcagagaattcaaaacctagatttgtgggagttcttttgcaggaaaaaggctcagctcaagaaaaaaagaggtgtgcctcagattaatgaacaaatgctgtttcatggtaccagcagtgaatttgtggaagcaatctgcattcataactttgattggagaataaatggtatacatggtgctgtctttggaaaaggaacctattttgctagagatgctgcttattccagtcgtttctgcaaagatgacataaagcatgggaacacattccaaattcatggtgtcagcttgcaacagcggcatctgtttagaacatataaatctatgtttcttgctcgagtgctaattggagattacataaacggagactccaaatacatgcgacctccttccaaagacgggagctatgtgaatttatatgacagctgtgtggatgatacctggaacccaaagatctttgtggtttttgatgccaaccaaatctatcctgagtacttgatagactttcattgatttcacttccaaatctcggtggtcaaggaagctttattcttttttgcaggaaggtttgctcttcagtcatctagccactaaatgttaattatctgatacttttgaaacagatatgaaaaaaagtggcctccatataaaaagacatactgacttcaaggttggtttttgttgttttgtttttgcctgtttcttgtagtcttgtttgttaaaagttgatatcattgatgttttaacacataggggtgaaagataccattcaaaatggaatcagctgagtctcaactaatgtggtcattgagatctttaaagtttacgtgtgtgttatcaggataaatgattttagtttaaatagacttattcgtataaatgttgaaaaaaaatacagacataaatgtgtccctttagaggaattgatcctttgtaaattgaattcaggtagtagtatcatccaccaatccatctgttgctttgttggtcttctgaaggggggatttaaaactctgaaacagtctgagcaccttgagagaaatcagaaacaagacaattatttgcagtgctgtcaaacaagccagaaggagaaaatcaaggtagaatgccccactttccagttgccttaggatagcaggctgcagcctcagacttgatcctgtcattctcctctgtctcccacatctgaattgataattgctgcaaaatgtcattagcctacacttcatccatcagggctcttggattcttacaccacgacttgctgtgcaaggtgtttattgcatcttcaaagtgaaactttaaattattattcaaacatttattttccttttgttttaaaaagagtccctacaatgatcacttctaagatttttttttaccttcccctctgcagcacacacagctattcaacaatgatttctaaaattcatatttcaaatttgtatctctccattttgaaacattatagaaagcatgggatgcttgagacaaatctggtttctcctttgaagtagctgttgacaacctactctcttgaaaagttagatataattcttaatcatgtttagtggaaatttgtttacctgttccatctgttttgctgtttcattgtaaggaagatgagaagtgttggaacagcttccctcccctaaaggtattctagcagaggcgagacagcaacttggcgggcatgttgcataggagttaagtaccagatggggaattgcccatgtgatggtgaagagtctctcacattgattttcttccttttctcctcttctctcctccttctcttctctcctctttctcttctcttctttctcttctcttctgtcttcctcttcctcttctcttcctctcctcttcctctttctctctcttcctttttctcttcctctttctctttctctttctcttctcttctctctctcttccttccttctttctttccttccttccttccttccttccttccttccttccttctttccctccctccctccctccctcctccctttttctttttctttctttttttttggtttggcagagtcttgctctgttgcccaggctgcagtgcagtggtgtgatctcggctcactgcaacctccacctcccgggttcaagcaattctcttgcctcagcttctccagttactgggactacaggtgcataccaccatgcccggctaatttttgtatttttagtagaggcggggttttgtcatgttggccaggctgatctcaaactcctgacctcaggtgatccgcctgcctcagccttccaaagtgctgagattacaggcatgagccgctgtacccggcctgattttctatgattctgcctttaaaagacagcacgtataccaagcctttttcagaaagcttttctcttaactccttctaatgctgaattttctctctattatcctcacccaattttggctgagagttagtgtacacaatttaacttcttagaaaaattccagtgtctatgcttatattgctcacttgaatcatttgaattagaaagggatctacaaataataaaagcaaagagtgcagacagattagggatagtaattcttaaagtgccatctatcccagatttccgttatagaccagcatatgtgtaattgtgcagtgggaggtaagtagtacccaggacattgcatgtacaatactttgaaacaaagtggcaacaaagatttcctggctcaggtatgcaccccagctgctggtttagatgaagtgctgagaatatttagaaaaagcgctttaaaaagcatctagagattatcatgaaaataattggagacaaagtcactaggctgctttgtgagaggcagcataccatggctctaaacccgttcacaaaaaacaatgttagagacattaggaattcaggttttgaaaatctttttttcgatttatttgtaatttacataccaaaaaaccacattaaaatagtcctcccttcaacatggctatcttttttcaagttttatatgcatagctctctcagcacttgaatggaaaaactgttacagcatttgggagttgtttttcttttagactttgcagatcttatctcaaggtgactaggaacccagagctaagtatctgtgaggcaatctctgcgaacgctgaacttacctagttggtttctatgaaatatgtagaatgcactgcagtagccattgtaagaaggtactataccggttttttggggcttgttgttgttgtttggtctgagaatgtactgccaacccctcttttataagagagaactgattttgatacatattttaaaatatgatagtacagagttaatggatgttaaaattttatttctttgttttggtaagtagattaaatcgagaatcatataatcagtacatttgagaattatataaccagtatataataatactggacacaaccatttgccatcttttcctgttatcatcccatagagtgggtggggagaatgaatagacataaacctagaataatgataaatggtttttaaaactctatattgaatacattccagctgataatgacttttctttttcaccttggtgatatcagcctcagggtaaaaaaaaaagtttcataaatcttttagttataaacaggaaagttttatattagtgtgtcatttcatttctagactgttgatggtgatgatgataaagaatttggagccaattttgatatatgaatgtattgcttttacatgtgatgattaaagctctccattagcagtt

SEQ ID NO: 166972 - DNA, 4377 bp, Homo sapiens
  Payload ID: 12869
  Gene Symbol: PARP11
  Gene Name: poly (ADP-ribose) polymerase family, member 11
  Uniprot ID: Q9NR21
  ENST ID: ENST00000447133
  CDS Start-End: 342-1115
ggagacagatctgactggccaacgtcgggcggaagtcgggaggttgggtggtctgtaaacgctggcttgtgacagggagggggaggaggaaggccttcgtaaaggttgcatctccgtcccttcgctcccggggacccgcgggaaaaaaaaaaatccaacacccaggccccgcggctagccccttcccacaggctctctccgctcgattttgtcaccgttatgtgggaagcgaatccagagatgtttcacaaagcagaagaattattttctaaaacaacaaacaatgaagtggatgacatggacacgtcagatacccagtggggctggttttacttggcagaatgtgggaagtggcacatgtttcagaaatgaagcaaatgaatctcaccactggaaagcagcgcttaataaaaagagcccccttttctatcagtgctttcagttacatctgtgaaaacgaggccatccctatgccaccacactgggagaatgtgaatactcaagtaccatatcagcttattcctctgcacaatcaaacacatgaatataatgaagttgctaatctctttgggaagacgatggatcgcaaccgaattaaaagaattcagagaattcaaaacctagatttgtgggagttcttttgcaggaaaaaggctcagctcaagaaaaaaagaggtgtgcctcagattaatgaacaaatgctgtttcatggtaccagcagtgaatttgtggaagcaatctgcattcataactttgattggagaataaatggtatacatggtgctgtctttggaaaaggaacctattttgctagagatgctgcttattccagtcgtttctgcaaagatgacataaagcatgggaacacattccaaattcatggtgtcagcttgcaacagcggcatctgtttagaacatataaatctatgtttcttgctcgagtgctaattggagattacataaacggagactccaaatacatgcgacctccttccaaagacgggagctatgtgaatttatatgacagctgtgtggatgatacctggaacccaaagatctttgtggtttttgatgccaaccaaatctatcctgagtacttgatagactttcattgatttcacttccaaatctcggtggtcaaggaagctttattcttttttgcaggaaggtttgctcttcagtcatctagccactaaatgttaattatctgatacttttgaaacagatatgaaaaaaagtggcctccatataaaaagacatactgacttcaaggttggtttttgttgttttgtttttgcctgtttcttgtagtcttgtttgttaaaagttgatatcattgatgttttaacacataggggtgaaagataccattcaaaatggaatcagctgagtctcaactaatgtggtcattgagatctttaaagtttacgtgtgtgttatcaggataaatgattttagtttaaatagacttattcgtataaatgttgaaaaaaaatacagacataaatgtgtccctttagaggaattgatcctttgtaaattgaattcaggtagtagtatcatccaccaatccatctgttgctttgttggtcttctgaaggggggatttaaaactctgaaacagtctgagcaccttgagagaaatcagaaacaagacaattatttgcagtgctgtcaaacaagccagaaggagaaaatcaaggtagaatgccccactttccagttgccttaggatagcaggctgcagcctcagacttgatcctgtcattctcctctgtctcccacatctgaattgataattgctgcaaaatgtcattagcctacacttcatccatcagggctcttggattcttacaccacgacttgctgtgcaaggtgtttattgcatcttcaaagtgaaactttaaattattattcaaacatttattttccttttgttttaaaaagagtccctacaatgatcacttctaagatttttttttaccttcccctctgcagcacacacagctattcaacaatgatttctaaaattcatatttcaaatttgtatctctccattttgaaacattatagaaagcatgggatgcttgagacaaatctggtttctcctttgaagtagctgttgacaacctactctcttgaaaagttagatataattcttaatcatgtttagtggaaatttgtttacctgttccatctgttttgctgtttcattgtaaggaagatgagaagtgttggaacagcttccctcccctaaaggtattctagcagaggcgagacagcaacttggcgggcatgttgcataggagttaagtaccagatggggaattgcccatgtgatggtgaagagtctctcacattgattttcttccttttctcctcttctctcctccttctcttctctcctctttctcttctcttctttctcttctcttctgtcttcctcttcctcttctcttcctctcctcttcctctttctctctcttcctttttctcttcctctttctctttctctttctcttctcttctctctctcttccttccttctttctttccttccttccttccttccttccttccttccttccttctttccctccctccctccctccctcctccctttttctttttctttctttttttttggtttggcagagtcttgctctgttgcccaggctgcagtgcagtggtgtgatctcggctcactgcaacctccacctcccgggttcaagcaattctcttgcctcagcttctccagttactgggactacaggtgcataccaccatgcccggctaatttttgtatttttagtagaggcggggttttgtcatgttggccaggctgatctcaaactcctgacctcaggtgatccgcctgcctcagccttccaaagtgctgagattacaggcatgagccgctgtacccggcctgattttctatgattctgcctttaaaagacagcacgtataccaagcctttttcagaaagcttttctcttaactccttctaatgctgaattttctctctattatcctcacccaattttggctgagagttagtgtacacaatttaacttcttagaaaaattccagtgtctatgcttatattgctcacttgaatcatttgaattagaaagggatctacaaataataaaagcaaagagtgcagacagattagggatagtaattcttaaagtgccatctatcccagatttccgttatagaccagcatatgtgtaattgtgcagtgggaggtaagtagtacccaggacattgcatgtacaatactttgaaacaaagtggcaacaaagatttcctggctcaggtatgcaccccagctgctggtttagatgaagtgctgagaatatttagaaaaagcgctttaaaaagcatctagagattatcatgaaaataattggagacaaagtcactaggctgctttgtgagaggcagcataccatggctctaaacccgttcacaaaaaacaatgttagagacattaggaattcaggttttgaaaatctttttttcgatttatttgtaatttacataccaaaaaaccacattaaaatagtcctcccttcaacatggctatcttttttcaagttttatatgcatagctctctcagcacttgaatggaaaaactgttacagcatttgggagttgtttttcttttagactttgcagatcttatctcaaggtgactaggaacccagagctaagtatctgtgaggcaatctctgcgaacgctgaacttacctagttggtttctatgaaatatgtagaatgcactgcagtagccattgtaagaaggtactataccggttttttggggcttgttgttgttgtttggtctgagaatgtactgccaacccctcttttataagagagaactgattttgatacatattttaaaatatgatagtacagagttaatggatgttaaaattttatttctttgttttggtaagtagattaaatcgagaatcatataatcagtacatttgagaattatataaccagtatataataatactggacacaaccatttgccatcttttcctgttatcatcccatagagtgggtggggagaatgaatagacataaacctagaataatgataaatggtttttaaaactctatattgaatacattccagctgataatgacttttctttttcaccttggtgatatcagcctcagggtaaaaaaaaaagtttcataaatcttttagttataaacaggaaagttttatattagtgtgtcatttcatttctagactgttgatggtgatgatgataaagaatttggagccaattttgatatatgaatgtattgcttttacatgtgatgattaaagctctccattagcagtt

SEQ ID NO: 166973 - DNA, 3796 bp, Homo sapiens
  Payload ID: 12870
  Gene Symbol: PARP12
  Gene Name: poly (ADP-ribose) polymerase family, member 12
  Uniprot ID: Q9H0J9
  ENST ID: ENST00000263549
  CDS Start-End: 875-2980
attcctggattacctcctcaaagggctctaacaactcgcattgctctcagcgtgtgagagggtcctttgctctgaagggtcttctaaaatatttgttcaatcgttacttagcaggggctgggagtaacggattttattttattttattttattttttgagacggagtctcgctctgtcgcccaggctggagtgcagtcgcgcaatctcggctcacggatttgctcttttaaaggacatacccttttatgtttaaatgaaggaactcattgatgcaccgaggcgaaaggaacctttaattaagtgcgtcttctatgcggagtgatcgcttttgtcacttgttcgaggggtgagagctcccgtcagttgtccctgtttctgtgagccgtctacgaagcccgggcttggcctgggcgacgctgagcggctttaaccggcggcgtccagccggctccgccagcgctgccgccgccctcgaggctccctctgactgaaggcgcgctgagcatcgcggcattaggggctcctggtccctcaaacatccagggaagccattttcagggactaggtactgacccccgcgagccgccacagccacagcccgcgctccgggccgaacgcccgagctcaagagctcccgagcttccgtcgggcggcggcctcacagctgggggccctgaggcggaaggcgcagccgctcagctgcggaccgggggcgtggcgagggcgcacaggttctgtttttcgccggcccggggccgctttcggtttcgtttcccgccggcgtctccaccctgcgagagccgcccgccagccagcgtccgccgccgtccgcgtcgcgccacccgcggtccgacgggagcaggcccagcggccatggcccaggccggcgtcgtcggtgaggtcacccaggtgctgtgcgcggccgggggcgccctggagttgcccgagctgcggcgccgcttgcggatgggcttgagcgccgacgcgctggagcggctgctgcggcagcgtgggcgcttcgtggtggcggtgcgggcgggcggcgcagccgcggccccggagcgcgtggtgctggccgcctcgccgctgcgcctgtgtcgcgcgcaccagggctccaagccgggctgcgtggggctctgcgcgcagctccacctctgcaggttcatggtctacggcgcctgcaagttcctgagagccgggaagaactgtaggaatagtcacagcttgacaaccgaacacaacctgagtgtgctgagaactcatggcgttgaccacctgagctataatgagctatgccaactcttgtttcagaacgacccctggcttttgccagaaatttgccaacattacaacaaaggagatggaccccacggctcttgtgcctttcaaaagcagtgcatcaagctccatatctgccagtattttttacagggggaatgcaagtttggcactagctgtaagagatcccatgatttctctaattctgagaatctggaaaaattggagaagttgggtatgagctcagacctggtgagcaggctgcctaccatttatagaaatgcacatgacatcaagaataagagctctgcccccagcagagtgcctcctctttttgtcccacaggggacttctgaaagaaaagacagttcaggttctgtgtccccaaacactcttagccaggaggagggtgatcagatctgtttgtaccatatccggaaaagttgtagctttcaagataagtgccatagagttcatttccatttgccgtatcgatggcaattcttggatagaggcaaatgggaggatttggacaacatggaacttattgaagaggcatattgcaatcccaaaatagaaaggatcctgtgctctgagtcagccagtacctttcactctcattgtctgaactttaacgccatgacttacggtgctacccaggctcgccgcctctccacggcctcctctgtcaccaaacctccacacttcatcctcaccactgactggatttggtactggagtgatgagtttggttcttggcaggaatatggaagacagggcacggtgcaccctgtgaccactgtcagcagtagcgacgtggagaaggcctacctggcctactgtacaccggggtctgacggccaggcagccaccttgaagttccaggccggaaagcacaactacgagttagatttcaaagccttcgttcagaaaaacctggtctatggcacaactaaaaaggtttgccgcagacccaaatacgtgtctccccaggatgtgacgaccatgcaaacctgcaataccaagtttccaggcccgaagagcatcccagactattgggactcctctgccctgccagacccaggctttcagaagatcacccttagttcttcctcggaagagtatcagaaggtctggaacctctttaaccgcacgctgcctttctactttgttcagaagattgagcgagtacagaacctggccctctgggaagtctaccagtggcaaaaaggacagatgcagaagcagaacggagggaaggccgtggacgagcggcagctgttccacggcaccagcgccatttttgtggacgccatctgccagcagaactttgactggcgggtctgtggtgttcatggcacttcctacggcaaggggagctactttgcccgagatgctgcatattcccaccactacagcaaatccgacacgcagacccacacgatgttcctggcccgggtgctggtgggcgagttcgtcaggggcaatgcctcctttgtccgtccgccggccaaggagggctggagcaacgccttctatgatagctgcgtgaacagtgtgtccgacccctccatctttgtgatctttgagaaacaccaggtctacccagagtatgtcatccagtacaccacctcctccaagccctcggtcacaccctccatcctgctggccttgggctccctgttcagcagccgacagtgagcgcacaggagtgttccaggcctttcacctgctctgccttgaaatggctatttgggcctttccttttctttttaaacagaaacttttaatgaactgttctcttaacattgacctctcaatgaagttatgttcttaatctcttgctaataatgatttttacttttaagtcacttttgggttcactagtggattaaccagaagtgattgtagttgagtccagttttgctttttaataatgtgttgaagttttagtttttactctttgttgactttgctgcttattggcaccagggacagagtttctagatacaattttatggattggttttaatttttatgagtttgtctctgcagtgattcggtttctcagagtctcatggcatcatagtttttccagaatgacacagtagccaccggtggatgacagcccacgggcggcacagtcacttctgcctgttgctctgacaccaacccaggcagctctgctgtggcttctcctgggctctggcattagttggtctgtgtcacattgtcagaacaggtggctgctgtgtggtgccatcgagtccctgctggttccccttgtcctgggagggtcacccattgcccaaggaagtgcatccacctggcaggtgacctggaggagtagcttccccgaggacccccaggcttggcctgtgattgcgcaaacccacatttcctaagcacactggacacccttcgagtgtgggttttaacatccctgtgagattgaatacttgtgccacacatgtcacaaaagagtatggaaataaaagaaaatttatccgaagtgga

SEQ ID NO: 166974 - DNA, 915 bp, Homo sapiens
  Payload ID: 12870
  Gene Symbol: PARP12
  Gene Name: poly (ADP-ribose) polymerase family, member 12
  ENST ID: ENST00000489809
  CDS Start-End: 1-522
aaattggagaagttgggtatgagctcagacctggtgagcaggctgcctaccatttatagaaatgcacatgacatcaagaataagagctctgcccccagcagagtgcctcctctttttgtcccacaggggacttctgaaagaaaagacagttcaggttctgtgtccccaaacactcttagccaggaggagggtgatcagatctgtttgtaccatatccggaaaagttgtagctttcaagccttcgttcagaaaaacctggtctatggcacaactaaaaaggtttgccgcagacccaaatacgtgtctccccaggatgtgacgaccatgcaaacctgcaataccaagtttccaggcccgaagagcatcccagactattgggactcctctgccctgccagacccaggctttcaggcaaaaaggacagatgcagaagcagaacggagggaaggccgtggacgagcggcagctgttccacggcaccagcgccatttttgtggacgccatctgccagcagaactttgactggcgggtctgtggtgttcatggcacttcctacggcaaggggagctactttgcccgagatgctgcatattcccaccactacagcaaatccgacacgcagacccacacgatgttcctggcccgggtgctggtgggcgagttcgtcaggggcaatgcctcctttgtccgtccgccggccaaggagggctggagcaacgccttctatgatagctgcgtgaacagtgtgtccgacccctccatctttgtgatctttgagaaacaccaggtctacccagagtatgtcatccagtacaccacctcctccaagccctcggtcacaccctccatcctgctggccttgggctccctgttcagcagccgacagtgagcgcacaggagtgttccaggcctttc

SEQ ID NO: 166975 - DNA, 2861 bp, Homo sapiens
  Payload ID: 12870
  Gene Symbol: PARP12
  Gene Name: poly (ADP-ribose) polymerase family, member 12
  ENST ID: ENST00000473341
  CDS Start-End: 87-1349
caccctgcgagagccgcccgccagccagcgtccgccgccgtccgcgtcgcgccacccgcggtccgacgggagcaggcccagcggccatggcccaggccggcgtcgtcggtgaggtcacccaggtgctgtgcgcggccgggggcgccctggagttgcccgagctgcggcgccgcttgcggatgggcttgagcgccgacgcgctggagcggctgctgcggcagcgtgggcgcttcgtggtggcggtgcgggcgggcggcgcagccgcggccccggagcgcgtggtgctggccgcctcgccgctgcgcctgtgtcgcgcgcaccagggctccaagccgggctgcgtggggctctgcgcgcagctccacctctgcaggttcatggtctacggcgcctgcaagttcctgagagccgggaagaactgtaggaatagtcacagcttgacaaccgaacacaacctgagtgtgctgagaactcatggcgttgaccacctgagctataatgagctatgccaactcttgtttcagaacgacccctggcttttgccagaaatttgccaacattacaacaaaggagatggaccccacggctcttgtgcctttcaaaagcagtgcatcaagctccatatctgccagtattttttacagggggaatgcaagtttggcactagctgtaagagatcccatgatttctctaattctgagaatctggaaaaattggagaagttgggtatgagctcagacctggtgagcaggctgcctaccatttatagaaatgcacatgacatcaagaataagagctctgcccccagcagagtgcctcctctttttgtcccacaggggacttctgaaagaaaagacagttcaggttctgtgtccccaaacactcttagccaggaggagggtgatcagatctgtttgtaccatatccggaaaagttgtagctttcaagataagtgccatagagttcatttccatttgccgtatcgatggcaattcttggatagaggcaaatgggaggatttggacaacatggaacttattgaagaggcatattgcaatcccaaaatagaaaggatcctgtgctctgagtcagccagtacctttcactctcattgtctgaactttaacgccatgacttacggtgctacccaggctcgccgcctctccacggcctcctctgtcaccaaacctccacacttcatcctcaccactgactggatttggtactggagtgatgagtttggttcttggcaggaatatggaagacagccttcgttcagaaaaacctggtctatggcacaactaaaaaggtttgccgcagacccaaatacgtgtctccccaggatgtgacgaccatgcaaacctgcaataccaagtttccaggcccgaagagcatcccagactattgggactcctctgccctgccagacccaggctttcagaagatcacccttagttcttcctcggaagagtatcagaaggtctggaacctctttaaccgcacgctgcctttctactttgttcagaagattgagcgagtacagaacctggccctctgggaagtctaccagtggcaaaaaggacagatgcagaagcagaacggagggaaggccgtggacgagcggcagctgttccacggcaccagcgccatttttgtggacgccatctgccagcagaactttgactggcgggtctgtggtgttcatggcacttcctacggcaaggggagctactttgcccgagatgctgcatattcccaccactacagcaaatccgacacgcagacccacacgatgttcctggcccgggtgctggtgggcgagttcgtcaggggcaatgcctcctttgtccgtccgccggccaaggagggctggagcaacgccttctatgatagctgcgtgaacagtgtgtccgacccctccatctttgtgatctttgagaaacaccaggtctacccagagtatgtcatccagtacaccacctcctccaagccctcggtcacaccctccatcctgctggccttgggctccctgttcagcagccgacagtgagcgcacaggagtgttccaggcctttcacctgctctgccttgaaatggctatttgggcctttccttttctttttaaacagaaacttttaatgaactgttctcttaacattgacctctcaatgaagttatgttcttaatctcttgctaataatgatttttacttttaagtcacttttgggttcactagtggattaaccagaagtgattgtagttgagtccagttttgctttttaataatgtgttgaagttttagtttttactctttgttgactttgctgcttattggcaccagggacagagtttctagatacaattttatggattggttttaatttttatgagtttgtctctgcagtgattcggtttctcagagtctcatggcatcatagtttttccagaatgacacagtagccaccggtggatgacagcccacgggcggcacagtcacttctgcctgttgctctgacaccaacccaggcagctctgctgtggcttctcctgggctctggcattagttggtctgtgtcacattgtcagaacaggtggctgctgtgtggtgccatcgagtccctgctggttccccttgtcctgggagggtcacccattgcccaaggaagtgcatccacctggcaggtgacctggaggagtagcttccccgaggacccccaggcttggcctgtgattgcgcaaacccacatttcctaagcacactggacacccttcgagtgtgggttttaacatccctgtgagattgaatacttgtgccacacatgtcacaaaagagtatggaaataaaagaaaatttatccgaa

SEQ ID NO: 166976 - DNA, 874 bp, Homo sapiens
  Payload ID: 12870
  Gene Symbol: PARP12
  Gene Name: poly (ADP-ribose) polymerase family, member 12
  ENST ID: ENST00000491598
  CDS Start-End: 1-137
aaagaaaagacagttcaggttctgtgtccccaaacactcttagccaggaggagggtgatcagatctgtttgtaccatatccggaaaagttgtagctttcaagggcacggtgcaccctgtgaccactgtcagcagtagcgacgtggagaaggcctacctggcctactgtacaccggggtctgacggccaggcagccaccttgaagttccaggccggaaagcacaactacgagttagatttcaaagccttcgttcagaaaaacctggtctatggcacaactaaaaaggtttgccgcagacccaaatacgtgtctccccaggatgtgacgaccatgcaaacctgcaataccaagtttccaggcccgaagagcatcccagactattgggactcctctgccctgccagacccaggctttcaggcaaaaaggacagatgcagaagcagaacggagggaaggccgtggacgagcggcagctgttccacggcaccagcgccatttttgtggacgccatctgccagcagaactttgactggcgggtctgtggtgttcatggcacttcctacggcaaggggagctactttgcccgagatgctgcatattcccaccactacagcaaatccgacacgcagacccacacgatgttcctggcccgggtgctggtgggcgagttcgtcaggggcaatgcctcctttgtccgtccgccggccaaggagggctggagcaacgccttctatgatagctgcgtgaacagtgtgtccgacccctccatctttgtgatctttgagaaacaccaggtctacccagagtatgtcatccagtacaccacctcctccaagccctcggtcacaccctccatcctgctggccttgggctcc

SEQ ID NO: 166977 - DNA, 535 bp, Homo sapiens
  Payload ID: 12870
  Gene Symbol: PARP12
  Gene Name: poly (ADP-ribose) polymerase family, member 12
  ENST ID: ENST00000484111
  CDS Start-End: 1-230
ttgagcgagtacagaacctggccctctgggaagtctaccagtggcaaaaaggacagatgcagaagcagaacggagggaaggccgtggacgagcggcagctgttccacggcaccagcgccatttttgtggacgccatctgccagcagaactttgactggcgggtctgtggtgttcatggcacttcctacggcaagggtaggtggcatatattgtctcctttcaccctttaacacatcccaagaacaggacattatcttctgtaaccacaatatgcttaccaagttgagaacattttctgcccagcagtccatgttccgggtccatcagttctttgttagtcagtttccgtctgaggcagcgatggcaaggggtcaagatggacagcagccagtggtagacttgtggatttaaatgtacaggtgacagcttctaactcagatttccatttgacaaggctcataattctatacattgggctgccagagtctacagactgcttccgtatatgggatctcattcattttccatgccaacc

SEQ ID NO: 166978 - DNA, 7915 bp, Homo sapiens
  Payload ID: 12871
  Gene Symbol: PARP14
  Gene Name: poly (ADP-ribose) polymerase family, member 14
  Uniprot ID: Q460N5
  ENST ID: ENST00000474629
  CDS Start-End: 267-5672
ccgtggagcacaggtgaactgaggccgccttcccggggcgccgctggccagccccaaagggttactttggccttggctgtgggccgaatgcgaaggtggggaggtgggcgggggatgactctgccattcctgggtccgctgtgttaggctgaaggcaaaaggaaaccaaggcctgggagttttccaggaaacgaaagcgaaagagtcaaagttagcggcccggagttggcgcggcccctgcagtccggcggagagcggagctgaggatggctgtgcccggctccttcccgctgctggtcgagggctcctggggccccgaccccccgaagaacttgaacaccaagttgcagatgtacttccagagcccgaagaggtcgggaggcggcgagtgtgaggtccgccaggatcccaggagcccatcccgcttcctggtgttcttctacccggaggacgttcggcagaaggttctggagagaaaaaatcatgagttggtatggcaaggaaaaggaacattcaagttaactgtccagttacctgcaaccccagatgaaatcgatcatgtctttgaagaggaacttctaacaaaagaatccaagaccaaagaagatgttaaagaaccagatgtgtcagaagaattggatacaaaactccctcttgatggtggattagacaaaatggaagatatcccagaggaatgtgaaaatatttcctctttggtggcatttgaaaacctcaaggcaaatgtgactgacataatgctaatcttgttagtggagaacataagtggcctgtctaatgatgactttcaagtggaaataataagagattttgatgttgctgttgttacctttcaaaagcacatagatactataagatttgttgatgattgtaccaagcaccattcaattaaacaacttcagctttctccaagacttctggaagtgacaaacacaatcagggttgaaaacctgccacctggtgctgatgactacagtttaaaacttttctttgaaaatccctataatggagggggaagagttgccaatgttgaatattttcctgaagagagttcagctctgattgaattttttgacagaaaagtgttagacaccatcatggccacaaaactcgacttcaataaaatgccactttctgtgttcccatactatgcctcattgggcacagccttgtatggaaaggagaagcctctgatcaagcttccagcaccatttgaagagtcactagatcttcccttatggaagttcttacagaaaaagaatcacctcattgaggagataaacgatgaaatgaggcgttgtcactgtgagctcacgtggtcccaactcagtggtaaagttaccatcagaccagcagccaccttagtcaatgaaggaagaccgagaatcaagacctggcaggcagatacttccacaacactctctagcatcaggtctaaatataaagtcaacccaattaaagtggatccaacaatgtgggacaccataaaaaatgatgtgaaagatgacaggattttgattgagtttgatacacttaaggagatggtaatcttagcagggaaatcagaggatgtccaaagcattgaggtacaagtcagggagttaatagaaagcactactcaaaaaattaaaagggaagagcaaagtttgaaggaaaaaatgatcatttctccaggcaggtattttcttttgtgtcacagcagtctactggaccatttactcacggagtgcccagagatagagatttgttacgatagagtcactcaacacttgtgcttgaaaggacctagtgcagatgtgtataaagcaaagtgtgaaatccaggaaaaggtgtacaccatggctcagaaaaacattcaggtttctcctgagatttttcagtttttgcaacaggtaaactggaaagaattctctaagtgtcttttcatagcacagaagattcttgcactttatgagctagagggtacaactgttctcttaaccagctgttcttctgaagccctgttagaagcagaaaagcaaatgctcagtgccttaaattataagcgcattgaagttgagaacaaagaagttcttcatggcaagaaatggaaagggctcactcacaatttgcttaagaaacaaaattcctccccaaacactgtaatcatcaatgagttaacttcagaaaccacagctgaagtcatcattacaggctgtgtaaaagaagtaaatgaaacctataaattgctttttaacttcgttgaacaaaacatgaaaatagagagactggttgaagtaaagccttccttagttattgactatttaaagacagaaaagaagctattctggccaaagataaagaaggtaaatgtgcaggtaagtttcaatcctgagaacaaacaaaaaggcattttactaactggctcaaagaccgaagtactgaaggcagtggacattgtcaagcaagtctgggattcagtctgtgttaaaagtgtccatactgataagccaggagccaagcagttcttccaggataaagcacggttttatcaaagtgagatcaaacggttgtttggttgttacattgaactacaggagaatgaagtaatgaaggagggaggcagccccgctgggcagaagtgcttctctcggacagtcttggcccctggcgttgtgctgattgtgcagcagggtgacttggcacggcttcctgtcgatgtggtggtgaatgcatctaatgaggaccttaagcattatggtggcctggccgctgcgctctcaaaagcagctggccctgagctccaggccgactgtgaccagatagtgaagagagagggcagactcctaccgggcaatgccaccatctccaaggcaggaaagctgccctaccaccacgtgatccatgcagtggggccccgctggagcggatatgaggccccgaggtgtgtgtacctattaaggagagctgtgcaactcagtctctgtctagccgaaaaatacaagtaccgatccatagccatcccagctattagttctggagtctttggctttcccttaggccgatgcgtggagaccattgtttctgccatcaaggaaaacttccaattcaagaaggatggacactgcttgaaagaaatctaccttgtggatgtatctgagaagactgttgaggcctttgcagaagctgtgaaaactgtatttaaagccaccctgccagatacagctgccccgccaggtttaccaccagcagcagcggggcctgggaaaacatcatgggaaaaaggaagcctggtgtccccgggaggcctgcagatgctgttggtgaaagagggtgtgcagaatgctaagaccgatgttgttgtcaactccgttcccttggatctcgtgcttagtagagggcctctttctaagtccctcttggaaaaagctggaccagagctccaggaggaattggacacagttggacaaggggtggctgtcagcatgggcacagtgctcaaaaccagcagctggaatctggactgtcgctatgtgcttcacgtggtagctccggagtggagaaatggtagcacatcttcactcaagataatggaagacataatcagagaatgtatggagatcactgagagcttgtccttaaaatcaattgcatttccagcaataggaacaggaaacttgggatttcctaaaaacatattcgctgaattaatcatttcagaggtgttcaaatttagtagcaagaatcagctgaaaactttacaagaggttcactttctgctgcacccgagtgatcatgaaaatattcaggcattttcagatgaatttgccagaagggctaatggaaatctcgtcagtgacaaaattccgaaggctaaagatacacaaggtttttatgggactgtttctagccctgattcaggtgtgtatgaaatgaagattggctccatcatcttccaggtggcttctggagatatcacgaaagaagaggcagatgtgattgtaaattcaacatcaaactcattcaatctcaaagcaggggtctccaaagcaattttagaatgtgctggacaaaatgtagaaagggaatgttctcagcaagctcagcagcgcaaaaatgattatataatcaccggaggtggatttttgaggtgcaagaatatcattcatgtaattggtggaaatgatgtcaagagttcagtttcctctgttttgcaggagtgtgaaaaaaaaaattactcatccatttgcctcccagccattgggacaggaaatgccaaacaacacccagataaggttgctgaagccataattgatgccattgaagactttgtccagaaaggatcagcccagtctgtgaaaaaagttaaagttgttatctttctgcctcaagtactggatgtgttttatgccaacatgaagaaaagagaagggactcagctttcttcccaacagtctgtgatgtctaaacttgcatcatttttgggcttttcaaagcaatctccccaaaaaaagaatcatttggttttggaaaagaaaacagaatcagcaacttttcgggtgtgtggtgaaaatgtcacgtgtgtggaatatgctatctcctggctacaagacctgattgaaaaagaacagtgtccttacaccagtgaagatgagtgcatcaaagactttgatgaaaaggagtatcaggagttgaatgagctgcagaagaagttaaatattaacatttccctggaccataagagacctttgattaaggttttgggaattagcagagatgtgatgcaggctagagatgaaattgaggcgatgatcaagagagttcgattggccaaagaacaggaatcccgggcagattgtatcagtgagtttatagaatggcagtataatgacaataacacttctcattgttttaacaaaatgaccaatctgaaattagaggatgcaaggagagaaaagaaaaaaacagttgatgtcaaaattaatcatcggcactacacagtgaacttgaacacatacactgccacagacacaaagggccacagtttatctgttcagcgcctcacgaaatccaaagttgacatccctgcacactggagtgatatgaagcagcagaatttctgtgtggtggagctgctgcctagtgatcctgagtacaacacggtggcaagcaagtttaatcagacctgctcacacttcagaatagagaagattgagaggatccagaatccagatctctggaatagctaccaggcaaagaaaaaaactatggatgccaagaatggccagacaatgaatgagaagcaactcttccatgggacagatgccggctccgtgccacacgtcaatcgaaatggctttaaccgcagctatgccggaaagaatgctgtggcatatggaaagggaacctattttgctgtcaatgccaattattctgccaatgatacgtactccagaccagatgcaaatgggagaaagcatgtgtattatgtgcgagtacttactggaatctatacacatggaaatcattcattaattgtgcctccttcaaagaaccctcaaaatcctactgacctgtatgacactgtcacagataatgtgcaccatccaagtttatttgtggcattttatgactaccaagcatacccagagtaccttattacgtttagaaaataacactttggtatccttcccacaaaattattctccatttgtacatatctagttgtaaaacaagttttagcttttttttttaattcctcttaacagatttttctaatatccaaggatcattctttgtcgctgaagtcagtctttcttcagcttccctttcataatggaaatgaacttattatcttgagagcaaataacttggaaaatttaaatgagataatgcagttgcaactgtgtgtccacaagtatggacatcaaatctgtgggaaaagaacaggtttgtattttcaggaaggagagaataacagtcttatagacagagggcacagctaagcacagctgccactgcaggagacaggccccatgtcaggatgccatagtgctgtggggagcacagtattacccagtgggtagggcttctgtcttccctgggagcagggatggtatcttagtcaatttttttcccttgagatgaggtctgtgcctgatgtacaacggatactccataaatgtttgacaaaccaacgaagaatgaaaaaaagcctagtcagactcccatccaaagtaggaactatctctttaacattcttgactcactatcactttacctcaaattgaacagattccatgacggaacttcattcttcacaaactagccagtgacatgtgggacagctctggccagggctctgggactgcagtgtacttgcgctctgcacggtccaggagctgtgatgtggctgtggtctaggggaatcctgcctgccccatggagttgcgcagcacaaccctggctccaattgccagaaggctctttttaatgctgaaccaaaatgtgcctttttttttttttttttgagatggagtttcactcttgttgcccaggctggagtgcaatggcgcgatctcagctcactgcagccactgcctcccaggttcaagtgattctcctgcctcagcctcccgagtagctgggattacaggcatgcgctaacacacccagctaattttgtatttttagtagagacgaggtttctccatgttcgacaggctggtctcgaactcccacctcagcctcccaaactgctgggattacaggtgtgagccaccgtgaccagccaatgtgccttcttatagtgtctactcattggtctttgttctgcccagtgataacaatgggataacgcctgctacacatcttcattgtgaaacccttcccctgtgctgagattaaatgaactctaagattattaaatagtatattttccttgacagcctagcgtttgatgattttaaagccttatgtataaataaaccaaaggaagtaagcagtcatattgctaatttgctaactcctatctattgaatggtgaagttttaaaaatttccccaggtaagtttaagattcaaacaccatctattgagcacctacattgtgtgccaggtagtaaaataggtgctttcatacacattgtctcaattcctgtgaggtcagaattatctctgcatttgaaacttgaggaaacatgctcagagtgcaagaagcttccttgcctgagatcacctagaaaggaaccctcagagccggcaactgaatcttggtccctgtgatgtcaagcccattgctctcccactgcagaacatggcctctagattaatgccaccgattcaggaacacctccgacagtcttgaaatacccccatgttgccttgtttgttttttccttctggcttcttctattacagtctcttcattggaagctctgtaggccaaggccagagctgatactgacacggagccaatgcagatagcacatcagatgctaggggtcgctgggaggattaagggacttaatctgctaggaacacctgtacttgaagtggaggaggctagggggccacagttgctgcttcattaacatagaggttttggatttttttctcttgtggtttgttttttaagtggattggcagactccttgttgcttaagagtggctttctaggcaggccactggcatctgaattcatcattgacaataaatgtaagaaattggaataaaaaagagagacctgctgttattcgcttttgttctccagtgatttgattaactcagggcaaggctgaatatcagagtgtatcgcactgaagaataataatccattcagtaatgttatagttatcctcaatctaaatatgtcaactgtcattttgctacttttcaaataaaatacttgaaaactgtca

SEQ ID NO: 166979 - DNA, 581 bp, Homo sapiens
  Payload ID: 12871
  Gene Symbol: PARP14
  Gene Name: poly (ADP-ribose) polymerase family, member 14
  ENST ID: ENST00000494811
  CDS Start-End: 1-581
agtccggcggagagcggagctgaggatggctgtgcccggctccttcccgctgctggtcgagggctcctggggccccgaccccccgaagaacttgaacaccaagttgcagatgtacttccagagcccgaagaggtcgggaggcggcgagtgtgaggtccgccaggatcccaggagcccatcccgcttcctggtgttcttctacccggaggacgttcggcagaaggttctggagagaaaaaatcatgagttggtatggcaaggaaaaggaacattcaagttaactgtccagttacctgcaaccccagatgaaatcgatcatgtctttgaagaggaacttctaacaaaagaatccaagaccaaagaagatgttaaagaaccagatactataagatttgttgatgattgtaccaagcaccattcaattaaacaacttcagctttctccaagacttctggaagtgacaaacacaatcagggttgaaaacctgccacctggtgctgatgactacagtttaaaacttttctttgaaaatccctataatggagggggaagagttgccaatgttgaatattttcctgaag

SEQ ID NO: 166980 - DNA, 8437 bp, Homo sapiens
  Payload ID: 12871
  Gene Symbol: PARP14
  Gene Name: poly (ADP-ribose) polymerase family, member 14
  ENST ID: ENST00000460683
  CDS Start-End: 1-4566
gtgactgacataatgctaatcttgttagtggagaacataagtggcctgtctaatgatgactttcaagtggaaataataagagattttgatgttgctgttgttacctttcaaaagcacatagatactataagatttgttgatgattgtaccaagcaccattcaattaaacaacttcagctttctccaagacttctggaagtgacaaacacaatcagggttgaaaacctgccacctggtgctgatgactacagtttaaaacttttctttgaaaatccctataatggagggggaagagttgccaatgttgaatattttcctgaagagagttcagctctgattgaattttttgacagaaaagtgttagacaccatcatggccacaaaactcgacttcaataaaatgccactttctgtgttcccatactatgcctcattgggcacagccttgtatggaaaggagaagcctctgatcaagcttccagcaccatttgaagagtcactagatcttcccttatggaagttcttacagaaaaagaatcacctcattgaggagataaacgatgaaatgaggcgttgtcactgtgagctcacgtggtcccaactcagtggtaaagttaccatcagaccagcagccaccttagtcaatgaaggaagaccgagaatcaagacctggcaggcagatacttccacaacactctctagcatcaggtctaaatataaagtcaacccaattaaagtggatccaacaatgtgggacaccataaaaaatgatgtgaaagatgacaggattttgattgagtttgatacacttaaggagatggtaatcttagcagggaaatcagaggatgtccaaagcattgaggtacaagtcagggagttaatagaaagcactactcaaaaaattaaaagggaagagcaaagtttgaaggaaaaaatgatcatttctccaggcaggtattttcttttgtgtcacagcagtctactggaccatttactcacggagtgcccagagatagagatttgttacgatagagtcactcaacacttgtgcttgaaaggacctagtgcagatgtgtataaagcaaagtgtgaaatccaggaaaaggtgtacaccatggctcagaaaaacattcaggtttctcctgagatttttcagtttttgcaacaggtaaactggaaagaattctctaagtgtcttttcatagcacagaagattcttgcactttatgagctagagggtacaactgttctcttaaccagctgttcttctgaagccctgttagaagcagaaaagcaaatgctcagtgccttaaattataagcgcattgaagttgagaacaaagaagttcttcatggcaagaaatggaaagggctcactcacaatttgcttaagaaacaaaattcctccccaaacactgtaatcatcaatgagttaacttcagaaaccacagctgaagtcatcattacaggctgtgtaaaagaagtaaatgaaacctataaattgctttttaacttcgttgaacaaaacatgaaaatagagagactggttgaagtaaagccttccttagttattgactatttaaagacagaaaagaagctattctggccaaagataaagaaggtaaatgtgcaggtaagtttcaatcctgagaacaaacaaaaaggcattttactaactggctcaaagaccgaagtactgaaggcagtggacattgtcaagcaagtctgggattcagtctgtgttaaaagtgtccatactgataagccaggagccaagcagttcttccaggataaagcacggttttatcaaagtgagatcaaacggttgtttggttgttacattgaactacaggagaatgaagtaatgaaggagggaggcagccccgctgggcagaagtgcttctctcggacagtcttggcccctggcgttgtgctgattgtgcagcagggtgacttggcacggcttcctgtcgatgtggtggtgaatgcatctaatgaggaccttaagcattatggtggcctggccgctgcgctctcaaaagcagctggccctgagctccaggccgactgtgaccagatagtgaagagagagggcagactcctaccgggcaatgccaccatctccaaggcaggaaagctgccctaccaccacgtgatccatgcagtggggccccgctggagcggatatgaggccccgaggtgtgtgtacctattaaggagagctgtgcaactcagtctctgtctagccgaaaaatacaagtaccgatccatagccatcccagctattagttctggagtctttggctttcccttaggccgatgcgtggagaccattgtttctgccatcaaggaaaacttccaattcaagaaggatggacactgcttgaaagaaatctaccttgtggatgtatctgagaagactgttgaggcctttgcagaagctgtgaaaactgtatttaaagccaccctgccagatacagctgccccgccaggtttaccaccagcagcagcggggcctgggaaaacatcatgggaaaaaggaagcctggtgtccccgggaggcctgcagatgctgttggtgaaagagggtgtgcagaatgctaagaccgatgttgttgtcaactccgttcccttggatctcgtgcttagtagagggcctctttctaagtccctcttggaaaaagctggaccagagctccaggaggaattggacacagttggacaaggggtggctgtcagcatgggcacagtgctcaaaaccagcagctggaatctggactgtcgctatgtgcttcacgtggtagctccggagtggagaaatggtagcacatcttcactcaagataatggaagacataatcagagaatgtatggagatcactgagagcttgtccttaaaatcaattgcatttccagcaataggaacaggaaacttgggatttcctaaaaacatattcgctgaattaatcatttcagaggtgttcaaatttagtagcaagaatcagctgaaaactttacaagaggttcactttctgctgcacccgagtgatcatgaaaatattcaggcattttcagatgaatttgccagaagggctaatggaaatctcgtcagtgacaaaattccgaaggctaaagatacacaaggtttttatgggactgtttctagccctgattcaggtgtgtatgaaatgaagattggctccatcatcttccaggtggcttctggagatatcacgaaagaagaggcagatgtgattgtaaattcaacatcaaactcattcaatctcaaagcaggggtctccaaagcaattttagaatgtgctggacaaaatgtagaaagggaatgttctcagcaagctcagcagcgcaaaaatgattatataatcaccggaggtggatttttgaggtgcaagaatatcattcatgtaattggtggaaatgatgtcaagagttcagtttcctctgttttgcaggagtgtgaaaaaaaaaattactcatccatttgcctcccagccattgggacaggaaatgccaaacaacacccagataaggttgctgaagccataattgatgccattgaagactttgtccagaaaggatcagcccagtctgtgaaaaaagttaaagttgttatctttctgcctcaagtactggatgtgttttatgccaacatgaagaaaagagaagggactcagctttcttcccaacagtctgtgatgtctaaacttgcatcatttttgggcttttcaaagcaatctccccaaaaaaagaatcatttggttttggaaaagaaaacagaatcagcaacttttcgggtgtgtggtgaaaatgtcacgtgtgtggaatatgctatctcctggctacaagacctgattgaaaaagaacagtgtccttacaccagtgaagatgagtgcatcaaagactttgatgaaaaggagtatcaggagttgaatgagctgcagaagaagttaaatattaacatttccctggaccataagagacctttgattaaggttttgggaattagcagagatgtgatgcaggctagagatgaaattgaggcgatgatcaagagagttcgattggccaaagaacaggaatcccgggcagattgtatcagtgagtttatagaatggcagtataatgacaataacacttctcattgttttaacaaaatgaccaatctgaaattagaggatgcaaggagagaaaagaaaaaaacagttgatgtcaaaattaatcatcggcactacacagtgaacttgaacacatacactgccacagacacaaagggccacagtttatctgttcagcgcctcacgaaatccaaagttgacatccctgcacactggagtgatatgaagcagcagaatttctgtgtggtggagctgctgcctagtgatcctgagtacaacacggtggcaagcaagtttaatcagacctgctcacacttcagaatagagaaggtaagccttctgctagaatgcagtttctggatggtggaaataagttctgtcatggtcctatataaaatccattttcattcacttcctatcacatttttttaaacccagaattagaatttgtatggtaattagtagttctagattctactcatgtgaccataattactgaggcattaagattcttgtgtcagtgattacaatatttgattgtaatatgatagaacactaaagacatatatttactttgtgaagcaagctaatacaaattcaaagatatggctttaaaattggatttgatagctagcaaattccacagagagccatgcagaggctccttagatcaggaccatgttactctgccccattattcacagatcaacagtgcttccttgataaagccagcaggccttttctcgtttatcataattattttgggcaggtgaatgtgatgattcgtgcctgtagtcccagctattgggaggctgaggtggaaggattgcatgagcccaggagtttgacgccagtctgggtaacatagtgagatcctgctctcaaataaaaacaaccaattattttggcatcttcttccatttttaaacatttttgatattgctgtttgaaattatattttccttgacttctctagcaaaattattatgatttttttttccttgactaattttcttttcatttttgcaggcacgctgtttctcttccaaacccctaattctagctttattcacgccatttatgcttaaacggtcttttgtctctgtacctcaccagggaatatatttacccttcttggattcaactattagttcaatgtcaatagctcccaaatcaacattaccaacctgggtctttgactcaagctctagaacatactcccagtggcctaaaaaaatctccacttgaggctgggcacagtggctcacgcctgtaatcccagcactttgggaggccgaggtgggtggatcacgaggtcaggggttcaagaccatcctggtgaagatggtgaaaccacgtctctactaaaactacaaaaattagccgggcatgttggcaggtgcctataatcccacctacttgggaggctgaggcaggataattgcttgaacatgggtggcagagattgcagtgagccaagatcacgccactgcactccagcctggtcgacagagtgagactccgtctcaaaaaaaaaatctccacttgaatatctaactgcaaaatcaacttctctaaaatctaatgcatcatacattgagaggatccagaatccagatctctggaatagctaccaggcaaagaaaaaaactatggatgccaagaatggccagacaatgaatgagaagcaactcttccatgggacagatgccggctccgtgccacacgtcaatcgaaatggctttaaccgcagctatgccggaaagaatgctgtggcatatggaaagggaacctattttgctgtcaatgccaattattctgccaatgatacgtactccagaccagatgcaaatgggagaaagcatgtgtattatgtgcgagtacttactggaatctatacacatggaaatcattcattaattgtgcctccttcaaagaaccctcaaaatcctactgacctgtatgacactgtcacagataatgtgcaccatccaagtttatttgtggcattttatgactaccaagcatacccagagtaccttattacgtttagaaaataacactttggtatccttcccacaaaattattctccatttgtacatatctagttgtaaaacaagttttagcttttttttttaattcctcttaacagatttttctaatatccaaggatcattctttgtcgctgaagtcagtctttcttcagcttccctttcataatggaaatgaacttattatcttgagagcaaataacttggaaaatttaaatgagataatgcagttgcaactgtgtgtccacaagtatggacatcaaatctgtgggaaaagaacaggtttgtattttcaggaaggagagaataacagtcttatagacagagggcacagctaagcacagctgccactgcaggagacaggccccatgtcaggatgccatagtgctgtggggagcacagtattacccagtgggtagggcttctgtcttccctgggagcagggatggtatcttagtcaatttttttcccttgagatgaggtctgtgcctgatgtacaacggatactccataaatgtttgacaaaccaacgaagaatgaaaaaaagcctagtcagactcccatccaaagtaggaactatctctttaacattcttgactcactatcactttacctcaaattgaacagattccatgacggaacttcattcttcacaaactagccagtgacatgtgggacagctctggccagggctctgggactgcagtgtacttgcgctctgcacggtccaggagctgtgatgtggctgtggtctaggggaatcctgcctgccccatggagttgcgcagcacaaccctggctccaattgccagaaggctctttttaatgctgaaccaaaatgtgcctttttttttttttttttgagatggagtttcactcttgttgcccaggctggagtgcaatggcgcgatctcagctcactgcagccactgcctcccaggttcaagtgattctcctgcctcagcctcccgagtagctgggattacaggcatgcgctaacacacccagctaattttgtatttttagtagagacgaggtttctccatgttcgacaggctggtctcgaactcccacctcagcctcccaaactgctgggattacaggtgtgagccaccgtgaccagccaatgtgccttcttatagtgtctactcattggtctttgttctgcccagtgataacaatgggataacgcctgctacacatcttcattgtgaaacccttcccctgtgctgagattaaatgaactctaagattattaaatagtatattttccttgacagcctagcgtttgatgattttaaagccttatgtataaataaaccaaaggaagtaagcagtcatattgctaatttgctaactcctatctattgaatggtgaagttttaaaaatttccccaggtaagtttaagattcaaacaccatctattgagcacctacattgtgtgccaggtagtaaaataggtgctttcatacacattgtctcaattcctgtgaggtcagaattatctctgcatttgaaacttgaggaaacatgctcagagtgcaagaagcttccttgcctgagatcacctagaaaggaaccctcagagccggcaactgaatcttggtccctgtgatgtcaagcccattgctctcccactgcagaacatggcctctagattaatgccaccgattcaggaacacctccgacagtcttgaaatacccccatgttgccttgtttgttttttccttctggcttcttctattacagtctcttcattggaagctctgtaggccaaggccagagctgatactgacacggagccaatgcagatagcacatcagatgctaggggtcgctgggaggattaagggacttaatctgctaggaacacctgtacttgaagtggaggaggctagggggccacagttgctgcttcattaacatagaggttttggatttttttctcttgtggtttgttttttaagtggattggcagactccttgttgcttaagagtggctttctaggcaggccactggcatctgaattcatcattgacaataaatgtaagaaattggaataaaaaagagagacctgctgttattcgcttttgttctccagtgatttgattaactcagggcaaggctgaatatcagagtgtatcgcactgaagaataataatccattcagtaatgttatagttatcctcaatctaaatatgtcaactgtcattttgctacttttcaaataaaatacttgaaaactgtca

SEQ ID NO: 166981 - DNA, 1518 bp, Homo sapiens
  Payload ID: 12872
  Gene Symbol: PARP15
  Gene Name: poly (ADP-ribose) polymerase family, member 15
  Uniprot ID: Q460N3
  ENST ID: ENST00000310366
  CDS Start-End: 96-1430
ttcctaggttgaaccgcaatcctttaagaagtctctgagggaagaggaaatattttgagaactattgttatcaactctttgatatctgatgatcaatgctccaaagaattggattaatatttttacacaatattgttgtagtcagtaactgtttctatttccaggcatttttagatgaattcactaactggtcaagaataaatcccaacaaggccaggattcccatggcaggagatacccaaggtgtggtcgggactgtctctaagccttgtttcacagcatatgaaatgaaaatcggtgcaattacttttcaggttgctactggagatatagccactgaacaggtagatgttattgtaaactcaacagcaaggacatttaatcggaaatcaggtgtgtcaagagctattttagaaggtgctggacaagctgtggaaagtgaatgtgctgtactagctgcacagcctcacagagattttataattacaccaggtggatgcttaaagtgcaaaataataattcatgttcctgggggaaaagatgtcaggaaaacggtcaccagtgttctagaagagtgtgaacagaggaagtacacatcggtttcccttccagccattggaacaggaaatgccggaaaaaaccctatcacagttgctgataacataatcgatgctattgtagacttctcatcacaacattccaccccatcattaaaaacagttaaagttgtcatttttcaacctgagctgctaaatatattctacgacagcatgaaaaaaagagacctctctgcatcactgaactttcagtccacattctccatgactacatgtaatcttcctgaacactggactgacatgaatcatcagctgttttgcatggtccagctagagccaggacaatcagaatataataccataaaggacaagttcacccgaacttgttcttcctacgcaatagagaagattgagaggatacagaatgcatttctctggcagagctaccaggtaaagaaaaggcaaatggatatcaagaatgaccataagaataatgagagactcctcttccatgggacagatgcagactcagtgccatatgtcaatcagcacggctttaatagaagttgtgctgggaaaaatgctgtatcctatggaaaaggaacctattttgctgtggatgccagttattctgccaaggacacctactccaagccagacagcaatgggagaaagcacatgtacgttgtgcgagtacttactggagtcttcacaaagggacgtgcaggattagtcacccctccacccaagaatcctcacaatcccacagatctctttgactcagtgacaaacaatacacgatctccaaagctatttgtggtattctttgataatcaggcttacccagaatatctcataactttcacggcttaaaaatatttttatcatcaaagagatgatttaagtcatctgtaagaacaacatgcaatctttgtctttgcttctggcctgtgtaagcaga

SEQ ID NO: 166982 - DNA, 2156 bp, Homo sapiens
  Payload ID: 12872
  Gene Symbol: PARP15
  Gene Name: poly (ADP-ribose) polymerase family, member 15
  Uniprot ID: Q460N3
  ENST ID: ENST00000464300
  CDS Start-End: 67-2103
agagaaaagaagttcgaggcacaagcctgttgggtggggcgcaactgcagtcccagcgagctgaggatggctgcgccaggcccccttcctgccgctgctctgagtccaggggctccgacccccagagaacttatgcacggagttgcaggtgttacttccagagccggacgagatcgggaggcggggagcgtgctgccggccgggaaccgtggggcgcggaaggcctcccggcgctcttcctcccggagtatgtccagagacaacaagttcagcaagaaagattgtctttcaatcaggaatgttgtagcttcaatccaaaccaaagaaggtctgaatctcaagttgataagtggagatgttctgtacatctgggccgatgtcattgtcaacagcgttcccatgaatcttcagcttggaggaggaccactatctcgggcatttttgcagaaagctggtcccatgctccagaaagagttagatgacagaaggcgggaaacagaggaaaaagtaggtaacatattcatgacaagcggctgcaatctggactgcaaagctgtgctccatgctgtggctccatactggaataatggagcagagacttcttggcagatcatggcaaatataatcaagaaatgtttgacaactgtagaagtgctatctttctcatcaatcacatttcccatgattggaacaggaagtttgcagtttcccaaagctgtttttgctaaactaatcctttcagaagtgttcgaatacagtagcagcacaaggccgataactagccctttacaagaagtccactttctggtatatacaaatgacgatgaaggctgtcaggcatttttagatgaattcactaactggtcaagaataaatcccaacaaggccaggattcccatggcaggagatacccaaggtgtggtcgggactgtctctaagccttgtttcacagcatatgaaatgaaaatcggtgcaattacttttcaggttgctactggagatatagccactgaacaggtagatgttattgtaaactcaacagcaaggacatttaatcggaaatcaggtgtgtcaagagctattttagaaggtgctggacaagctgtggaaagtgaatgtgctgtactagctgcacagcctcacagagattttataattacaccaggtggatgcttaaagtgcaaaataataattcatgttcctgggggaaaagatgtcaggaaaacggtcaccagtgttctagaagagtgtgaacagaggaagtacacatcggtttcccttccagccattggaacaggaaatgccggaaaaaaccctatcacagttgctgataacataatcgatgctattgtagacttctcatcacaacattccaccccatcattaaaaacagttaaagttgtcatttttcaacctgagctgctaaatatattctacgacagcatgaaaaaaagagacctctctgcatcactgaactttcagtccacattctccatgactacatgtaatcttcctgaacactggactgacatgaatcatcagctgttttgcatggtccagctagagccaggacaatcagaatataataccataaaggacaagttcacccgaacttgttcttcctacgcaatagagaagattgagaggatacagaatgcatttctctggcagagctaccaggtaaagaaaaggcaaatggatatcaagaatgaccataagaataatgagagactcctcttccatgggacagatgcagactcagtgccatatgtcaatcagcacggctttaatagaagttgtgctgggaaaaatgctgtatcctatggaaaaggaacctattttgctgtggatgccagttattctgccaaggacacctactccaagccagacagcaatgggagaaagcacatgtacgttgtgcgagtacttactggagtcttcacaaagggacgtgcaggattagtcacccctccacccaagaatcctcacaatcccacagatctctttgactcagtgacaaacaatacacgatctccaaagctatttgtggtattctttgataatcaggcttacccagaatatctcataactttcacggcttaaaaatatttttatcatcaaagagatgatttaagtcatctgtaagaacaacatgc

SEQ ID NO: 166983 - DNA, 4439 bp, Homo sapiens
  Payload ID: 12872
  Gene Symbol: PARP15
  Gene Name: poly (ADP-ribose) polymerase family, member 15
  ENST ID: ENST00000483793
  CDS Start-End: 41-1492
ctgttgggtggggcgcaactgcagtcccagcgagctgaggatggctgcgccaggcccccttcctgccgctgctctgagtccaggggctccgacccccagagaacttatgcacggagttgcaggtgttacttccagagccggacgagatcgggaggcggggagcgtgctgccggccgggaaccgtggggcgcggaaggcctcccggcgctcttcctcccggagtatgtccagagacaacaagttcagcaagaaagattgtctttcaatcaggaatgttgtagcttcaatccaaaccaaagaaggtctgaatctcaagttgataagtggagatgttctgtacatctgggccgatgtcattgtcaacagcgttcccatgaatcttcagcttggaggaggaccactatctcgggcatttttgcagaaagctggtcccatgctccagaaagagttagatgacagaaggcgggaaacagaggaaaaagtaggtaacatattcatgacaagcggctgcaatctggactgcaaagctgtgctccatgctgtggctccatactggaataatggagcagagacttcttggcaggttgctactggagatatagccactgaacaggtagatgttattgtaaactcaacagcaaggacatttaatcggaaatcaggtgtgtcaagagctattttagaaggtgctggacaagctgtggaaagtgaatgtgctgtactagctgcacagcctcacagagattttataattacaccaggtggatgcttaaagtgcaaaataataattcatgttcctgggggaaaagatgtcaggaaaacggtcaccagtgttctagaagagtgtgaacagaggaagtacacatcggtttcccttccagccattggaacaggtaatcttcctgaacactggactgacatgaatcatcagctgttttgcatggtccagctagagccaggacaatcagaatataataccataaaggacaagttcacccgaacttgttcttcctacgcaatagagaagattgagaggatacagaatgcatttctctggcagagctaccaggtaaagaaaaggcaaatggatatcaagaatgaccataagaataatgagagactcctcttccatgggacagatgcagactcagtgccatatgtcaatcagcacggctttaatagaagttgtgctgggaaaaatgctgtatcctatggaaaaggaacctattttgctgtggatgccagttattctgccaaggacacctactccaagccagacagcaatgggagaaagcacatgtacgttgtgcgagtacttactggagtcttcacaaagggacgtgcaggattagtcacccctccacccaagaatcctcacaatcccacagatctctttgactcagtgacaaacaatacacgatctccaaagctatttgtggtattctttgataatcaggcttacccagaatatctcataactttcacggcttaaaaatatttttatcatcaaagagatgatttaagtcatctgtaagaacaacatgcaatctttgtctttgcttctggcctgtgtaagcagatgaaagtttcccttttaggtgccaaaatgctgaaaattacctttttaaagtgctctattgctgcgatttgtagcatacctttttttctcagcaaattgatgggtggaagctgagaaatgtatggtaaatgtcacagagctacaaccattcacagacaccaaatctctaggagaataaaaagcacattattctttttctatcagaaaaaaacaagatgcatcaccttaaaaccaagatgacattgttcttcttggaacatgttaagacatcgaatggtggcgggttaaactgtactgcttaagtggagcggctaccgttatgcatctatcacagttggggattttgccttattaaggaaaacttgtcaatagttcagctgaaatgactgaatcacagaatattaactctgttatggaacaaatcataacagattttacctgtttacatttcaggtaaaaatgtatcgcattgttatctaatattaaaaaattacccccaattttagtgacttaatcccacacagtctttatgggtcaggaattcaggcatggcttacctggatcattctgctagggtctctctgaagttacagacaagatgtcaggggatgtggtcgtttgaaggcttgtctgggctggaggtctatttccaaggtgaatcactcacatacctggcacgtttctgtcaggtattggcagtcctcagttcctctcctctcaggcctctccacaggctgcttgagtgtcctcatgacacaacagttggcttactccagagtgagcaactcaagagagagcaaggcagaagctaccaaatctttatgtttgaagtcatgcaccatcttttccacgagtatcctgttgattattttgatcagcttgttcagtctgggagggaattgcacaagggcatgaatactccactggcaaggatcattgggggccatcttggaagctgtgtgaatgagcaaatgaatgcacagatagaatattagcagtgacaatgatgctagaggtcacctaccccactgtcctcttgtccttctcccccaaccctcccctgctcccaggcaagaagccctctagcctctgcttgatcactttcagcactcaacatcttcagggaacctattccgccgtgggacagtgttaattagtggaaaactctttttcaaaagttgaaatcagttcctctgtgtctattacctgctgatcactgtccagacttctggaggacacagagcaagttttattcctcttactgatggtagcctttcagatccatcccttccctccagtatattagagttacgtaaattcttaaaatgcttagcagctcatttatcctgaagcatcacttttgaagagttacagacatttaagaagtatttacattatcataaataaattacatgcgcatttaaagagaacagaaaagtataaagaaaaataactcaccaaactcactcataattccagcactaagggaaaaccactgccaatttctcatgtctcccttccagtttcttctctgtccaaattcaacaaagtcaaaatcacattttgttctgtcacaaatcatataatattatttctaccatttttctttttttaatctttttttattatactttaagttttagggtacatgtgcacaatgtgcagtttagttacatatgtaaacatgtgccatgttggtgtgctgcacccagtaactcatcatttagcattaggtatatctccaaatgctatccctctcccctctccccaccccacaacaggccccggtgtgtgatgttccccttcctgtgtccatgtgttctcattgttcaattcccacctgtgagtgagaacatgtggtgtttggttttttgtccttgcgatagtttgctgagaatgatggtttccagcttcatccatgtccctacaaaggacatgaactcatcattttttatggctgcatagtattccatggtgtatatgtgccacattttcttaatccagtctatcattgttggacatttgggttggttccaagtctttgctattgtgaatagtgccgcaataaacatacgtgtgcatgtgtctttacagcagcatgatttataatcctttgggtatatacccagtaatgggattgctgggtcaaatggtatttctagttctagatccccgaggaatcgccacactgacttccacaatggttgaactagtttacagtcccaccaacagtgtaaaagtgttcctatttctccacatcctctccagcacctgttgcttcctaactttttaatgattgccattctaacgggtgtgggatggtatctcattgttgttttgatttgcatttctctgatggccagtgatgatgagcattttttcatgtgttttttggctgcataaatgtcttcttttgagaagtgtccgttcatatcctttgcccactttttgatggggttctttgtttttttcttgtatatttgtttgagttcattgtagattctggatattagccctttgtcagatgagtagattgcaaaaattttctcccattctgtaggttgcctgttcactctgatggtagtttcttttgttgtacagaagctctttagtttaattagatcccatatttctaccatttttcattaaacattacaagttgttctcttgtgttcttattttttctgtaaacataattttaatggcagagatattctgctttatatctttccctattttatgtatatagaattataaagtttttaaaaatgtaatcatcattatttatagtttaataatcagtttcatcttgcagtgtatcattttcctcgtcattaaatattttacgtatcatttttaa

SEQ ID NO: 166984 - DNA, 1311 bp, Homo sapiens
  Payload ID: 12872
  Gene Symbol: PARP15
  Gene Name: poly (ADP-ribose) polymerase family, member 15
  ENST ID: ENST00000493645
  CDS Start-End: 96-1223
ttcctaggttgaaccgcaatcctttaagaagtctctgagggaagaggaaatattttgagaactattgttatcaactctttgatatctgatgatcaatgctccaaagaattggattaatatttttacacaatattgttgtagtcagtaactgtttctatttccaggcatttttagatgaattcactaactggtcaagaataaatcccaacaaggccaggattcccatggcaggagatacccaaggtgtggtcgggactgtctctaagccttgtttcacagcatatgaaatgaaaatcggtgcaattacttttcaggttgctactggagatatagccactgaacaggtagatgttattgtaaactcaacagcaaggacatttaatcggaaatcaggtgtgtcaagagctattttagaaggtgctggacaagctgtggaaagtgaatgtgctgtactagctgcacagcctcacagagattttataattacaccaggtggatgcttaaagtgcaaaataataattcatgttcctgggggaaaagatgtcaggaaaacggtcaccagtgttctagaagagtgtgaacagaggaagtacacatcggtttcccttccagccattggaacaggtaatcttcctgaacactggactgacatgaatcatcagctgttttgcatggtccagctagagccaggacaatcagaatataataccataaaggacaagttcacccgaacttgttcttcctacgcaatagagaagattgagaggatacagaatgcatttctctggcagagctaccaggtaaagaaaaggcaaatggatatcaagaatgaccataagaataatgagagactcctcttccatgggacagatgcagactcagtgccatatgtcaatcagcacggctttaatagaagttgtgctgggaaaaatgctgtatcctatggaaaaggaacctattttgctgtggatgccagttattctgccaaggacacctactccaagccagacagcaatgggagaaagcacatgtacgttgtgcgagtacttactggagtcttcacaaagggacgtgcaggattagtcacccctccacccaagaatcctcacaatcccacagatctctttgactcagtgacaaacaatacacgatctccaaagctatttgtggtattctttgataatcaggcttacccagaatatctcataactttcacggcttaaaaatatttttatcatcaaagagatgatttaagtcatctgtaagaacaacatgcaatctttgtctttgcttctggcctgtgtaagcaga

SEQ ID NO: 166985 - DNA, 2731 bp, Homo sapiens
  Payload ID: 12873
  Gene Symbol: PARP16
  Gene Name: poly (ADP-ribose) polymerase family, member 16
  Uniprot ID: Q8N5Y8
  ENST ID: ENST00000261888
  CDS Start-End: 447-1418
gcggcgcagcagcctcgcccgtcgcggagagtgggctctgcccgccgtcccccgggggctgcttcccgccccaggcctccgcggaggacacgtgtcagcacgttcccgcggttgtcattccattgtcatagcccttcccctaggccgggaacccctcccccccaccagccccagttcctttatccctgggcccaacctccccgccgacccgcggtccaggcctcggtctctctcttcggcggcgagccgcggcccagaccccggcagaggacacttgtcggcacgttctcacccctgtcatctcagccccctgcctagctccaccccaggcttgggaacccggcccctgacggcccattgtccgcgggcccagcccccgcgctgaacgcacgctcgcccttgcccctaaccagcgcgtctaccccggcaacgcgcagtgacctgggatgcagccctcaggctgggcggccgccagggaggcggcgggccgcgacatgctggccgccgacctccggtgcagcctcttcgcctcggccctgcagagctacaagcgcgactcggtgctgcggcccttccccgcgtcctacgcccgcggcgactgtaaggactttgaagccctgcttgcagatgccagcaagttacctaacctgaaagaacttctccagtcctccggagacaaccacaaacgggcctgggacctggtgagctggattttatcctcaaaggtcctgacaatccacagtgcagggaaggcagagtttgaaaagatccaaaagctgactggggctcctcacacgcctgttcctgcaccggacttcctgtttgaaattgagtactttgacccagccaacgccaaattttatgagaccaaaggagaacgagacctaatctatgcatttcatggtagccgcctagaaaacttccattccattatccacaatggcctgcactgccatctgaacaagacatccttgttcggagaggggacctacctcaccagtgacttgagcctggccctcatatacagcccccatggccatgggtggcagcacagcctcctcggccccatccttagctgtgtggccgtgtgtgaggtcattgaccatccggacgtcaagtgccaaaccaagaagaaggattccaaggagatagatcgcagacgagcgagaatcaaacatagtgaagggggagacatccctcccaagtacttcgtggtcaccaataaccagctgctgcgagtgaagtacctcctggtgtattcacagaagccacccaagagcagggcttcgagccagctctcctggttttccagccattggtttaccgtcatgatatccctgtatctgctgctgctgctcatagtgagtgtcatcaactcctctgctttccaacacttttggaatcgtgcgaaaagataatctttctgggcctggtgtgggggctacctcaactatgtgccttatggtaacttgttctgtacctcctatgcctcatgtccagccaggttgagcctaggggccagttgggggaccacaggacaattttcatatggcctaaatgtatccattgcctttgatgatgttcccagccatactccagtcaacggggactactagtccctcactcttaggttttaggggagtccttccatctgctccttcttaaactgtcctagggagttggcttttcagccagggccaaaggaaaaagccctgctgcatttaaaaacaaagtgtccaagctgtcagtggtgtgtttacaatctctcctggcagaggttggccctttctctaatgccttctggaaggcggaaaatgtgggaactataaatcactaggcggttgccttgttttgacttgagacacccaagaggaacagtcatgtttctcataaaaatcagtgggatcatttttgaattccatcagcctttgtatgtgagtgcaaaacattttaacagttttctcaaatcaacaaacagccttctcctatagctgtacttgcccccctccccaaaaaaccatggatgagaaagaaaggagtcaggggcctgataaaaaatacagacttaatgagcaactcaagatgagaaaactgctctttttccaaaaattaccaactgctgattacagctgaaatggaaccaaatgtttgttttctgatttttttttaatagctgtttaacaaattagtctttgctgagtaaaaggggaaatttctaaacctagtgcactgtttggccagtgtccacagcctcttttctggctgtgttttagagaaagggatttgagctataggctcgcctcctgttctcattctcacaaagctgccttgactgtggcctgcaaccacgagtgccatgctttcaggtcttctgtggcctactggccttcaagacagaggcctgccccagtgtgccacagatccatgtggatggagcctccttcagaggggtcacaggtctttgagactcagcctgggctttaatgtgtaggaaaagccttctggccacccagagagccggagccctgcttgctgtattctctgctcccttcttcctgctgggttttagccataatagggcccggtacgatttgggagtgacatttctgtaaagaagaggaaaaatcatttttctataatttgtaaagttgtgaaagagccactaccacagtttttacattgattattggaacatttcagaataaataaagatattttcttaatgatttaa

SEQ ID NO: 166986 - DNA, 2352 bp, Homo sapiens
  Payload ID: 12873
  Gene Symbol: PARP16
  Gene Name: poly (ADP-ribose) polymerase family, member 16
  Uniprot ID: Q8N5Y8
  ENST ID: ENST00000444347
  CDS Start-End: 418-1041
agtgggctctgcccgccgtcccccgggggctgcttcccgccccaggcctccgcggaggacacgtgtcagcacgttcccgcggttgtcattccattgtcatagcccttcccctaggccgggaacccctcccccccaccagccccagttcctttatccctgggcccaacctccccgccgacccgcggtccaggcctcggtctctctcttcggcggcgagccgcggcccagaccccggcagaggacacttgtcggcacgttctcacccctgtcatctcagccccctgcctagctccaccccaggcttgggaacccggcccctgacggcccattgtccgcgggcccagcccccgcgctgaacgcacgctcgcccttgcccctaaccagcgcgtctaccccggcaacgcgcagtgacctgggatgcagccctcaggctgggcggccgccagggaggcggcgggccgcgacatgctggccgccgacctccggtgcagcctcttcgcctcggccctgcagagctacaagcgcgactcggtgctgcggcccttccccgcgtcctacgcccgcggcgactgtaaggactttgaagccctgacatccttgttcggagaggggacctacctcaccagtgacttgagcctggccctcatatacagcccccatggccatgggtggcagcacagcctcctcggccccatccttagctgtgtggccgtgtgtgaggtcattgaccatccggacgtcaagtgccaaaccaagaagaaggattccaaggagatagatcgcagacgagcgagaatcaaacatagtgaagggggagacatccctcccaagtacttcgtggtcaccaataaccagctgctgcgagtgaagtacctcctggtgtattcacagaagccacccaagagggcttcgagccagctctcctggttttccagccattggtttaccgtcatgatatccctgtatctgctgctgctgctcatagtgagtgtcatcaactcctctgctttccaacacttttggaatcgtgcgaaaagataatctttctgggcctggtgtgggggctacctcaactatgtgccttatggtaacttgttctgtacctcctatgcctcatgtccagccaggttgagcctaggggccagttgggggaccacaggacaattttcatatggcctaaatgtatccattgcctttgatgatgttcccagccatactccagtcaacggggactactagtccctcactcttaggttttaggggagtccttccatctgctccttcttaaactgtcctagggagttggcttttcagccagggccaaaggaaaaagccctgctgcatttaaaaacaaagtgtccaagctgtcagtggtgtgtttacaatctctcctggcagaggttggccctttctctaatgccttctggaaggcggaaaatgtgggaactataaatcactaggcggttgccttgttttgacttgagacacccaagaggaacagtcatgtttctcataaaaatcagtgggatcatttttgaattccatcagcctttgtatgtgagtgcaaaacattttaacagttttctcaaatcaacaaacagccttctcctatagctgtacttgcccccctccccaaaaaaccatggatgagaaagaaaggagtcaggggcctgataaaaaatacagacttaatgagcaactcaagatgagaaaactgctctttttccaaaaattaccaactgctgattacagctgaaatggaaccaaatgtttgttttctgatttttttttaatagctgtttaacaaattagtctttgctgagtaaaaggggaaatttctaaacctagtgcactgtttggccagtgtccacagcctcttttctggctgtgttttagagaaagggatttgagctataggctcgcctcctgttctcattctcacaaagctgccttgactgtggcctgcaaccacgagtgccatgctttcaggtcttctgtggcctactggccttcaagacagaggcctgccccagtgtgccacagatccatgtggatggagcctccttcagaggggtcacaggtctttgagactcagcctgggctttaatgtgtaggaaaagccttctggccacccagagagccggagccctgcttgctgtattctctgctcccttcttcctgctgggttttagccataatagggcccggtacgatttgggagtgacatttctgtaaagaagaggaaaaatcatttttctataatttgtaaagttgtgaaagagccactaccacagtttttacattgattattggaacatttcagaataaataaagatattttcttaatgattt

SEQ ID NO: 166987 - DNA, 678 bp, Homo sapiens
  Payload ID: 12873
  Gene Symbol: PARP16
  Gene Name: poly (ADP-ribose) polymerase family, member 16
  ENST ID: ENST00000559805
  CDS Start-End: 1-217
cagacgagcgagaatcaaacatagtgaagggggagacatccctcccaagtacttcgtggtcaccaataaccagctgctgcgagtgaagtacctcctggtgtattcacagaagccacccaagagggcttcgagccagctctcctggttttccagccattggtttaccgtcatgatatccctgtatctgctgctgctgctcatagcactgggaatctgaagaggtgtctgtggccagagtaaagccagagtgtggccatctaaagggtgggcccaggacaagggcctcatggaaaggaactgtggaaagtagagaggacccacctgccatgctgtgaggacacccaggccacatagagagagtgaggccacatgtaggttttacagccagaagccccactgaaaaccaaacctgcaaccagcatcaactgccaaacatgtactgaagaggctgagatgattccagcacttgtggatgactgcaaccacatgagagacccagagcaagagctacctagctgagcccagttactcccagaatcatgagagaactatgtaattgattgttattactatataagccactaagtttacatatgatatgttatgcagcagtagacagctggaacaggagccaataaacaccgaatgaataaatgtggataggtctggttgaatgaa

SEQ ID NO: 166988 - DNA, 2336 bp, Homo sapiens
  Payload ID: 12874
  Gene Symbol: PARP3
  Gene Name: poly (ADP-ribose) polymerase family, member 3
  Uniprot ID: Q9Y6F1
  ENST ID: ENST00000398755
  CDS Start-End: 332-1954
ggtcaccgcgcgaccggcagatgcgtgctgcaggccccggccacatgagcagcgctacggacgcgactgccccggccttggatatgccagatcgagtgtccacccgtccgtgggactggtcgcctgactcggcctgccccagcctctgcttcaccccactggtggccaaatagccgatgtctaatcccccacacaagctcatccccggcctctggcgattgttgggaattctctccctaattcacgcctgaggctcatggagagttgctagacctgggactgccctgggaggcgcacacaaccaggccgggtggcagccaggacctctcccatgtccctgcttttcttggccatggctccaaagccgaagccctgggtacagactgagggccctgagaagaagaagggccggcaggcaggaagggaggaggaccccttccgctccaccgctgaggccctcaaggccatacccgcagagaagcgcataatccgcgtggatccaacatgtccactcagcagcaaccccgggacccaggtgtatgaggactacaactgcaccctgaaccagaccaacatcgagaacaacaacaacaagttctacatcatccagctgctccaagacagcaaccgcttcttcacctgctggaaccgctggggccgtgtgggagaggtcggccagtcaaagatcaaccacttcacaaggctagaagatgcaaagaaggactttgagaagaaatttcgggaaaagaccaagaacaactgggcagagcgggaccactttgtgtctcacccgggcaagtacacacttatcgaagtacaggcagaggatgaggcccaggaagctgtggtgaaggtggacagaggcccagtgaggactgtgactaagcgggtgcagccctgctccctggacccagccacgcagaagctcatcactaacatcttcagcaaggagatgttcaagaacaccatggccctcatggacctggatgtgaagaagatgcccctgggaaagctgagcaagcaacagattgcacggggtttcgaggccttggaggcgctggaggaggccctgaaaggccccacggatggtggccaaagcctggaggagctgtcctcacacttttacaccgtcatcccgcacaacttcggccacagccagcccccgcccatcaattcccctgagcttctgcaggccaagaaggacatgctgctggtgctggcggacatcgagctggcccaggccctgcaggcagtctctgagcaggagaagacggtggaggaggtgccacaccccctggaccgagactaccagcttctcaagtgccagctgcagctgctagactctggagcacctgagtacaaggtgatacagacctacttagaacagactggcagcaaccacaggtgccctacacttcaacacatctggaaagtaaaccaagaaggggaggaagacagattccaggcccactccaaactgggtaatcggaagctgctgtggcatggcaccaacatggccgtggtggccgccatcctcactagtgggctccgcatcatgccacattctggtgggcgtgttggcaagggcatctactttgcctcagagaacagcaagtcagctggatatgttattggcatgaagtgtggggcccaccatgtcggctacatgttcctgggtgaggtggccctgggcagagagcaccatatcaacacggacaaccccagcttgaagagcccacctcctggcttcgacagtgtcattgcccgaggccacaccgagcctgatccgacccaggacactgagttggagctggatggccagcaagtggtggtgccccagggccagcctgtgccctgcccagagttcagcagctccacattctcccagagcgagtacctcatctaccaggagagccagtgtcgcctgcgctacctgctggaggtccacctctgagtgcccgccctgtcccccggggtcctgcaaggctggactgtgatcttcaatcatcctgcccatctctggtacccctatatcactcctttttttcaagaatacaatacgttgttgttaactatagtcaccatgctgtacaagatccctgaacttatgcctcctaactgaaattttgtattctttgacacatctgcccagtccctctcctcccagcccatggtaaccagcatttgactctttacttgtataagggcagcttttataggttccacatgtaagtgagatcatgcagtgtttgtctttctgtgcctggcttatttcactcagcataatgtgcaccgggttcacccatgttttcataaatgacaagatttcctccttt

SEQ ID NO: 166989 - DNA, 2472 bp, Homo sapiens
  Payload ID: 12874
  Gene Symbol: PARP3
  Gene Name: poly (ADP-ribose) polymerase family, member 3
  ENST ID: ENST00000417220
  CDS Start-End: 489-2090
gtatccgggcccaaggtcaccgcgcgaccggcagatgcgtgctgcaggccccggccacatgagcagcgctacggacgcgactgccccggccttggatatgccagatcgagtgtccacccgtccgtgggactggtcgcctgactcggcctgccccagcctctgcttcaccccactggtggccaaatagccgatgtctaatcccccacacaagctcatccccggcctctggcgattgttgggaattctctccctaattcacgcctgaggctcatggagagttgctagacctgggactgccctgggaggcgcacacaaccaggccgggtggcagccaggacctctcccatgtccctgcttttcttggctcggtgactcggcccggcaaccatgccagggctgaactagctgacacagggggaggagccccgaagtggaagagagagagcctcctttcactttccctacccctcaggacacacaggacagccatggctccaaagccgaagccctgggtacagactgagggccctgagaagaagaagggccggcaggcaggaagggaggaggaccccttccgctccaccgctgaggccctcaaggccatacccgcagagaagcgcataatccgcgtggatccaacatgtccactcagcagcaaccccgggacccaggtgtatgaggactacaactgcaccctgaaccagaccaacatcgagaacaacaacaacaagttctacatcatccagctgctccaagacagcaaccgcttcttcacctgctggaaccgctggggccgtgtgggagaggtcggccagtcaaagatcaaccacttcacaaggctagaagatgcaaagaaggactttgagaagaaatttcgggaaaagaccaagaacaactgggcagagcgggaccactttgtgtctcacccgggcaagtacacacttatcgaagtacaggcagaggatgaggcccaggaagctgtggtgaaggtggacagaggcccagtgaggactgtgactaagcgggtgcagccctgctccctggacccagccacgcagaagctcatcactaacatcttcagcaaggagatgttcaagaacaccatggccctcatggacctggatgtgaagaagatgcccctgggaaagctgagcaagcaacagattgcacggggtttcgaggccttggaggcgctggaggaggccctgaaaggccccacggatggtggccaaagcctggaggagctgtcctcacacttttacaccgtcatcccgcacaacttcggccacagccagcccccgcccatcaattcccctgagcttctgcaggccaagaaggacatgctgctggtgctggcggacatcgagctggcccaggccctgcaggcagtctctgagcaggagaagacggtggaggaggtgccacaccccctggaccgagactaccagcttctcaagtgccagctgcagctgctagactctggagcacctgagtacaaggtgatacagacctacttagaacagactggcagcaaccacaggtgccctacacttcaacacatctggaaagtaaaccaagaaggggaggaagacagattccaggcccactccaaactgggtaatcggaagctgctgtggcatggcaccaacatggccgtggtggccgccatcctcactagtgggctccgcatcatgccacattctggtgggcgtgttggcaagggcatctactttgcctcagagaacagcaagtcagctggatatgttattggcatgaagtgtggggcccaccatgtcggctacatgttcctgggtgaggtggccctgggcagagagcaccatatcaacacggacaaccccagcttgaagagcccacctcctggcttcgacagtgtcattgcccgaggccacaccgagcctgatccgacccaggacactgagttggagctggatggccagcaagtggtggtgccccagggccagcctgtgccctgcccagagttcagcagctccacattctcccagagcgagtacctcatctaccaggagagccagtgtcgcctgcgctacctgctggaggtccacctctgagtgcccgccctgtcccccggggtcctgcaaggctggactgtgatcttcaatcatcctgcccatctctggtacccctatatcactcctttttttcaagaatacaatacgttgttgttaactatagtcaccatgctgtacaagatccctgaacttatgcctcctaactgaaattttgtattctttgacacatctgcccagtccctctcctcccagcccatggtaaccagcatttgactctttacttgtataagggcagcttttataggttccacatgtaagtgagatcatgcagtgtttgtctttctgtgcctggcttatttcactcagcataatgtgcaccgggttcacccatgttttcataaatgacaagatttcctccttt

SEQ ID NO: 166990 - DNA, 2360 bp, Homo sapiens
  Payload ID: 12874
  Gene Symbol: PARP3
  Gene Name: poly (ADP-ribose) polymerase family, member 3
  ENST ID: ENST00000431474
  CDS Start-End: 372-1973
gtatccgggcccaaggtcaccgcgcgaccggcagatgcgtgctgcaggccccggccacatgagcagcgctacggacgcgactgccccggccttggatatgccagatcgagtgtccacccgtccgtgggactggtcgcctgactcggcctgccccagcctctgcttcaccccactggtggccaaatagccgatgtctaatcccccacacaagctcatccccggcctctggcgattgttgggaattctctccctaattcacgcctgaggctcatggagagttgctagacctgggactgccctgggaggcgcacacaaccaggccgggtggcagccaggacctctcccatgtccctgcttttcttgggacagccatggctccaaagccgaagccctgggtacagactgagggccctgagaagaagaagggccggcaggcaggaagggaggaggaccccttccgctccaccgctgaggccctcaaggccatacccgcagagaagcgcataatccgcgtggatccaacatgtccactcagcagcaaccccgggacccaggtgtatgaggactacaactgcaccctgaaccagaccaacatcgagaacaacaacaacaagttctacatcatccagctgctccaagacagcaaccgcttcttcacctgctggaaccgctggggccgtgtgggagaggtcggccagtcaaagatcaaccacttcacaaggctagaagatgcaaagaaggactttgagaagaaatttcgggaaaagaccaagaacaactgggcagagcgggaccactttgtgtctcacccgggcaagtacacacttatcgaagtacaggcagaggatgaggcccaggaagctgtggtgaaggtggacagaggcccagtgaggactgtgactaagcgggtgcagccctgctccctggacccagccacgcagaagctcatcactaacatcttcagcaaggagatgttcaagaacaccatggccctcatggacctggatgtgaagaagatgcccctgggaaagctgagcaagcaacagattgcacggggtttcgaggccttggaggcgctggaggaggccctgaaaggccccacggatggtggccaaagcctggaggagctgtcctcacacttttacaccgtcatcccgcacaacttcggccacagccagcccccgcccatcaattcccctgagcttctgcaggccaagaaggacatgctgctggtgctggcggacatcgagctggcccaggccctgcaggcagtctctgagcaggagaagacggtggaggaggtgccacaccccctggaccgagactaccagcttctcaagtgccagctgcagctgctagactctggagcacctgagtacaaggtgatacagacctacttagaacagactggcagcaaccacaggtgccctacacttcaacacatctggaaagtaaaccaagaaggggaggaagacagattccaggcccactccaaactgggtaatcggaagctgctgtggcatggcaccaacatggccgtggtggccgccatcctcactagtgggctccgcatcatgccacattctggtgggcgtgttggcaagggcatctactttgcctcagagaacagcaagtcagctggatatgttattggcatgaagtgtggggcccaccatgtcggctacatgttcctgggtgaggtggccctgggcagagagcaccatatcaacacggacaaccccagcttgaagagcccacctcctggcttcgacagtgtcattgcccgaggccacaccgagcctgatccgacccaggacactgagttggagctggatggccagcaagtggtggtgccccagggccagcctgtgccctgcccagagttcagcagctccacattctcccagagcgagtacctcatctaccaggagagccagtgtcgcctgcgctacctgctggaggtccacctctgagtgcccgccctgtcccccggggtcctgcaaggctggactgtgatcttcaatcatcctgcccatctctggtacccctatatcactcctttttttcaagaatacaatacgttgttgttaactatagtcaccatgctgtacaagatccctgaacttatgcctcctaactgaaattttgtattctttgacacatctgcccagtccctctcctcccagcccatggtaaccagcatttgactctttacttgtataagggcagcttttataggttccacatgtaagtgagatcatgcagtgtttgtctttctgtgcctggcttatttcactcagcataatgtgcaccgggttcacccatgttttcataaatgacaagatttcctccttttttaa

SEQ ID NO: 166991 - DNA, 2070 bp, Homo sapiens
  Payload ID: 12874
  Gene Symbol: PARP3
  Gene Name: poly (ADP-ribose) polymerase family, member 3
  ENST ID: ENST00000471971
  CDS Start-End: 320-481
accggcagatgcgtgctgcaggccccggccacatgagcagcgctacggacgcgactgccccggccttggatatgccagatcgagtgtccacccgtccgtgggactggtcgcctgactcggcctgccccagcctctgcttcaccccactggtggccaaatagccgatgtctaatcccccacacaagctcatccccggcctctggcgattgttgggaattctctccctaattcacgcctgaggctcatggagagttgctagacctgggactgccctgggaggcgcacacaaccaggccgggtggcagccaggacctctcccatgtccctgcttttcttgggacagccatggctccaaagccgaagccctgggtacagactgagggccctgagaagaagaagggccggcaggcaggaagggaggaggaccccttccgctccaccgctgaggccctcaaggccatacccgcagagaagcgcataatccgcgtggatccaacatgtccactcagcagcaaccccgggacccaggtgtatgaggactacaactgcaccctgaaccagaccaacatcgagaacaacaacaacaagttctacatcatccagctgctccaagacagcaaccgcttcttcacctgctggaaccgctggggccgtgtgggagaggtcggccagtcaaagatcaaccacttcacaaggctagaagatgcaaagaaggactttgagaagaaatttcgggaaaagaccaagaacaactgggcagagcgggaccactttgtgtctcacccgggcaagtacacacttatcgaagtacaggcagaggatgaggcccaggaagctgtggtgaaggtggacagaggcccagtgaggactgtgactaagcgggtgcagccctgctccctggacccagccacgcagaagctcatcactaacatcttcagcaaggagatgttcaagaacaccatggccctcatggacctggatgtgaagaagatgcccctgggaaagctgagcaagcaacagattgcacggggtttcgaggccttggaggcgctggaggaggccctgaaaggccccacggatggtggccaaagcctggaggagctgtcctcacacttttacaccgtcatcccgcacaacttcggccacagccagcccccgcccatcaattcccctgagcttctgcaggccaagaaggacatgctgctggtgctggcggacatcgagctggcccaggccctgcaggcagtctctgagcaggagaagacggtggaggaggtgccacaccccctggaccgagactaccagcttctcaagtgccagctgcagctgctagactctggagcacctgagtacaaggtgatacagacctacttagaacagactggcagcaaccacaggtgccctacacttcaacacatctggaaagtaaaccaagaaggggaggaagacagattccaggcccactccaaactgggtaatcggaagctgctgtggcatggcaccaacatggccgtggtggccgccatcctcactagtgggctccgcatcatgccacattctggtgggcgtgttggcaagggcatctactttgcctcagagaacagcaagtcagctggatatgttattggcatgaagtgtggggcccaccatgtcggctacatgttcctgggtgaggtggccctgggcagagagcaccatatcaacacggacaaccccagcttgaagagcccacctcctggcttcgacagtgtcattgcccgaggccacaccgagcctgatccgacccaggacactgagttggagctggatggccagcaagtggtggtgccccagggccagcctgtgccctgcccagagttcagcagctccacattctcccagagcgagtacctcatctaccaggagagccagtgtcgcctgcgctacctgctggaggtccacctctgagtgcccgccctgtcccccggggtcctgcaaggctggactgtgatcttcaatcatcctgcccatctctggtacccctatatcactcctttttttcaagaatacaatacgttgttgttaactata

SEQ ID NO: 166992 - DNA, 1040 bp, Homo sapiens
  Payload ID: 12874
  Gene Symbol: PARP3
  Gene Name: poly (ADP-ribose) polymerase family, member 3
  ENST ID: ENST00000498510
  CDS Start-End: 46-1040
ggagaccatggaggcctaagggcctctctgtgccccaggacagccatggctccaaagccgaagccctgggtacagactgagggccctgagaagaagaagggccggcaggcaggaagggaggaggaccccttccgctccaccgctgaggccctcaaggccatacccgcagagaagcgcataatccgcgtggatccaacatgtccactcagcagcaaccccgggacccaggtgtatgaggactacaactgcaccctgaaccagaccaacatcgagaacaacaacaacaagttctacatcatccagctgctccaagacagcaaccgcttcttcacctgctggaaccgctggggccgtgtgggagaggtcggccagtcaaagatcaaccacttcacaaggctagaagatgcaaagaaggactttgagaagaaatttcgggaaaagaccaagaacaactgggcagagcgggaccactttgtgtctcacccgggcaagtacacacttatcgaagtacaggcagaggatgaggcccaggaagctgtggtgaaggtggacagaggcccagtgaggactgtgactaagcgggtgcagccctgctccctggacccagccacgcagaagctcatcactaacatcttcagcaaggagatgttcaagaacaccatggccctcatggacctggatgtgaagaagatgcccctgggaaagctgagcaagcaacagattgcacggggtttcgaggccttggaggcgctggaggaggccctgaaaggccccacggatggtggccaaagcctggaggagctgtcctcacacttttacaccgtcatcccgcacaacttcggccacagccagcccccgcccatcaattcccctgagcttctgcaggccaagaaggacatgctgctggtgctggcggacatcgagctggcccaggccctgcaggcagtctctgagcaggagaagacggtggaggaggtgccacaccccctggaccgagactaccagcttctcaagtgccagctgcagctgctagactctgg

SEQ ID NO: 166993 - DNA, 5474 bp, Homo sapiens
  Payload ID: 12875
  Gene Symbol: PARP4
  Gene Name: poly (ADP-ribose) polymerase family, member 4
  Uniprot ID: Q9UKK3
  ENST ID: ENST00000381989
  CDS Start-End: 107-5281
cgcccgcccagccccgggggcagggagagcctagattacggaagtaccgcgagcaaggagcgcggaatcggggagcgtccggagctagctggatcctctaggcaggatggtgatgggaatctttgcaaattgtatcttctgtttgaaagtgaagtacttacctcagcagcagaagaaaaagctacaaactgacattaaggaaaatggcggaaagttttccttttcgttaaatcctcagtgcacacatataatcttagataatgctgatgttctgagtcagtaccaactgaattctatccaaaagaaccacgttcatattgcaaacccagattttatatggaaatctatcagggaaaagagactcttggatgtaaagaattatgatccttataagcccctggacatcacaccacctcctgatcagaaggcgagcagttctgaagtgaaaacagaaggtctatgcccggacagtgccacagaggaggaagacactgtggaactcactgagtttggtatgcagaatgttgaaattcctcatcttcctcaagattttgaagttgcaaaatataacaccttggagaaagtgggaatggagggaggccaggaagctgtggtggtggagcttcagtgttcgcgggactccagggactgtcctttcctgatatcctcacacttcctcctggatgatggcatggagactagaagacagtttgctataaagaaaacctctgaagatgcaagtgaatactttgaaaattacattgaagaactgaagaaacaaggatttctactaagagaacatttcacacctgaagcaacccaattagcatctgaacaattgcaagcattgcttttggaggaagtcatgaattcaagcactctgagccaagaggtgagcgatttagtagagatgatttgggcagaggccctgggccacctggaacacatgcttctcaagccagtgaacaggattagcctcaacgatgtgagcaaggcagaggggattctccttctagtaaaggcagcactgaaaaatggagaaacagcagagcaattgcaaaagatgatgacagagttttacagactgatacctcacaaaggcacaatgcccaaagaagtgaacctgggactattggctaagaaagcagacctctgccagctaataagagacatggttaatgtctgtgaaactaatttgtccaaacccaacccaccatccctggccaaataccgagctttgaggtgcaaaattgagcatgttgaacagaatactgaagaatttctcagggttagaaaagaggttttgcagaatcatcacagtaagagcccagtggatgtcttgcagatatttagagttggcagagtgaatgaaaccacagagtttttgagcaaacttggtaatgtgaggcccttgttgcatggttctcctgtacaaaacatcgtgggaatcttgtgtcgagggttgcttttacccaaagtagtggaagatcgtggtgtgcaaagaacagacgtcggaaaccttggaagtgggatttatttcagtgattcgctcagtacaagtatcaagtactcacacccgggagagacagatggcaccagactcctgctcatttgtgacgtagccctcggaaagtgtatggacttacatgagaaggacttttccttaactgaagcaccaccaggctacgacagtgtgcatggagtttcgcaaacagcctctgtcaccacagactttgaggatgatgaatttgttgtctataaaaccaatcaggttaaaatgaaatatattattaaattttccatgcctggagatcagataaaggactttcatcctagtgatcatactgaattagaggaatacagacctgagttttcaaatttttcaaaggttgaagattaccagttaccagatgccaaaacttccagcagcaccaaggccggcctccaggatgcctctgggaacttggttcctctggaggatgtccacatcaaagggagaatcatagacactgtagcccaggtcattgtttttcagacatacacaaataaaagtcacgtgcccattgaggcaaaatatatctttcctttggatgacaaggccgctgtgtgtggcttcgaagccttcatcaatgggaagcacatagttggagagattaaagagaaggaagaagcccagcaagagtacctagaagccgtgacccagggccatggcgcttacctgatgagtcaggatgctccggacgtttttactgtaagtgttggaaacttaccccctaaggctaaggttcttataaaaattacctacatcacagaactcagcatcctgggcactgttggtgtctttttcatgcccgccaccgtagcaccctggcaacaggacaaggctttgaatgaaaaccttcaggatacagtagagaagatttgtataaaagaaataggaacaaagcaaagcttctctttgactatgtctattgagatgccgtatgtgattgaattcattttcagtgatacacatgaactgaaacaaaagcgcacagactgcaaagctgtcattagcaccatggaaggcagctccttagacagcagtggattttctctccacatcggtttgtctgctgcctatctcccaagaatgtgggttgaaaaacatccagaaaaagaaagcgaggcttgcatgcttgtctttcaacccgatctcgatgtcgacctccctgacctagccagtgagagcgaagtgattatttgtcttgactgctccagttccatggagggtgtgacattcttgcaagccaagcaaatcgccttgcatgcgctgtccttggtgggtgagaagcagaaagtaaatattatccagttcggcacaggttacaaggagctattttcgtatcctaagcatatcacaagcaataccatggcagcagagttcatcatgtctgccacacctaccatggggaacacagacttctggaaaacactccgatatcttagcttattgtaccctgctcgagggtcacggaacatcctcctggtgtctgatgggcacctccaggatgagagcctgacattacagctcgtgaagaggagccgcccgcacaccaggttattcgcctgcggtatcggttctacagcaaatcgtcacgtcttaaggattttgtcccagtgtggtgccggagtatttgaatattttaatgcaaaatccaagcatagttggagaaaacagatagaagaccaaatgaccaggctatgttctccgagttgccactctgtctccgtcaaatggcagcaactcaatccagatgtgcccgaggccctgcaggccccagcccaggtgccgtccttgtttctcaatgatcgactccttgtctatggattcattcctcactgcacacaggcaactctgtgtgcactaattcaagagaaagaatttcgtacaatggtgtcgactactgagcttcagaagacaactggaactatgatccacaagctggcagcccgagctctaatcagagattatgaagatggcattcttcacgaaaatgaaaccagtcatgagatgaaaaaacaaaccttgaaatctctgattattaaactcagtaaagaaaactctctcataacacaatttacaagctttgtggcagttgagaaaagggatgagaatgagtcgccttttcctgatattccaaaagtttctgaacttattgccaaagaagatgtagacttcctgccctacatgagctggcagggggagccccaagaagccgtcaggaaccagtctcttttagcatcctctgagtggccagaattacgtttatccaaacgaaaacataggaaaattccattttccaaaagaaaaatggaattatctcagccagaagtttctgaagattttgaagaggatggcttaggtgtactaccagctttcacatcaaatttggaacgtggaggtgtggaaaagctattggatttaagttggacagagtcatgtaaaccaacagcaactgaaccactatttaagaaagtcagtccatgggaaacatctacttctagcttttttcctattttggctccggccgttggttcctatcttcccccgactgcccgcgctcacagtcctgcttccttgtcttttgcctcatatcgtcaggtagctagtttcggttcagctgctcctcccagacagtttgatgcatctcaattcagccaaggccctgtgcctggcacttgtgctgactggatcccacagtcggcgtcttgtcccacaggacctccccagaacccaccttcttcaccctattgtggcattgttttttcagggagctcattaagctctgcacagtctgctccactgcaacatcctggaggctttactaccaggccttctgctggcaccttccctgagctggattctccccagcttcatttctctcttcctacagaccctgatcccatcagaggttttgggtcttatcatccctctgcttcctctccttttcattttcaaccttccgcagcctctttgactgccaaccttaggctgccaatggcctctgctttacctgaggctctttgcagtcagtcccggactaccccagtagatctctgtcttctagaagaatcagtaggcagtctcgaaggaagtcgatgtcctgtctttgcttttcaaagttctgacacagaaagtgatgagctatcagaagtacttcaagacagctgctttttacaaataaaatgtgatacaaaagatgacagtatcctgtgctttctggaagtaaaagaagaggatgaaatagtgtgcatacaacactggcaggatgctgtgccttggacagaactcctcagtctacagacagaggatggcttctggaaacttacaccagaactgggacttatattaaatcttaatacaaatggtttgcacagctttcttaaacaaaaaggcattcaatctctaggtgtaaaaggaagagaatgtctcctggacctaattgccacaatgctggtactacagtttattcgcaccaggttggaaaaagagggaatagtgttcaaatcactgatgaaaatggatgacgcttctatttccaggaatattccctgggcttttgaggcaataaagcaagcaagtgaatgggtaagaagaactgaaggacagtacccatctatctgcccacggcttgaactggggaacgactgggactctgccaccaagcagttgctgggactccagcccataagcactgtgtcccctcttcatagagtcctccattacagtcaaggctaagtcaaatgaaactgaattttaaactttttgcatgcttctatgtagaaaataatcaaatgataatagatacttataatgaaacttcattaaggtttcattcagtgtagcaattactgtctttaaaaattaagtggaagaagaattactttaatcaactaacaagcaataataaaatgaaacttaaaatatttca

SEQ ID NO: 166994 - DNA, 2142 bp, Homo sapiens
  Payload ID: 12876
  Gene Symbol: PARP6
  Gene Name: poly (ADP-ribose) polymerase family, member 6
  Uniprot ID: Q2NL67
  ENST ID: ENST00000260376
  CDS Start-End: 47-1603
gtgctgcctagcactgacctgagagtgtgtgtgacccactgacccaatggacatcaaaggccagttctggaatgatgacgactcggagggagataatgaatcagaggaatttctctatggcgttcaggggagctgtgcagctgacctgtatcgacacccacagcttgatgcagacattgaagccgtgaaggagatctacagtgagaactctgtatccatcagagaatatggaactatcgatgacgtggacattgacctccacatcaacatcagcttcctcgatgaggaagtctctacagcctggaaggtcctccggacagaacctattgtgttgaggctgcgattttctctctcccagtacctagatggaccagaaccatccattgaggttttccagccatcaaataaggaaggatttgggctgggtcttcagttgaaaaagatcctgggtatgtttacatcccaacaatggaaacatctgagcaatgatttcttgaagacccagcaggagaagaggcacagttggttcaaggcaagtggtaccatcaagaagttccgagctggcctcagcatcttttcacccatccccaagtctcccagtttccctatcatacaggactccatgctgaaaggcaaactaggtgtaccagagcttcgggttgggcgcctcatgaaccgttccatctcctgtaccatgaagaaccccaaagtggaagtgtttggctaccctcccagcccccaggcaggtctcctgtgccctcagcacgtgggcctccctcccccagcacggacctctcctttggtcagtggtcactgcaagaacattcccactctggagtatggattcctcgttcagatcatgaagtatgcagaacagaggattccaacattgaatgagtactgtgtggtgtgtgatgagcagcatgtcttccaaaatggatctatgctgaagccagctgtctgtactcgtgaactatgcgttttctccttctacacactgggcgtcatgtctggagctgcagaggaggtggccactggagcagaggtggtggatctgctggtggccatgtgtagggcagctttagagtcccctagaaagagcatcatctttgagccttatccctctgtggtggaccccactgatcccaagactctggcctttaaccctaagaagaagaattatgagcggcttcagaaagctctggatagtgtgatgtctattcgggagatgacccagggctcatatttggaaatcaagaaacagatggacaagttggatcccctggcccatcctctcctgcagtggatcatctctagcaacaggtcacacattgtcaaactacctctcagcaggctgaagttcatgcacacctcacaccagttcctcctgctgagcagccctcctgccaaggaggctcggttccggaccgccaagaagctctatggcagcacctttgccttccatgggtcccacattgagaactggcattcgatcctgcgcaatgggctggtcaatgcatcctacaccaaactgcaggaatgggaaaaggacagcacaggatgccctccaaggatgagctggtccagagatacaacaggatgaataccatcccccagacccgatccattcagtcacggttcctgcagagtcggaatctaaactgtatagcactttgtgaagtgattacatctaaggacctccagaagcatgggaacatctgggtgtgccctgtgtccgaccatgtctgcacaagattcttctttgtatatgaggatggtcaggtgggcgatgccaacattaatactcaggaccccaagatacagaaggaaatcatgcgtgtgatcggaactcaggtttacacaaactgagggggccccagccctcgtaccacccctgttaccccaggatccatctgccctcataaaagtgttcaggtacagcagctgaggctgccctgaggaatcaaggggccattaccaaggggcaggaaaaggatatgtaagaggtggccttcatggtagagcttgacccaagaactactccacattcggatggcccagactgactccatcccctgactttccctttgacttcaccctgtttgtaaataaaacaataaaatggaaggtgctgtggactgg

SEQ ID NO: 166995 - DNA, 2625 bp, Homo sapiens
  Payload ID: 12876
  Gene Symbol: PARP6
  Gene Name: poly (ADP-ribose) polymerase family, member 6
  Uniprot ID: Q2NL67
  ENST ID: ENST00000287196
  CDS Start-End: 460-2352
caacagaaaccaagcagcaacagcccttggaaagaggctaaatttttcttgacttctgcagcaacaaagaccgtgaaaagttggcacttctggcctaacgctgccgtcatcctacccctcaccccagggcaacccaggctggacatttagtgcctccctctttattcctctgtgatcatccagatcagcacttgactgtttattttcaaatctcacgaacctcaccccaagatcttcacattctggatctcagctgctcttgaaggacagtgacttgttaccaccgcaacagcagagcctgccatccccaacagatcaccagttgtccctgacatcgtgccctaccttgtctccctttgtggtctcctaaatgcccatctcgttggccttggttcggctagtggtatggaggggtgctgcctagcactgacctgagagtgtgtgtgacccactgacccaatggacatcaaaggccagttctggaatgatgacgactcggagggagataatgaatcagaggaatttctctatggcgttcaggggagctgtgcagctgacctgtatcgacacccacagcttgatgcagacattgaagccgtgaaggagatctacagtgagaactctgtatccatcagagaatatggaactatcgatgacgtggacattgacctccacatcaacatcagcttcctcgatgaggaagtctctacagcctggaaggtcctccggacagaacctattgtgttgaggctgcgattttctctctcccagtacctagatggaccagaaccatccattgaggttttccagccatcaaataaggaaggatttgggctgggtcttcagttgaaaaagatcctgggtatgtttacatcccaacaatggaaacatctgagcaatgatttcttgaagacccagcaggagaagaggcacagttggttcaaggcaagtggtaccatcaagaagttccgagctggcctcagcatcttttcacccatccccaagtctcccagtttccctatcatacaggactccatgctgaaaggcaaactaggtgtaccagagcttcgggttgggcgcctcatgaaccgttccatctcctgtaccatgaagaaccccaaagtggaagtgtttggctaccctcccagcccccaggcaggtctcctgtgccctcagcacgtgggcctccctcccccagcacggacctctcctttggtcagtggtcactgcaagaacattcccactctggagtatggattcctcgttcagatcatgaagtatgcagaacagaggattccaacattgaatgagtactgtgtggtgtgtgatgagcagcatgtcttccaaaatggatctatgctgaagccagctgtctgtactcgtgaactatgcgttttctccttctacacactgggcgtcatgtctggagctgcagaggaggtggccactggagcagaggtggtggatctgctggtggccatgtgtagggcagctttagagtcccctagaaagagcatcatctttgagccttatccctctgtggtggaccccactgatcccaagactctggcctttaaccctaagaagaagaattatgagcggcttcagaaagctctggatagtgtgatgtctattcgggagatgacccagggctcatatttggaaatcaagaaacagatggacaagttggatcccctggcccatcctctcctgcagtggatcatctctagcaacaggtcacacattgtcaaactacctctcagcaggctgaagttcatgcacacctcacaccagttcctcctgctgagcagccctcctgccaaggaggctcggttccggaccgccaagaagctctatggcagcacctttgccttccatgggtcccacattgagaactggcattcgatcctgcgcaatgggctggtcaatgcatcctacaccaaactgcagctgcatggagcagcctatggcaaaggcatctacctgagccccatctccagtatttcctttggatactcaggaatgggaaaaggacagcacaggatgccctccaaggatgagctggtccagagatacaacaggatgaataccatcccccagacccgatccattcagtcacggttcctgcagagtcggaatctaaactgtatagcactttgtgaagtgattacatctaaggacctccagaagcatgggaacatctgggtgtgccctgtgtccgaccatgtctgcacaagattcttctttgtatatgaggatggtcaggtgggcgatgccaacattaatactcaggaccccaagatacagaaggaaatcatgcgtgtgatcggaactcaggtttacacaaactgagggggccccagccctcgtaccacccctgttaccccaggatccatctgccctcataaaagtgttcaggtacagcagctgaggctgccctgaggaatcaaggggccattaccaaggggcaggaaaaggatatgtaagaggtggccttcatggtagagcttgacccaagaactactccacattcggatggcccagactgactccatcccctgactttccctttgacttcaccctgtttgtaaataaaacaataaaatggaaggtgctgtggactgg

SEQ ID NO: 166996 - DNA, 1718 bp, Homo sapiens
  Payload ID: 12876
  Gene Symbol: PARP6
  Gene Name: poly (ADP-ribose) polymerase family, member 6
  ENST ID: ENST00000419739
  CDS Start-End: 60-1718
gtggtatggaggggtgctgcctagcactgacctgagagtgtgtgtgacccactgacccaatggacatcaaaggccagttctggaatgatgacgactcggagggagataatgaatcagaggaatttctctatggcgttcaggggagctgtgcagctgacctgtatcgacacccacagcttgatgcagacattgaagccgtgaaggagatctacagtgagaactctgtatccatcagagaatatggaactatcgatgacgtggacattgacctccacatcaacatcagcttcctcgatgaggaagtctctacagcctggaaggtcctccggacagaacctattgtgttgaggctgcgattttctctctcccagtacctagatggaccagaaccatccattgaggttttccagccatcaaataaggaaggatttgggctgggtcttcagttgaaaaagatcctgggtatgtttacatcccaacaatggaaacatctgagcaatgatttcttgaagacccagcaggagaagaggcacagttggttcaaggcaagtggtaccatcaagaagttccgagctggcctcagcatcttttcacccatccccaagtctcccagtttccctatcatacaggactccatgctgaaaggcaaactaggtgtaccagagcttcgggttgggcgcctcatgaaccgttccatctcctgtaccatgaagaaccccaaagtggaagtgtttggctaccctcccagcccccaggcaggtctcctgtgccctcagcacgtgggcctccctcccccagcacggacctctcctttggtcagtggtcactgcaagaacattcccactctggagtatggattcctcgttcagatcatgaagtatgcagaacagaggattccaacattgaatgagtactgtgtggtgtgtgatgagcagcatgtcttccaaaatggatctatgctgaagccagctgtctgtactcgtgaactatgcgttttctccttctacacactgggcgtcatgtctggagctgcagaggaggtggccactggagcagaggtggtggatctgctggtggccatgtgtagggcagctttagagtcccctagaaagagcatcatctttgagccttatccctctgtggtggaccccactgatcccaagactctggcctttaaccctaagaagaagaattatgagcggcttcagaaagctctggatagtgtgatgtctattcgggagatgacccagggctcatatttggaaatcaagaaacagatggacaagttggatcccctggcccatcctctcctgcagtggatcatctctagcaacaggtcacacattgtcaaactacctctcagcaggcagctgaagttcatgcacacctcacaccagttcctcctgctgagcagccctcctgccaaggaggctcggttccggaccgccaagaagctctatggcagcacctttgccttccatgggtcccacattgagaactggcattcgatcctgcgcaatgggctggtcaatgcatcctacaccaaactgcagctgcatggagcagcctatggcaaaggcatctacctgagccccatctccagtatttcctttggatactcaggaatgggaaaaggacagcacaggatgccctccaaggatgagctggtccagagatacaacaggatgaataccatcccccagacccgatccattcag

SEQ ID NO: 166997 - DNA, 2271 bp, Homo sapiens
  Payload ID: 12876
  Gene Symbol: PARP6
  Gene Name: poly (ADP-ribose) polymerase family, member 6
  ENST ID: ENST00000567440
  CDS Start-End: 388-1143
gtgaaaagttggcacttctggcctaacgctgccgtcatcctacccctcaccccagggcaacccaggctggacatttagtgcctccctctttattcctctgtgatcatccagatcagcacttgactgtttattttcaaatctcacgaacctcaccccaagatcttcacattctggatctcagctgctcttgaaggacagtgacttgttaccaccgcaacagcagagcctgccatccccaacagatcaccagttgtccctgacatcgtgccctaccttgtctccctttgtggtctcctaaatgcccatctcgttggccttggttcggctagtggtatggaggggtgctgcctagcactgacctgagagtgtgtgtgacccactgacccaatggacatcaaaggccagttctggaatgatgacgactcggagggagataatgaatcagaggaatttctctatggcgttcaggggagctgtgcagctgacctgtatcgacacccacagcttgatgcagacattgaagccgtgaaggagatctacagtgagaactctgtatccatcagagaatatggaactatcgatgacgtggacattgacctccacatcaacatcagcttcctcgatgaggaagtctctacagcctggaaggtcctccggacagaacctattgtgttgaggctgcgattttctctctcccagtacctagatggaccagaaccatccattgaggttttccagccatcaaataaggaaggatttgggctgggtcttcagttgaaaaagatcctgggtatgtttacatcccaacaatggaaacatctgagcaatgatttcttgaagacccagcaggagaagaggcacagttggttcaaggcaagtggtaccatcaagaagttccgagctggcctcagcatcttttcacccatccccaagtctcccagtttccctatcatacaggactccatgctgaaaggcaaactaggtgtaccagagcttcgggttgggcgcctcatgaaccgttccatctcctgtaccatgaagaaccccaaagtggaagtgtttggctaccctcccagcccccaggcagtggtcactgcaagaacattcccactctggagtatggattcctcgttcagatcatgaagtatgcagaacagaggattccaacattgaatgagtactgtgtggtgtgtgatgagcagcatgtcttccaaaatggatctatgctgaagccagctgtctgtactcgtgaactatgcgttttctccttctacacactgggcgtcatgtctggagctgcagaggaggtggccactggagcagaggtggtggatctgctggtggccatgtgtagggcagctttagagtcccctagaaagagcatcatctttgagccttatccctctgtggtggaccccactgatcccaagactctggcctttaaccctaagaagaagaattatgagcggcttcagaaagctctggatagtgtgatgtctattcgggagatgacccagggctcatatttggaaatcaagaaacagatggacaagttggatcccctggcccatcctctcctgcagtggatcatctctagcaacaggtcacacattgtcaaactacctctcagcaggtgggtcccacattgagaactggcattcgatcctgcgcaatgggctggtcaatgcatcctacaccaaactgcaggaatgggaaaaggacagcacaggatgccctccaaggatgagctggtccagagatacaacaggatgaataccatcccccagacccgatccattcagtcacggttcctgcagagtcggaatctaaactgtatagcactttgtgaagtgattacatctaaggacctccagaagcatgggaacatctgggtgtgccctgtgtccgaccatgtctgcacaagattcttctttgtatatgaggatggtcaggtgggcgatgccaacattaatactcaggaccccaagatacagaaggaaatcatgcgtgtgatcggaactcaggtttacacaaactgagggggccccagccctcgtaccacccctgttaccccaggatccatctgccctcataaaagtgttcaggtacagcagctgaggctgccctgaggaatcaaggggccattaccaaggggcaggaaaaggatatgtaagaggtggccttcatggtagagcttgacccaagaactactccacattcggatggcccagactgactccatcccctgactttccctttgacttcaccctg

SEQ ID NO: 166998 - DNA, 601 bp, Homo sapiens
  Payload ID: 12876
  Gene Symbol: PARP6
  Gene Name: poly (ADP-ribose) polymerase family, member 6
  ENST ID: ENST00000567042
  CDS Start-End: 1-54
gtgatgtctattcgggagatgacccaggggtggggcagccacatggagcggtgaccatcctttgactcaaggctgtccctcaccagacttccccacccctcgtctgcaatctctgcatgaatagacattcatttgtactcatttacagggctcatatttggaaatcaagaaacagatggacaagttggatcccctggcccatcctctcctgcagtggatcatctctagcaacaggtcacacattgtcaaactacctctcagcaggcagctgaagttcatgcacacctcacaccagttcctcctgctgagcagccctcctgccaaggaggctcggttccggaccgccaagaagctctatggcagcacctttgccttccatgggtcccacattgagaactggcattcgatcctgcgcaatgggctggtcaatgcatcctacaccaaactgcagctgcatggagcagcctatggcaaaggcatctacctgagccccatctccagtatttcctttggatactcaggaatgggaaaaggacagcacaggatgccctccaaggatgagctggtccagagatacaacaggatgaataccatcccccag

SEQ ID NO: 166999 - DNA, 1950 bp, Homo sapiens
  Payload ID: 12876
  Gene Symbol: PARP6
  Gene Name: poly (ADP-ribose) polymerase family, member 6
  ENST ID: ENST00000567974
  CDS Start-End: 1-1694
aggagatctacagtgagaactctgtatccatcagagaatatggaactatcgatgacgtggacattgacctccacatcaacatcagcttcctcgatgaggaagtctctacagcctggaaggtcctccggacagaacctattgtgttgaggctgcgattttctctctcccagtacctagatggaccagaaccatccattgaggttttccagccatcaaataaggaaggatttgggctgggtcttcagttgaaaaagatcctgggtatgtttacatcccaacaatggaaacatctgagcaatgatttcttgaagacccagcaggagaagaggcacagttggttcaaggcaagtggtaccatcaagaagttccgagctggcctcagcatcttttcacccatccccaagtctcccagtttccctatcatacaggactccatgctgaaaggcaaactaggtgtaccagagcttcgggttgggcgcctcatgaaccgttccatctcctgtaccatgaagaaccccaaagtggaagtgtttggctaccctcccagcccccaggtcagtggtcactgcaagaacattcccactctggagtatggattcctcgttcagatcatgaagtatgcagaacagaggattccaacattgaatgagtactgtgtggtgtgtgatgagcagcatgtcttccaaaatggatctatgctgaagccagctgtctgtactcgtgaactatgcgttttctccttctacacactgggcgtcatgtctggagctgcagaggaggtggccactggagcagaggtggtggatctgctggtggccatgtgtagggcagctttagagtcccctagaaagagcatcatctttgagccttatccctctgtggtggaccccactgatcccaagactctggcctttaaccctaagaagaagaattatgagcggcttcagaaagctctggatagtgtgatgtctattcgggagatgacccagggctcatatttggaaatcaagaaacagatggacaagttggatcccctggcccatcctctcctgcagtggatcatctctagcaacaggtcacacattgtcaaactacctctcagcaggcagctgaagttcatgcacacctcacaccagttcctcctgctgagcagccctcctgccaaggaggctcggttccggaccgccaagaagctctatggcagcacctttgccttccatgggtcccacattgagaactggcattcgatcctgcgcaatgggctggtcaatgcatcctacaccaaactgcagctgcatggagcagcctatggcaaaggcatctacctgagccccatctccagtatttcctttggatactcaggaatgggaaaaggacagcacaggatgccctccaaggatgagctggtccagagatacaacaggatgaataccatcccccagacccgatccattcagtcacggttcctgcagagtcggaatctaaactgtatagcactttgtgaagtgattacatctaaggacctccagaagcatgggaacatctgggtgtgccctgtgtccgaccatgtctgcacaagattcttctttgtatatgaggatggtcaggtgggcgatgccaacattaatactcaggaccccaagatacagaaggaaatcatgcgtgtgatcggaactcaggtttacacaaactgagggggccccagccctcgtaccacccctgttaccccaggatccatctgccctcataaaagtgttcaggtacagcagctgaggctgccctgaggaatcaaggggccattaccaaggggcaggaaaaggatatgtaagaggtggccttcatggtagagcttgacccaagaactactccacattcggatggcccagactgactccatcccctgactttccctttgacttcaccctgtttgtaaataaaacaataaaatgg

SEQ ID NO: 167000 - DNA, 304 bp, Homo sapiens
  Payload ID: 12876
  Gene Symbol: PARP6
  Gene Name: poly (ADP-ribose) polymerase family, member 6
  ENST ID: ENST00000569890
  CDS Start-End: 1-220
tgtctgtactcgtgaactatgcgttttctccttctacacactgggcgtcatgtctggagctgcagaggaggtggccactggagcagagggctcatatttggaaatcaagaaacagatggacaagttggatcccctggcccatcctctcctgcagtggatcatctctagcaacaggtcacacattgtcaaactacctctcagcaggtgggtcccacattgagaactggcattcgatcctgcgcaatgggctggtcaatgcatcctacaccaaactgcaggaatgggaaaaggacagcacaggatg

SEQ ID NO: 167001 - DNA, 2855 bp, Homo sapiens
  Payload ID: 12876
  Gene Symbol: PARP6
  Gene Name: poly (ADP-ribose) polymerase family, member 6
  Uniprot ID: Q2NL67
  ENST ID: ENST00000569795
  CDS Start-End: 689-2581
gggtgcgcgacctcgcccgccaggcccggcccccgccccttggcctgccgctccgcccccgcggggcgtcccgggccgctcgtcccgtcggctgcggccgcgcgcggcccggggtcgccgtgagtactcgccaggctggcctgtgtggccgccaccacgggcacagggcggtgcggccgggccacgggaagggtgcggggctcgccccgtctccgcaggggtggacgaacaacagaaaccaagcagcaacagcccttggaaagaggctaaatttttcttgacttctgcagcaacaaagaccgtgaaaagttggcacttctggcctaacgctgccgtcatcctacccctcaccccagggcaacccaggctggacatttagtgcctccctctttattcctctgtgatcatccagatcagcacttgactgtttattttcaaatctcacgaacctcaccccaagatcttcacattctggatctcagctgctcttgaaggacagtgacttgttaccaccgcaacagcagagcctgccatccccaacagatcaccagttgtccctgacatcgtgccctaccttgtctccctttgtggtctcctaaatgcccatctcgttggccttggttcggctagtggtatggaggggtgctgcctagcactgacctgagagtgtgtgtgacccactgacccaatggacatcaaaggccagttctggaatgatgacgactcggagggagataatgaatcagaggaatttctctatggcgttcaggggagctgtgcagctgacctgtatcgacacccacagcttgatgcagacattgaagccgtgaaggagatctacagtgagaactctgtatccatcagagaatatggaactatcgatgacgtggacattgacctccacatcaacatcagcttcctcgatgaggaagtctctacagcctggaaggtcctccggacagaacctattgtgttgaggctgcgattttctctctcccagtacctagatggaccagaaccatccattgaggttttccagccatcaaataaggaaggatttgggctgggtcttcagttgaaaaagatcctgggtatgtttacatcccaacaatggaaacatctgagcaatgatttcttgaagacccagcaggagaagaggcacagttggttcaaggcaagtggtaccatcaagaagttccgagctggcctcagcatcttttcacccatccccaagtctcccagtttccctatcatacaggactccatgctgaaaggcaaactaggtgtaccagagcttcgggttgggcgcctcatgaaccgttccatctcctgtaccatgaagaaccccaaagtggaagtgtttggctaccctcccagcccccaggcaggtctcctgtgccctcagcacgtgggcctccctcccccagcacggacctctcctttggtcagtggtcactgcaagaacattcccactctggagtatggattcctcgttcagatcatgaagtatgcagaacagaggattccaacattgaatgagtactgtgtggtgtgtgatgagcagcatgtcttccaaaatggatctatgctgaagccagctgtctgtactcgtgaactatgcgttttctccttctacacactgggcgtcatgtctggagctgcagaggaggtggccactggagcagaggtggtggatctgctggtggccatgtgtagggcagctttagagtcccctagaaagagcatcatctttgagccttatccctctgtggtggaccccactgatcccaagactctggcctttaaccctaagaagaagaattatgagcggcttcagaaagctctggatagtgtgatgtctattcgggagatgacccagggctcatatttggaaatcaagaaacagatggacaagttggatcccctggcccatcctctcctgcagtggatcatctctagcaacaggtcacacattgtcaaactacctctcagcaggctgaagttcatgcacacctcacaccagttcctcctgctgagcagccctcctgccaaggaggctcggttccggaccgccaagaagctctatggcagcacctttgccttccatgggtcccacattgagaactggcattcgatcctgcgcaatgggctggtcaatgcatcctacaccaaactgcagctgcatggagcagcctatggcaaaggcatctacctgagccccatctccagtatttcctttggatactcaggaatgggaaaaggacagcacaggatgccctccaaggatgagctggtccagagatacaacaggatgaataccatcccccagacccgatccattcagtcacggttcctgcagagtcggaatctaaactgtatagcactttgtgaagtgattacatctaaggacctccagaagcatgggaacatctgggtgtgccctgtgtccgaccatgtctgcacaagattcttctttgtatatgaggatggtcaggtgggcgatgccaacattaatactcaggaccccaagatacagaaggaaatcatgcgtgtgatcggaactcaggtttacacaaactgagggggccccagccctcgtaccacccctgttaccccaggatccatctgccctcataaaagtgttcaggtacagcagctgaggctgccctgaggaatcaaggggccattaccaaggggcaggaaaaggatatgtaagaggtggccttcatggtagagcttgacccaagaactactccacattcggatggcccagactgactccatcccctgactttccctttgacttcaccctgtttgtaaataaaacaataaaatggaaggtgctgtggactgga

SEQ ID NO: 167002 - DNA, 2305 bp, Homo sapiens
  Payload ID: 12876
  Gene Symbol: PARP6
  Gene Name: poly (ADP-ribose) polymerase family, member 6
  ENST ID: ENST00000565443
  CDS Start-End: 224-1783
cacattctggatctcagctgctcttgaaggacagtgacttgttaccaccgcaacagcagagcctgccatccccaacagatcaccagttgtccctgacatcgtgccctaccttgtctccctttgtggtctcctaaatgcccatctcgttggccttggttcggctagtggtatggaggggtgctgcctagcactgacctgagagtgtgtgtgacccactgacccaatggacatcaaaggccagttctggaatgatgacgactcggagggagataatgaatcagaggaatttctctatggcgttcaggggagctgtgcagctgacctgtatcgacacccacagcttgatgcagacattgaagccgtgaaggagatctacagtgagaactctgtatccatcagagaatatggaactatcgatgacgtggacattgacctccacatcaacatcagcttcctcgatgaggaagtctctacagcctggaaggtcctccggacagaacctattgtgttgaggctgcgattttctctctcccagtacctagatggaccagaaccatccattgaggttttccagccatcaaataaggaaggatttgggctgggtcttcagttgaaaaagatcctgggtatgtttacatcccaacaatggaaacatctgagcaatgatttcttgaagacccagcaggagaagaggcacagttggttcaaggcaagtggtaccatcaagaagttccgagctggcctcagcatcttttcacccatccccaagtctcccagtttccctatcatacaggactccatgctgaaaggcaaactaggtgtaccagagcttcgggttgggcgcctcatgaaccgttccatctcctgtaccatgaagaaccccaaagtggaagtgtttggctaccctcccagcccccaggcaggtctcctgtgccctcagcacgtgggcctccctcccccagcacggacctctcctttggtcagtggtcactgcaagaacattcccactctggagtatggattcctcgttcagatcatgaagtatgcagaacagaggattccaacattgaatgagtactgtgtggtgtgtgatgagcagcatgtcttccaaaatggatctatgctgaagccagctgtctgtactcgtgaactatgcgttttctccttctacacactgggcgtcatgtctggagctgcagaggaggtggccactggagcagaggtggtggatctgctggtggccatgtgtagggcagctttagagtcccctagaaagagcatcatctttgagccttatccctctgtggtggaccccactgatcccaagactctggcctttaaccctaagaagaagaattatgagcggcttcagaaagctctggatagtgtgatgtctattcgggagatgacccagggctcatatttggaaatcaagaaacagatggacaagttggatcccctggcccatcctctcctgcagtggatcatctctagcaacaggtcacacattgtcaaactacctctcagcaggcagctgaagttcatgcacacctcacaccagttcctcctgctgagcagccctcctgccaaggaggctcggttccggaccgccaagaagctctatggcagcacctttgccttccatgggtcccacattgagaactggcattcgatcctgcgcaatgggctggtcaatgcatcctacaccaaactgcaggaatgggaaaaggacagcacaggatgccctccaaggatgagctggtccagagatacaacaggatgaataccatcccccagacccgatccattcagtcacggttcctgcagagtcggaatctaaactgtatagcactttgtgaagtgattacatctaaggacctccagaagcatgggaacatctgggtgtgccctgtgtccgaccatgtctgcacaagattcttctttgtatatgaggatggtcaggtgggcgatgccaacattaatactcaggaccccaagatacagaaggaaatcatgcgtgtgatcggaactcaggtttacacaaactgagggggccccagccctcgtaccacccctgttaccccaggatccatctgccctcataaaagtgttcaggtacagcagctgaggctgccctgaggaatcaaggggccattaccaaggggcaggaaaaggatatgtaagaggtggccttcatggtagagcttgacccaagaactactccacattcggatggcccagactgactccatcccctgactttccctttgacttcaccctgtttgtaaataaaacaataaaatgg

SEQ ID NO: 167003 - DNA, 1876 bp, Homo sapiens
  Payload ID: 12876
  Gene Symbol: PARP6
  Gene Name: poly (ADP-ribose) polymerase family, member 6
  ENST ID: ENST00000564610
  CDS Start-End: 1-1354
ggagatctacagtgagaactctgtatccatcagagaatatggaactatcgatgacgtggacattgacctccacatcaacatcagcttcctcgatgaggaagtctctacagcctggaaggtcctccggacagaacctattgtgttgaggctgcgattttctctctcccagtacctagatggaccagaaccatccattgaggttttccagccatcaaataaggaaggatttgggctgggtcttcagttgaaaaagatcctgggtatgtttacatcccaacaatggaaacatctgagcaatgatttcttgaagacccagcaggagaagaggcacagttggttcaaggcaagtggtaccatcaagaagttccgagctggcctcagcatcttttcacccatccccaagtctcccagtttccctatcatacaggactccatgctgaaaggcaaactaggtgtaccagagcttcgggttgggcgcctcatgaaccgttccatctcctgtaccatgaagaaccccaaagtggaagtgtttggctaccctcccagcccccaggtcagtggtcactgcaagaacattcccactctggagtatggattcctcgttcagatcatgaagtatgcagaacagaggattccaacattgaatgagtactgtgtggtgtgtgatgagcagcatgtcttccaaaatggatctatgctgaagccagctgtctgtactcgtgaactatgcgttttctccttctacacactgggcgtcatgtctggagctgcagaggaggtggccactggagcagaggtggtggatctgctggtggccatgtgtagggcagctttagagtcccctagaaagagcatcatctttgagccttatccctctgtggtggaccccactgatcccaagactctggcctttaaccctaagaagaagaattatgagcggcttcagaaagctctggatagtgtgatgtctattcgggagatgacccagggctcatatttggaaatcaagaaacagatggacaagttggatcccctggcccatcctctcctgcagtggatcatctctagcaacaggtcacacattgtcaaactacctctcagcaggctgaagttcatgcacacctcacaccagttcctcctgctgagcagccctcctgccaaggaggctcggttccggaccgccaagaagctctatggcagcacctttgccttccatgggtcccacattgagaactggcattcgatcctgcgcaatgggctggtcaatgcatcctacaccaaactgcaggaatgggaaaaggacagcacaggatgccctccaaggatgagctggtccagagatacaacaggatgaataccatcccccagacccgatccattcagtcacggttcctgcagagtcggaatctaaactgtatagcactttgtgaagtgattacatctaaggacctccagaagcatgggaacatctgggtgtgccctgtgtccgaccatgtctgcacaagattcttctttgtatatgaggatggtcaggtgggcgatgccaacattaatactcaggaccccaagatacagaaggaaatcatgcgtgtgatcggaactcaggtttacacaaactgagggggccccagccctcgtaccacccctgttaccccaggatccatctgccctcataaaagtgttcaggtacagcagctgaggctgccctgaggaatcaaggggccattaccaaggggcaggaaaaggatatgtaagaggtggccttcatggtagagcttgacccaagaactactccacattcggatggcccagactgactccatcccctgactttccctttgacttcaccctgtttgtaaataaaacaataaaatgg

SEQ ID NO: 167004 - DNA, 516 bp, Homo sapiens
  Payload ID: 12876
  Gene Symbol: PARP6
  Gene Name: poly (ADP-ribose) polymerase family, member 6
  ENST ID: ENST00000569173
  CDS Start-End: 1-242
gggttgggcgcctcatgaaccgttccatctcctgtaccatgaagaaccccaaagtggaagtgtttggctaccctcccagcccccaggcagtggtcactgcaagaacattcccactctggagtatggattcctcgttcagatatgaggatggtcaggtgggcgatgccaacattaatactcaggaccccaagatacagaaggaaatcatgcgtgtgatcggaactcaggtttacacaaactgagggggccccagccctcgtaccacccctgttaccccaggatccatctgccctcataaaagtgttcaggtacagcagctgaggctgccctgaggaatcaaggggccattaccaaggggcaggaaaaggatatgtaagaggtggccttcatggtagagcttgacccaagaactactccacattcggatggcccagactgactccatcccctgactttccctttgacttcaccctgtttgtaaataaaacaataaaatggaaggtgctgtggactgga

SEQ ID NO: 167005 - DNA, 740 bp, Homo sapiens
  Payload ID: 12876
  Gene Symbol: PARP6
  Gene Name: poly (ADP-ribose) polymerase family, member 6
  ENST ID: ENST00000565999
  CDS Start-End: 1-230
gagataatgaatcagaggaatttctctatggcgttcaggggagctgtgcagctgacctgtatcgacacccacagcttgatgcagacattgaagccgtgaaggagatctacagtgagaactctgtatccatcagagaatatggaactatcgatgacgtggacattgacctccacatcaacatcagcttcctcgatgtaagtggggctagtacctgccaacaacatgtctagctggacttgtggaatttgtcatgtaggccaggagtcttgttcccgagtgctgtatttggagcacatattcttcatctctgtctttcctagaccatcagcagacagtggaggaagtctctacagcctggaaggtcctccggacagaacctattgtgttgaggctgcgattttctctctcccagtacctagatggaccagaaccatccattgaggttttccagccatcaaataaggaaggatttgggctgggtcttcagttgaaaaagatcctgggtatgtttacatcccaacaatggaaacatctgagcaatgatttcttgaagacccagcaggagaagaggcacagttggttcaaggcaagtggtaccatcaagaagttccgagctggcctcagcatcttttcacccatccccaagtctcccagtttccctatcatacaggactccatgctgaaaggcaaactaggtgtaccagagcttcgggttgggcgcctcatgaaccgttccatct

SEQ ID NO: 167006 - DNA, 829 bp, Homo sapiens
  Payload ID: 12876
  Gene Symbol: PARP6
  Gene Name: poly (ADP-ribose) polymerase family, member 6
  ENST ID: ENST00000566844
  CDS Start-End: 751-829
ctccgcccccgcggggcgtcccgggccgctcgtcccgtcggctgcggccgcgcgcggcccggggtcgccgtgagtactcgccaggctggcctgtgtggccgccaccacgggcacagggcggtgcggccgggccacgggaagggtgcggggctcgccccgtctccgcaggggtggacgaagtgagaggcttggaccgggaggttctgagggcccctcctaggctggacaggcttcactcaggcccggcggccgggcggcatagatcgggcccagagcgtctttcctggggagcaacagaaaccaagcagcaacagcccttggaaagaggctaaatttttcttgacttctgcagcaacaaagaccgtgaaaagttggcacttctggcctaacgctgccgtcatcctacccctcaccccagggcaacccaggctggacatttagtgcctccctctttattcctctgtgatcatccagatcagcacttgactgtttattttcaaatctcacgaacctcaccccaagatcttcacattctggatctcagctgctcttgaaggacagtgacttgttaccaccgcaacagcagagcctgccatccccaacagatcaccagttgtccctgacatcgtgccctaccttgtctccctttgtggtctcctaaatgcccatctcgttggccttggttcggctagtggtatggaggggtgctgcctagcactgacctgagagtgtgtgtgacccactgacccaatggacatcaaaggccagttctggaatgatgacgactcggagggagataatgaatcagaggaatttctctatggcgttc

SEQ ID NO: 167007 - DNA, 845 bp, Homo sapiens
  Payload ID: 12876
  Gene Symbol: PARP6
  Gene Name: poly (ADP-ribose) polymerase family, member 6
  ENST ID: ENST00000567263
  CDS Start-End: 1-373
actatgcgttttctccttctacacactgggcgtcatgtctggagctgcagaggaggtggccactggagcagaggtggtggatctgctggtggccatgtgtagggcagctttagagtcccctagaaagagcatcatctttgagccttatccctctgtggtggaccccactgatcccaagactctggcctttaaccctaagaagaagaattatgagcggcttcagaaagctctggatagtgtgatgtctattcgggagatgacccagggctcatatttggaaatcaagaaacagatggacaagttggatcccctggcccatcctctcctgcagtggaatgggaaaaggacagcacaggatgccctccaaggatgagctggtccagagatacaacaggatgaataccatcccccagacccgatccattcagtcacggttcctgcagagtcggaatctaaactgtatagcactttgtgaagtgattacatctaaggacctccagaagcatgggaacatctgggtgtgccctgtgtccgaccatgtctgcacaagattcttctttgtatatgaggatggtcaggtgggcgatgccaacattaatactcaggaccccaagatacagaaggaaatcatgcgtgtgatcggaactcaggtttacacaaactgagggggccccagccctcgtaccacccctgttaccccaggatccatctgccctcataaaagtgttcaggtacagcagctgaggctgccctgaggaatcaaggggccattaccaaggggcaggaaaaggatatgtaagaggtggccttcatggtagagcttgacccaagaactactccacatt

SEQ ID NO: 167008 - DNA, 596 bp, Homo sapiens
  Payload ID: 12876
  Gene Symbol: PARP6
  Gene Name: poly (ADP-ribose) polymerase family, member 6
  ENST ID: ENST00000568360
  CDS Start-End: 376-596
ctgccggccccaacctccggcgaggggactccctcccggcctacaggcaacctgggttgcccttcctgcttgttcctcccaaccactcggggcgctaaatgcaacacttgactgtttattttcaaatctcacgaacctcaccccaagatcttcacattctggatctcagctgctcttgaaggacagtgacttgttaccaccgcaacagcagagcctgccatccccaacagatcaccagttgtccctgacatcgtgccctaccttgtctccctttgtggtctcctaaatgcccatctcgttggccttggttcggctagtggtatggaggggtgctgcctagcactgacctgagagtgtgtgtgacccactgacccaatggacatcaaaggccagttctggaatgatgacgactcggagggagataatgaatcagaggaatttctctatggcgttcaggggagctgtgcagctgacctgtatcgacacccacagcttgatgcagacattgaagccgtgaaggagatctacagtgagaactctgtatccatcagagaatatggaactatcgatgacgtggacattgacctccacatcaa

SEQ ID NO: 167009 - DNA, 2102 bp, Homo sapiens
  Payload ID: 12876
  Gene Symbol: PARP6
  Gene Name: poly (ADP-ribose) polymerase family, member 6
  ENST ID: ENST00000616176
  CDS Start-End: 47-1369
gtgctgcctagcactgacctgagagtgtgtgtgacccactgacccaatggacatcaaaggccagttctggaatgatgacgactcggagggagataatgaatcagaggaatttctctatggcgttcaggggagctgtgcagctgacctgtatcgacacccacagcttgatgcagacattgaagccgtgaaggagatctacagtgagaactctgtatccatcagagaatatggaactatcgatgacgtggacattgacctccacatcaacatcagcttcctcgatgaggaagtctctacagcctggaaggtcctccggacagaacctattgtgttgaggctgcgattttctctctcccagtacctagatggaccagaaccatccattgaggttttccagccatcaaataaggaaggatttgggctgggtcttcagttgaaaaagatcctgggtatgtttacatcccaacaatggaaacatctgagcaatgatttcttgaagacccagcaggagaagaggcacagttggttcaaggcaagtggtaccatcaagaagttccgagctggcctcagcatcttttcacccatccccaagtctcccagtttccctatcatacaggactccatgctgaaaggcaaactaggtgtaccagagcttcgggttgggcgcctcatgaaccgttccatctcctgtaccatgaagaaccccaaagtggaagtgtttggctaccctcccagcccccaggcaggtctcctgtgccctcagcacgtgggcctccctcccccagcacggacctctcctttggtcagtggtcactgcaagaacattcccactctggagtatggattcctcgttcagatcatgaagtatgcagaacagaggattccaacattgaatgagtactgtgtggtgtgtgatgagcagcatgtcttccaaaatggatctatgctgaagccagctgtctgtactcgtgaactatgcgttttctccttctacacactgggcgtcatgtctggagctgcagaggaggtggccactggagcagaggtggtggatctgctggtggccatgtgtagggcagctttagagtcccctagaaagagcatcatctttgagccttatccctctgtggtggaccccactgatcccaagactctggcctttaaccctaagaagaagaattatgagcggcttcagaaagctctggatagtgtgatgtctattcgggagatgacccagggctcatatttggaaatcaagaaacagatggacaagttggatcccctggcccatcctctcctgcagtggatcatctctagcaacaggtcacacattgtcaaactacctctcagcaggtgggtcccacattgagaactggcattcgatcctgcgcaatgggctggtcaatgcatcctacaccaaactgcagctgcatggagcagcctatggcaaaggcatctacctgagccccatctccagtatttcctttggatactcaggaatgggaaaaggacagcacaggatgccctccaaggatgagctggtccagagatacaacaggatgaataccatcccccagacccgatccattcagtcacggttcctgcagagtcggaatctaaactgtatagcactttgtgaagtgattacatctaaggacctccagaagcatgggaacatctgggtgtgccctgtgtccgaccatgtctgcacaagattcttctttgtatatgaggatggtcaggtgggcgatgccaacattaatactcaggaccccaagatacagaaggaaatcatgcgtgtgatcggaactcaggtttacacaaactgagggggccccagccctcgtaccacccctgttaccccaggatccatctgccctcataaaagtgttcaggtacagcagctgaggctgccctgaggaatcaaggggccattaccaaggggcaggaaaaggatatgtaagaggtggccttcatggtagagcttgacccaagaactactccacattcggatggcccagactgactccatcccctgactttccctttgacttcaccctgtttgtaaataaaacaataaaatggaaggtgctgtggactgg

SEQ ID NO: 167010 - DNA, 7177 bp, Homo sapiens
  Payload ID: 12877
  Gene Symbol: PARP8
  Gene Name: poly (ADP-ribose) polymerase family, member 8
  Uniprot ID: Q8N3A8
  ENST ID: ENST00000281631
  CDS Start-End: 159-2723
ttctctcacccaggatcacttccgaaaccacttcgccttcagcccctgcctcggccagaggtttcatttttaactgaatatttacgaaagctggaagcgtgcgaggggggtggggtggggtggaaatagcggctgcttcttttccagggatttatttaatggggatgtgttcaaggcaagagcgaattcagaaggatatcgacgtcgtgatccagaagtccagagctgagaaggactgcctgtttgcagatttcagatactctgactccacctttacttttacctacgttggcggccccagaagtgtatcctactcagtacatgtatctgaagattacccagataatacatatgtgtcaagttcagagaatgatgaagatgtgctagttactacagagccaataccagtaatttttcatagaatagcaacagaattaagaaaaacaaatgacattaactgttgcttatccataaaatccaaattacaaaaggaaaatggggaggaatcaagacagaatagtacagtggaggaagattctgaaggtgacaatgattccgaagaattttattacggagggcaggtgaactatgatggggaactgcacaagcacccacaactggaagctgatttgtcagcagttagagagatatatgggccacatgcagtttctctcagggaatatggagccattgatgatgtagatattgatctgcatatcgatgttagctttcttgatgaggagattgctgtggcttgggaagtaattcgaacagaacctataattgttcgactacactgttcacttacacagtatttaaatggcccagtgcccactgttgatgtctttcagatttccacaaaagagcgatttggattgggacatcagctgaaaaaaatcatgcagacatttgttacacagcagtggaaacagagcaaagaaaaatccaattgcctgcacaataaaaagttgtcagagaagaaagtgaagtctcccctgcatttattttctactttgcgcaggtcgccaagttatcctccccctggttgtggcaaaagcaaatccaaactgaaatctgagcaggacggaatctccaaaacgcataagctgctgcggaggacttgttccagcacagtcaagactgatgatgtgtgtgtcacaaagtcacacaggacctttggccgctccttgtccagcgatcccagggcggagcaggctatgacagcaattaaatcgcacaaacttttgaaccgtccttgccctgcagctgttaagtcagaggaatgcctaactctaaagtcgcatagactattgactcgatcttgttctggagatccacgatgtgagcacaacacaaacttgaagccccataaactgttaagcaggtcttactctagtaatctcagaatggaagaattatatggactgaaaaatcacaaattgctcagcaagtcctactccagtgcccccaagtcatccaaaactgagcttttcaaggaacctaacgcagagggcaggaggctctctcttacctcagggcttattggtatcctaacaccatcttcatcttcatcttctcagcttgctccaaatggtgcaaaatgcattccagtacgagaccgtggcttcctggtgcagacaattgagtttgctgaacagcggatccctgtattaaatgaatattgtgtggtttgtgatgagccacatgtgtttcaaaatggccctatgcttaggcctaccgtatgtgaacgggagctgtgtgtgtttgcttttcaaaccctgggagtaatgaatgaagctgctgatgaaatagcaactggagctcaggtggtagatctactagtatccatgtgtaggtctgcgttggaatctcctagaaaagttgtgattttcgagccatatccttctgtggtagatcctaatgatcctcagatgttggccttcaaccccaggaaaaagaactatgatcgagtaatgaaagcactggatagcataacttctatcagagaaatgacacaagcaccatatctggaaatcaagaagcaaatggataaacaggacccccttgctcatcccttactgcaatgggttatatcaagtaatagatcacatattgtgaaactgccagttaacaggcaattgaagtttatgcatactccacatcagttccttcttctcagcagtccaccagccaaagaatccaattttagagctgctaaaaaactctttggaagcacctttgcatttcatggctcacacattgaaaactggcactccatcctgaggaatggtctggttgttgcttctaatacacgattgcagctccatggtgcaatgtatggaagtggaatctatcttagtccaatgtcaagcatatcatttggttactcagggatgaacaagaaacagaaggtgtcagccaaggacgagccagcttcaagcagtaaaagcagcaatacatcacagtcacagaaaaaaggacagcaatcccaattcctgcaaagccgtaacttaaaatgcatagccttatgtgaagtgatcacctcatctgacctgcacaaacatggagagatatgggttgtccccaatactgaccatgtctgcacacgattctttttcgtctatgaagacggccaagtgggagatgcaaatattaatacacaagaaggaggcattcacaaagagatcctccgagtaattggtaatcaaactgctactggttaaaggaccaccatttaattaacatgattcgaaagccttcctcgggttcaaagctggattttgaactgaagaagattataaaattatttattgttattataaacaaaattaaccctttgaatactgattttttttcttagtatttctaagtatctcattaaatacctaaaatggtataagatttatcaattgtagggttatggaatctagtaataaaatttcaacagcacttaaactgaagtttgggttgctcatacaataaacagattgaaaaaactgttttgtgctgatatttttatactaaactctttaactggatatttggtattatataccgacattttaggttaccaaaatagaattgagaacattttataatggcatctaaatctatcagatactttgcaataagtatactgtttgcacattctgatgtgctatatcattagtagtatgggcattctaatgttttggaaggggtgttccctattctatttttcttcataaaaaaagaagtaggtcttagaagcagtgctttgccaaaaagtatgtaatatacacatctatacattcatgcatcaaaatgtgtggttgtgaatatatttgtgtatattcacacgtatgttttgacaagaaagatggcttagcttcacaattctatcctcgtttaatggaaagaagataatatttagtaagcaataaatttggacataaatcaagatatgagccagatttaccaccattcattcactgaaaatatttgcagacaatttttctgtttgtctgaagaaattcagcccttttaaaatgttatctaaaagtcataatttggggaacatacatggcctggtagaccgaatctatattcaaatgattatgtatttaaaagaaagacctcagaatttaaagaaaccatatatattttttatttactacaaaaaaattatacaattttatttatgccacaccagcatttttatatttgttcatctaatatctctgcttatttttttcatattgagaaagaacacaaacttgatgcttcttttatattaaaagaccacaaataagtttatagagaacagtaacaccagctctcagcatttccttttcaagagtcataatttcatcaaaatcatttcttattctttgagtcctagagttcttattcatcaagttttaattgacagtgtttattttcccacatgttgtctttggaataaggccattcatgaaagcagtttaattagtgagtctgccactctattcaaaccctgaatcaaggctctatctgattttaatttatgtaaaaaaaaataaaaatgtatagtcatttgcaagtataatgtgataactgctgtgtttatttcctttgtctggcataaaaggtgagaaaaaggtcatacatgttgttaagggtagcagtttaggaagtgttttctaataatttgttttgttatattgcaaataattgatatgccacttatttctgcaagaaaaataggcttgaagtggttgggatattaatcattttgatagtatctacttaaagcattgatctgttttgacttgtggctctgaaccctgggctaggctgagggataatagtagtggagtagggcaaagatataatatcctatccagtgttttgtgaccacttatttgaagattagtgtgggacatgaggaccttgctacttttttgccaagatgctgcaagtctcccaaatcacttcaactgtgtttttaaaacatgtttaagcaacagaattatttttttgaaattagtctatacgttagacagtctatacatgacaaacatgaagatctaatatcaagatttgggagacgggatcttggaactccacctgtttgaccactaggaccactgaggcacctccaataagctctgtagagtgcctccagcataattcaaaatccactgacctaatccattatggctttacttaacattggagtgatccgtaaagaatatagtattggagtctgaactggaacggtaactcgtaagactcaagaaagaccgtttaaggaaaattggcataatacaaactgttcctgttgacttaagaataacagtaggttcacctatctgaggaaattaagtagttgatagtttaatgctaggcatcttttatgataataaagtaagatgtcttcttatgacagttaattgagttgtatcatgatacagaatgacagattttgtttcaaacaattgcgtcagaacctttgtaagcaaatattctaaggagaatcaatcttattttttaattgaactttttgaaattagggatactataataactgataaagatgaatttctgtgtttctaaagaatctaatttcaattactaccattaacatataaatgtgcttccaaaatccaagcaggtccatacaatttagagatttgaacactgttatcatgctttaattcagtcattcattaaaatattatctattcacttatttgatgattccaaacatttgatattgtattgtgtttttataattatttgaaatctgttcaccaatgctttgtaatggttttattaattgtgtagccattgctacttagatagtaacccactgagcaaaggcagtcatttattttcatccttgaagtaggggaagaaaattattaatttattagttctactttttcctgcattgcttattttgtaaacattttactatgaataatctgttctctttcactgtattaaaaggagaagaaaatgaacatttgagaatggaaaaaagtaataatatacaaataatctagtgctataaaatgcattatagtaagacacttttggtgtcttcgagtgcactatgttggaataaattttatacttgttgcttagtaaatctcagtcatacgtttggtttgaagctgtttttttttttaatttgaagtttaattttaaaagtgccacattgtaaaagttaccgttaaatactatgtagtataaaaaaccaacccaagctattgttaatgctctgaatgtttttctttgaaaatttaagtttagagaagaaattccttcatttttctcccctttgctaaaagaaagaaaatctataatatgtaagtctatgaatctttaaataactgaaggaattttagcagtactttgtataataaaaatattttttaaactataacttgccttagagcatggggtttcagaaagttttgacgaaaaactcatcttcattaaagagtctggataacttcatcagatggtaatttaatatgtcatgaaggggacactcaacattgggtcatctaccgtctaaataaatacggatttcatggtggcatttgaagcacattttgcaaacattatgatgttctattgtcttgctgaattctttattataacactacctcaagacaaatgatagactgttggtaaggtaaattgggttttcaatgtcaggaacaaataaaattttgcaaatagaagtcatcaaataattcaacaggaagaccatactggacacagatgttgtcagttacttctggacaatgtggtaacatggatatttcagtcactggtaacaatgtcagggttaacacccaatgaattatttgaaacaatttgggttgcaaaatttgaaattaattagtctattttgagattgattttctacgtgggccaattttatgtccattacctaaagccacaatctcccgctctaaggagttaaaggatgaaaacacccaactgctacactggaatggcagactggatattcaagcattttggcatttaatgcctgctaaatttttgtccgattatatatagatttgatgtatattattacccagtaaattcttcttgggaattttgtatacattatggaatattaggataagtttttgtaggtcagaagaatttcaagtagtttttagacaaaacatatccatgagtgtgaaaaaagctgtgttgacgaatagattacatttcacatttaccagcaagtcagtaaaaaatagtgcttatttacatagtcaatataatttaatgttctaaaaataatatcttcgatctgcccaatatttaatgtatcatttgagatttttaaaaatgcatccgctccattatgtaaacattaagatatgcctatgtttctttaactatacagcctctttacaataaatttcttgatttttgtgcacaggatagtattgcaacctgctatttagcctttggtgccttagaattattataaatatttaacaatatgtacataatgtaaatactgccaagagatcagtaaggccaaatattttctctattcactttttattgctcttgctttctattgctactaaagcctcttttatccagctttgtaatagttccaacattgtagcgaatgtaaatgtttactttcaataaatctgaacttgttcaacaagta

SEQ ID NO: 167011 - DNA, 577 bp, Homo sapiens
  Payload ID: 12877
  Gene Symbol: PARP8
  Gene Name: poly (ADP-ribose) polymerase family, member 8
  ENST ID: ENST00000503888
  CDS Start-End: 109-246
aagccaaacaggtttccatcttttaggaagaccctggaacgtgccagttgattctgaccatttctcatgaacagaaacacctaggaagggagaactgggatttatttaatggggatgtgttcaaggcaagagcgaattcagaaggatatcgacgtcgtgatccagaagtccagagctgagaaggactgcctgtttgcagtgtatcctactcagtacatgtatctgaagattacccagctattgtgaatactgccacaatgcacatggtggtggagatattgcttcaagatcctggttccgtttcctgtggatctcaaaaggattgctgaaatggataatacatatgtgtcaagttcagagaatgatgaagatgtgctagttactacagagccaataccagtaatttttcatagaatagcaacagaattaagaaaaacaaatgacattaactgttgcttatccataaaatccaaattacaaaaggaaaatggggaggaatcaagacagaatagtacagtggaggaagattctgaaggtgacaatgattccgaagaattttattacggagggcaggtaa

SEQ ID NO: 167012 - DNA, 464 bp, Homo sapiens
  Payload ID: 12877
  Gene Symbol: PARP8
  Gene Name: poly (ADP-ribose) polymerase family, member 8
  ENST ID: ENST00000503046
  CDS Start-End: 116-464
ccctgcctcggccagaggtttcatttttaactgaatatttacgaaagctggaagcgtgcgaggggggtggggtggggtggaaatagcggctgcttcttttccagggatttatttaatggggatgtgttcaaggcaagagcgaattcagaaggatatcgacgtcgtgatccagaagtccagagctgagaaggactgcctgtttgcagatttcagatactctgactccacctttacttttacctacgttggcggccccagaagtgtatcctactcagtacatgtatctgaagattacccagataatacatatgtgtcaagttcagagaatgatgaagatgtgctagttactacagagccaataccagtaatttttcatagaatagcaacagaattaagaaaaacaaatgacattaactgttgcttatccataaaatccaaattacaaaaggaaaatggggaggtat

SEQ ID NO: 167013 - DNA, 554 bp, Homo sapiens
  Payload ID: 12877
  Gene Symbol: PARP8
  Gene Name: poly (ADP-ribose) polymerase family, member 8
  ENST ID: ENST00000507812
  CDS Start-End: 181-330
agcagtatctcatttctgaacacctggattgtagctttcccttgactgtcaaaggaggtggttttaaaaatcaagccaaacaggtttccatcttttaggaagaccctggaacgtgccagttgattctgaccatttctcatgaacagaaacacctaggaagggagaactgggatttatttaatggggatgtgttcaaggcaagagcgaattcagaaggatatcgacgtcgtgatccagaagtccagagctgagaaggactgcctgtttgcagatttcagatactctgactccacctttacttttacctacgttggcggccccagaagataatacatatgtgtcaagttcagagaatgatgaagatgtgctagttactacagagccaataccagtaatttttcatagaatagcaacagaattaagaaaaacaaatgacattaactgttgcttatccataaaatccaaattacaaaaggaaaatggggaggaatcaagacagaatagtacagtggaggaagattctgaaggtgacaatgattccgaagaattttatt

SEQ ID NO: 167014 - DNA, 2747 bp, Homo sapiens
  Payload ID: 12877
  Gene Symbol: PARP8
  Gene Name: poly (ADP-ribose) polymerase family, member 8
  Uniprot ID: Q8N3A8
  ENST ID: ENST00000505697
  CDS Start-End: 183-2747
agagcagtatctcatttctgaacacctggattgtagctttcccttgactgtcaaaggaggtggttttaaaaatcaagccaaacaggtttccatcttttaggaagaccctggaacgtgccagttgattctgaccatttctcatgaacagaaacacctaggaagggagaactgggatttatttaatggggatgtgttcaaggcaagagcgaattcagaaggatatcgacgtcgtgatccagaagtccagagctgagaaggactgcctgtttgcagatttcagatactctgactccacctttacttttacctacgttggcggccccagaagtgtatcctactcagtacatgtatctgaagattacccagataatacatatgtgtcaagttcagagaatgatgaagatgtgctagttactacagagccaataccagtaatttttcatagaatagcaacagaattaagaaaaacaaatgacattaactgttgcttatccataaaatccaaattacaaaaggaaaatggggaggaatcaagacagaatagtacagtggaggaagattctgaaggtgacaatgattccgaagaattttattacggagggcaggtgaactatgatggggaactgcacaagcacccacaactggaagctgatttgtcagcagttagagagatatatgggccacatgcagtttctctcagggaatatggagccattgatgatgtagatattgatctgcatatcgatgttagctttcttgatgaggagattgctgtggcttgggaagtaattcgaacagaacctataattgttcgactacactgttcacttacacagtatttaaatggcccagtgcccactgttgatgtctttcagatttccacaaaagagcgatttggattgggacatcagctgaaaaaaatcatgcagacatttgttacacagcagtggaaacagagcaaagaaaaatccaattgcctgcacaataaaaagttgtcagagaagaaagtgaagtctcccctgcatttattttctactttgcgcaggtcgccaagttatcctccccctggttgtggcaaaagcaaatccaaactgaaatctgagcaggacggaatctccaaaacgcataagctgctgcggaggacttgttccagcacagtcaagactgatgatgtgtgtgtcacaaagtcacacaggacctttggccgctccttgtccagcgatcccagggcggagcaggctatgacagcaattaaatcgcacaaacttttgaaccgtccttgccctgcagctgttaagtcagaggaatgcctaactctaaagtcgcatagactattgactcgatcttgttctggagatccacgatgtgagcacaacacaaacttgaagccccataaactgttaagcaggtcttactctagtaatctcagaatggaagaattatatggactgaaaaatcacaaattgctcagcaagtcctactccagtgcccccaagtcatccaaaactgagcttttcaaggaacctaacgcagagggcaggaggctctctcttacctcagggcttattggtatcctaacaccatcttcatcttcatcttctcagcttgctccaaatggtgcaaaatgcattccagtacgagaccgtggcttcctggtgcagacaattgagtttgctgaacagcggatccctgtattaaatgaatattgtgtggtttgtgatgagccacatgtgtttcaaaatggccctatgcttaggcctaccgtatgtgaacgggagctgtgtgtgtttgcttttcaaaccctgggagtaatgaatgaagctgctgatgaaatagcaactggagctcaggtggtagatctactagtatccatgtgtaggtctgcgttggaatctcctagaaaagttgtgattttcgagccatatccttctgtggtagatcctaatgatcctcagatgttggccttcaaccccaggaaaaagaactatgatcgagtaatgaaagcactggatagcataacttctatcagagaaatgacacaagcaccatatctggaaatcaagaagcaaatggataaacaggacccccttgctcatcccttactgcaatgggttatatcaagtaatagatcacatattgtgaaactgccagttaacaggcaattgaagtttatgcatactccacatcagttccttcttctcagcagtccaccagccaaagaatccaattttagagctgctaaaaaactctttggaagcacctttgcatttcatggctcacacattgaaaactggcactccatcctgaggaatggtctggttgttgcttctaatacacgattgcagctccatggtgcaatgtatggaagtggaatctatcttagtccaatgtcaagcatatcatttggttactcagggatgaacaagaaacagaaggtgtcagccaaggacgagccagcttcaagcagtaaaagcagcaatacatcacagtcacagaaaaaaggacagcaatcccaattcctgcaaagccgtaacttaaaatgcatagccttatgtgaagtgatcacctcatctgacctgcacaaacatggagagatatgggttgtccccaatactgaccatgtctgcacacgattctttttcgtctatgaagacggccaagtgggagatgcaaatattaatacacaagaaggaggcattcacaaagagatcctccgagtaattggtaatcaaactgctactggttaa

SEQ ID NO: 167015 - DNA, 615 bp, Homo sapiens
  Payload ID: 12877
  Gene Symbol: PARP8
  Gene Name: poly (ADP-ribose) polymerase family, member 8
  ENST ID: ENST00000510303
  CDS Start-End: 92-367
atcttttaggaagaccctggaacgtgccagttgattctgaccatttctcatgaacagaaacacctaggaagggagaactgggatttatttaatggggatgtgttcaaggcaagagcgaattcagaaggatatcgacgtcgtgatccagaagtccagagctgagaaggactgcctgtttgcagatttcagatactctgactccacctttacttttacctacgttggcggccccagaagtgtatcctactcagtacatgtatctgaagattacccagctattgtgaatactgccacaatgcacatggtggtggagatattgcttcaagatcctggttccgtttcctgtggatctcaaaaggattgctgaaatggataatacatatgtgtcaagttcagagaatgatgaagatgtgctagttactacagagccaataccagtaatttttcatagaatagcaacagaattaagaaaaacaaatgacattaactgttgcttatccataaaatccaaattacaaaaggaaaatggggaggaatcaagacagaatagtacagtggaggaagattctgaaggtgacaatgattccgaagaattttattacggagggcaggtaa

SEQ ID NO: 167016 - DNA, 596 bp, Homo sapiens
  Payload ID: 12877
  Gene Symbol: PARP8
  Gene Name: poly (ADP-ribose) polymerase family, member 8
  ENST ID: ENST00000513738
  CDS Start-End: 130-531
acttcgccttcagcccctgcctcggccagaggtttcatttttaactgaatatttacgaaagctggaagcgtgcgaggggggtggggtggggtggaaatagcggctgcttcttttccagggatttatttaatggggatgtgttcaaggcaagagcgaattcagaaggatatcgacgtcgtgatccagaagtccagagctgagaaggactgcctgtttgcagatttcagatactctgactccacctttacttttacctacgttggcggccccagaagcacattcctagactggcttcccagtgggtgtgagaaggctaaccagcagagaccagagctgtctgcttcctcattcacatctaggaggagcaagagacttcccacaggtagaatttcattcttgttgcccaggccgggtgcaatagcgcgatctcagctcactgcaacctccgcctcccaggttcaagtgattctcctgcctcagccttctactagctggcattacaggaattcagagcttgctccagggatgtgaggacaaaagatgagtatgacttttaaaaggaattcagaacttgctctagattttgctttcttctc

SEQ ID NO: 167017 - DNA, 513 bp, Homo sapiens
  Payload ID: 12877
  Gene Symbol: PARP8
  Gene Name: poly (ADP-ribose) polymerase family, member 8
  ENST ID: ENST00000515175
  CDS Start-End: 322-513
ggggctcgcccctcgccggcgcccgccgcccagccggtgattgctctctggctgtccccggcacctcggcccccacggccgttggtccgggcgggtgagggagaaagtgagacttggtgtcatcaccatccattgtcagaaggggaggaaattggaatccagcagcggcgagcagcagctgggcggtcacatctgggaatgcaaagccgacctccccctcctcctcctcctccccctcctcctcctcctcttctctcacccaggatcacttccgaaaccacttcgccttcagcccctgcctcggccagagggatttatttaatggggatgtgttcaaggcaagagcgaattcagaaggatatcgacgtcgtgatccagaagtccagagctgagaaggactgcctgtttgcagatttcagatactctgactccacctttacttttacctacgttggcggccccagaagggaatatggagccattgatgatgtagatattgatctgcatatcgat

SEQ ID NO: 167018 - DNA, 3825 bp, Homo sapiens
  Payload ID: 12877
  Gene Symbol: PARP8
  Gene Name: poly (ADP-ribose) polymerase family, member 8
  ENST ID: ENST00000505554
  CDS Start-End: 18-2519
agcggcggcggccgggaatggagcctgctgcgctgcgctgcgcttatttcagatactctgactccacctttacttttacctacgttggcggccccagaagtgtatcctactcagtacatgtatctgaagattacccagataatacatatgtgtcaagttcagagaatgatgaagatgtgctagttactacagagccaataccagtaatttttcatagaatagcaacagaattaagaaaaacaaatgacattaactgttgcttatccataaaatccaaattacaaaaggaaaatggggaggaatcaagacagaatagtacagtggaggaagattctgaaggtgacaatgattccgaagaattttattacggagggcaggtgaactatgatggggaactgcacaagcacccacaactggaagctgatttgtcagcagttagagagatatatgggccacatgcagtttctctcagggaatatggagccattgatgatgtagatattgatctgcatatcgatgttagctttcttgatgaggagattgctgtggcttgggaagtaattcgaacagaacctataattgttcgactacactgttcacttacacagtatttaaatggcccagtgcccactgttgatgtctttcagatttccacaaaagagcgatttggattgggacatcagctgaaaaaaatcatgcagacatttgttacacagcagtggaaacagagcaaagaaaaatccaattgcctgcacaataaaaagttgtcagagaagaaagtgaagtctcccctgcatttattttctactttgcgcaggtcgccaagttatcctccccctggttgtggcaaaagcaaatccaaactgaaatctgagcaggacggaatctccaaaacgcataagctgctgcggaggacttgttccagcacagtcaagactgatgatgtgtgtgtcacaaagtcacacaggacctttggccgctccttgtccagcgatcccagggcggagcaggctatgacagcaattaaatcgcacaaacttttgaaccgtccttgccctgcagctgttaagtcagaggaatgcctaactctaaagtcgcatagactattgactcgatcttgttctggagatccacgatgtgagcacaacacaaacttgaagccccataaactgttaagcaggtcttactctagtaatctcagaatggaagaattatatggactgaaaaatcacaaattgctcagcaagtcctactccagtgcccccaagtcatccaaaactgagcttttcaaggaacctaacgcagagggcaggaggctctctcttacctcagggcttattggtatcctaacaccatcttcatcttcatcttctcagcttgctccaaatggtgcaaaatgcattccagtacgagaccgtggcttcctggtgcagacaattgagtttgctgaacagcggatccctgtattaaatgaatattgtgtggtttgtgatgagccacatgtgtttcaaaatggccctatgcttaggcctaccgtatgtgaacgggagctgtgtgtgtttgcttttcaaaccctgggagtaatgaatgaagctgctgatgaaatagcaactggagctcaggtggtagatctactagtatccatgtgtaggtctgcgttggaatctcctagaaaagttgtgattttcgagccatatccttctgtggtagatcctaatgatcctcagatgttggccttcaaccccaggaaaaagaactatgatcgagtaatgaaagcactggatagcataacttctatcagagaaatgacacaagcaccatatctggaaatcaagaagcaaatggataaacaggacccccttgctcatcccttactgcaatgggttatatcaagtaatagatcacatattgtgaaactgccagttaacaggcaattgaagtttatgcatactccacatcagttccttcttctcagcagtccaccagccaaagaatccaattttagagctgctaaaaaactctttggaagcacctttgcatttcatggctcacacattgaaaactggcactccatcctgaggaatggtctggttgttgcttctaatacacgattgcagctccatggtgcaatgtatggaagtggaatctatcttagtccaatgtcaagcatatcatttggttactcagggatgaacaagaaacagaaggtgtcagccaaggacgagccagcttcaagcagtaaaagcagcaatacatcacagtcacagaaaaaaggacagcaatcccaattcctgcaaagccgtaacttaaaatgcatagccttatgtgaagtgatcacctcatctgacctgcacaaacatggagagatatgggttgtccccaatactgaccatgtctgcacacgattctttttcgtctatgaagacggccaagtgggagatgcaaatattaatacacaagaaggaggcattcacaaagagatcctccgagtaattggtaatcaaactgctactggttaaaggaccaccatttaattaacatgattcgaaagccttcctcgggttcaaagctggattttgaactgaagaagattataaaattatttattgttattataaacaaaattaaccctttgaatactgattttttttcttagtatttctaagtatctcattaaatacctaaaatggtataagatttatcaattgtagggttatggaatctagtaataaaatttcaacagcacttaaactgaagtttgggttgctcatacaataaacagattgaaaaaactgttttgtgctgatatttttatactaaactctttaactggatatttggtattatataccgacattttaggttaccaaaatagaattgagaacattttataatggcatctaaatctatcagatactttgcaataagtatactgtttgcacattctgatgtgctatatcattagtagtatgggcattctaatgttttggaaggggtgttccctattctatttttcttcataaaaaaagaagtaggtcttagaagcagtgctttgccaaaaagtatgtaatatacacatctatacattcatgcatcaaaatgtgtggttgtgaatatatttgtgtatattcacacgtatgttttgacaagaaagatggcttagcttcacaattctatcctcgtttaatggaaagaagataatatttagtaagcaataaatttggacataaatcaagatatgagccagatttaccaccattcattcactgaaaatatttgcagacaatttttctgtttgtctgaagaaattcagcccttttaaaatgttatctaaaagtcataatttggggaacatacatggcctggtagaccgaatctatattcaaatgattatgtatttaaaagaaagacctcagaatttaaagaaaccatatatattttttatttactacaaaaaaattatacaattttatttatgccacaccagcatttttatatttgttcatctaatatctctgcttatttttttcatattgagaaagaacacaaacttgatgcttcttttatattaaaagaccacaaataagtttatagagaacagtaacaccagctctcagcatttccttttcaagagtcataatttcatcaaaatcatttcttattctttgagtcctagagttcttattcatcaagttttaattgacagtgtttattttcccacatgttgtctttggaataaggccattcatgaaagcagtttaattagtgagtctgccactctattcaaaccctgaatcaaggctctatctgattttaatttatgta

SEQ ID NO: 167019 - DNA, 2730 bp, Homo sapiens
  Payload ID: 12877
  Gene Symbol: PARP8
  Gene Name: poly (ADP-ribose) polymerase family, member 8
  ENST ID: ENST00000515166
  CDS Start-End: 8-769
ttatttaatggggatgtgttcaaggcaagagcgaattcagaaggatatcgacgtcgtgatccagaagtccagagctgagaaggactgcctgtttgcagatttcagatactctgactccacctttacttttacctacgttggcggccccagaagtgtatcctactcagtacatgtatctgaagattacccagataatacatatgtgtcaagttcagagaatgatgaagatgtgctagttactacagagccaataccagtaatttttcatagaatagcaacagaattaagaaaaacaaatgacattaactgttgcttatccataaaatccaaattacaaaaggaaaatggggaggaatcaagacagaatagtacagtggaggaagattctgaaggtgacaatgattccgaagaattttattacggagggcaggtgaactatgatggggaactgcacaagcacccacaactggaagctgatttgtcagcagttagagagatatatgggccacatgcagtttctctcagggaatatggagccattgatgatgtagatattgatctgcatatcgatgttagctttcttgatgaggagattgctgtggcttgggaagtaattcgaacagaacctataattgttcgactacactgttcacttacacagtatttaaatggcccagaatcatgcagacatttgttacacagcagtggaaacagagcaaagaaaaatccaattgcctgcacaataaaaagttgtcagagaagaaagtgaagtctcccctgcatttattttctactttgcgcaggtcgccaagttatcctccccctggttgtggcaaaagcaaatccaaactgaaatctgagcaggacggaatctccaaaacgcataagctgctgcggaggacttgttccagcacagtcaagactgatgatgtgtgtgtcacaaagtcacacaggacctttggccgctccttgtccagcgatcccagggcggagcaggctatgacagcaattaaatcgcacaaacttttgaaccgtccttgccctgcagctgttaagtcagaggaatgcctaactctaaagtcgcatagactattgactcgatcttgttctggagatccacgatgtgagcacaacacaaacttgaagccccataaactgttaagcaggtcttactctagtaatctcagaatggaagaattatatggactgaaaaatcacaaattgctcagcaagtcctactccagtgcccccaagtcatccaaaactgagcttttcaaggaacctaacgcagagggcaggaggctctctcttacctcagggcttattggtatcctaacaccatcttcatcttcatcttctcagcttgctccaaatggtgcaaaatgcattccagtacgagaccgtggcttcctggtgcagacaattgagtttgctgaacagcggatccctgtattaaatgaatattgtgtggtttgtgatgagccacatgtgtttcaaaatggccctatgcttaggcctaccgtatgtgaacgggagctgtgtgtgtttgcttttcaaaccctgggagtaatgaatgaagctgctgatgaaatagcaactggagctcaggtggtagatctactagtatccatgtgtaggtctgcgttggaatctcctagaaaagttgtgattttcgagccatatccttctgtggtagatcctaatgatcctcagatgttggccttcaaccccaggaaaaagaactatgatcgagtaatgaaagcactggatagcataacttctatcagagaaatgacacaagcaccatatctggaaatcaagaagcaaatggataaacaggacccccttgctcatcccttactgcaatgggttatatcaagtaatagatcacatattgtgaaactgccagttaacaggcaattgaagtttatgcatactccacatcagttccttcttctcagcagtccaccagccaaagaatccaattttagagctgctaaaaaactctttggaagcacctttgcatttcatggctcacacattgaaaactggcactccatcctgaggaatggtctggttgttgcttctaatacacgattgcagctccatggtgcaatgtatggaagtggaatctatcttagtccaatgtcaagcatatcatttggttactcagggatgaacaagaaacagaaggtgtcagccaaggacgagccagcttcaagcagtaaaagcagcaatacatcacagtcacagaaaaaaggacagcaatcccaattcctgcaaagccgtaacttaaaatgcatagccttatgtgaagtgatcacctcatctgacctgcacaaacatggagagatatgggttgtccccaatactgaccatgtctgcacacgattctttttcgtctatgaagacggccaagtgggagatgcaaatattaatacacaagaaggaggcattcacaaagagatcctccgagtaattggtaatcaaactgctactggttaaaggaccaccatttaattaacatgattcgaaagccttcctcgggttcaaagctggattttgaactgaagaagattataaaattatttattgttattataaacaaaattaaccctttgaatactgattttttttcttagtatttctaagtatctcattaaatacctaaaatggtataagatttatcaattgtagggttatggaatctagtaataaaatttcaacagc

SEQ ID NO: 167020 - DNA, 2829 bp, Homo sapiens
  Payload ID: 12877
  Gene Symbol: PARP8
  Gene Name: poly (ADP-ribose) polymerase family, member 8
  Uniprot ID: Q8N3A8
  ENST ID: ENST00000514067
  CDS Start-End: 118-2556
gcccctgcctcggccagaggtttcatttttaactgaatatttacgaaagctggaagcgtgcgaggggggtggggtggggtggaaatagcggctgcttcttttccagggatttatttaatggggatgtgttcaaggcaagagcgaattcagaaggatatcgacgtcgtgatccagaagtccagagctgagaaggactgcctgtttgcagatttcagatactctgactccacctttacttttacctacgttggcggccccagaagtgtatcctactcagtacatgtatctgaagattacccagataatacatatgtgtcaagttcagagaatgatgaagatgtgctagttactacagagccaataccagtaatttttcatagaatagcaacagaattaagaaaaacaaatgacattaactgttgcttatccataaaatccaaattacaaaaggaaaatggggaggaatcaagacagaatagtacagtggaggaagattctgaaggtgacaatgattccgaagaattttattacggagggcaggtgaactatgatggggaactgcacaagcacccacaactggaagctgatttgtcagcagttagagagatatatgggccacatgcagtttctctcagggaatatggagccattgatgatgtagatattgatctgcatatcgatgttagctttcttgatgaggagattgctgtggcttgggaagtaattcgaacagaacctataattgttcgactacactgttcacttacacagtatttaaatggcccagtgcccactgttgatgtctttcagatttccacaaaagagcgatttggattgggacatcagctgaaaaaaatcatgcagacatttgttacacagcagtggaaacagagcaaagaaaaatccaattgcctgcacaataaaaagttgtcagagaagaaagtgaagtctcccctgcatttattttctactttgcgcaggtcgccaagttatcctccccctggttgtggcaaaagcaaatccaaactgaaatctgagcaggacggaatctccaaaacgcataagctgctgcggaggacttgttccagcacagtcaagactgatgatgtgtgtgtcacaaagtcacacaggacctttggccgctccttgtccagcgatcccagggcggagcaggctatgacagcaattaaatcgcacaaacttttgaaccgtccttgccctgcagctgttaagtcagaggaatgcctaactctaaagtcgcatagactattgactcgatcttgttctggagatccacgatgtgagcacaacacaaacttgaagccccataaactgttaagcaggtcttactctagtaatctcagaatggaagaattatatggactgaaaaatcacaaattgctcagcaagtcctactccagtgcccccaagtcatccaaaactgagcttttcaaggaacctaacgcagagggcaggaggctctctcttacctcagggcttattggtatcctaacaccatcttcatcttcatcttctcagcttgctccaaatggtgcaaaatgcattccagtacgagaccgtggcttcctggtgcagacaattgagtttgctgaacagcggatccctgtattaaatgaatattgtgtggtttgtgatgagccacatgtgtttcaaaatggccctatgcttaggcctaccgtatgtgaacgggagctgtgtgtgtttgcttttcaaaccctgggagtaatgaatgaagctgctgatgaaatagcaactggagctcagaaaaagaactatgatcgagtaatgaaagcactggatagcataacttctatcagagaaatgacacaagcaccatatctggaaatcaagaagcaaatggataaacaggacccccttgctcatcccttactgcaatgggttatatcaagtaatagatcacatattgtgaaactgccagttaacaggcaattgaagtttatgcatactccacatcagttccttcttctcagcagtccaccagccaaagaatccaattttagagctgctaaaaaactctttggaagcacctttgcatttcatggctcacacattgaaaactggcactccatcctgaggaatggtctggttgttgcttctaatacacgattgcagctccatggtgcaatgtatggaagtggaatctatcttagtccaatgtcaagcatatcatttggttactcagggatgaacaagaaacagaaggtgtcagccaaggacgagccagcttcaagcagtaaaagcagcaatacatcacagtcacagaaaaaaggacagcaatcccaattcctgcaaagccgtaacttaaaatgcatagccttatgtgaagtgatcacctcatctgacctgcacaaacatggagagatatgggttgtccccaatactgaccatgtctgcacacgattctttttcgtctatgaagacggccaagtgggagatgcaaatattaatacacaagaaggaggcattcacaaagagatcctccgagtaattggtaatcaaactgctactggttaaaggaccaccatttaattaacatgattcgaaagccttcctcgggttcaaagctggattttgaactgaagaagattataaaattatttattgttattataaacaaaattaaccctttgaatactgattttttttcttagtatttctaagtatctcattaaatacctaaaatggtataagatttatcaattgtagggttatggaatctagtaataaaatttcaacagcacttaaactgaagtttgggttgctcatacaataaacagattgaaaaaa

SEQ ID NO: 167021 - DNA, 574 bp, Homo sapiens
  Payload ID: 12877
  Gene Symbol: PARP8
  Gene Name: poly (ADP-ribose) polymerase family, member 8
  ENST ID: ENST00000503193
  CDS Start-End: 93-266
tttttaactgaatatttacgaaagctggaagcgtgcgaggggggtggggtggggtggaaatagcggctgcttcttttccagggatttatttaatggggatgtgttcaaggcaagagcgaattcagaaggatatcgacgtcgtgatccagaagtccagagctgagaaggactgcctgtttgcagtgtatcctactcagtacatgtatctgaagattacccagataatacatatgtgtcaagttcagagaatgatgaagatgtgctagttactacagagccaataccagtaatttttcatagaatagcaacagaattaagaaaaacaaatgacattaactgttgcttatccataaaatccaaattacaaaaggaaaatggggaggaatcaagacagaatagtacagtggaggaagattctgaaggtgacaatgattccgaagaattttattacggagggcaggtgaactatgatggggaactgcacaagcacccacaactggaagctgatttgtcagcagttagagagatatatgggccacatgcagtttctctcaggtaaataagtatcactggt

SEQ ID NO: 167022 - DNA, 332 bp, Homo sapiens
  Payload ID: 12877
  Gene Symbol: PARP8
  Gene Name: poly (ADP-ribose) polymerase family, member 8
  ENST ID: ENST00000502524
  CDS Start-End: 101-332
ataaaagtgatggggggaggggcgcggagagggaaggctgggagccccagggagtcttcacgaccgctcagctcccggcgcgagtggagggatttatttaatggggatgtgttcaaggcaagagcgaattcagaaggatatcgacgtcgtgatccagaagtccagagctgagaaggactgcctgtttgcagatttcagatactctgactccacctttacttttacctacgttggcggccccagaagtgtatcctactcagtacatgtatctgaagattacccagataatacatatgtgtcaagttcagagaatgatgaagatgtgctagtta

SEQ ID NO: 167023 - DNA, 576 bp, Homo sapiens
  Payload ID: 12877
  Gene Symbol: PARP8
  Gene Name: poly (ADP-ribose) polymerase family, member 8
  ENST ID: ENST00000503707
  CDS Start-End: 130-420
acttcgccttcagcccctgcctcggccagaggtttcatttttaactgaatatttacgaaagctggaagcgtgcgaggggggtggggtggggtggaaatagcggctgcttcttttccagggatttatttaatggggatgtgttcaaggcaagagcgaattcagaaggatatcgacgtcgtgatccagaagtccagagctgagaaggactgcctgtttgcagatttcagatactctgactccacctttacttttacctacgttggcggccccagaagtgtatcctactcagtacatgtatctgaagattacccagataatacatatgtgtcaagttcagagaatgatgaagatgtgctagttactacagagccaataccagtaatttttcatagaatagcaacaggaatcaagacagaatagtacagtggaggaagattctgaaggtgacaatgattccgaagaattttattacggagggcaggtgaactatgatggggaactgcacaagcacccacaactggaagctgatttgtcagcagttagagagatatatgggccacatgcagtttctctcag

SEQ ID NO: 167024 - DNA, 572 bp, Homo sapiens
  Payload ID: 12877
  Gene Symbol: PARP8
  Gene Name: poly (ADP-ribose) polymerase family, member 8
  ENST ID: ENST00000503665
  CDS Start-End: 130-303
acttcgccttcagcccctgcctcggccagaggtttcatttttaactgaatatttacgaaagctggaagcgtgcgaggggggtggggtggggtggaaatagcggctgcttcttttccagggatttatttaatggggatgtgttcaaggcaagagcgaattcagaaggatatcgacgtcgtgatccagaagtccagagctgagaaggactgcctgtttgcagatttcagatactctgactccacctttacttttacctacgttggcggccccagaaggaattcagagcttgctccagggatgtgaggacaaaagatgagtatgacttttaaaaggaattcagaacttgctctagattttgctttcttctcatgtccaccttctttcactttcacttatgcttcttgacaatattttctgcctgctacatggcatttattatgtacagcacatactaacagtactctgcaatctacttaagctttgttctttccacgtttttttggtactactcattagatccttgagccaatcatccatgtctgtttgtactagattgtttcccttagaactct

SEQ ID NO: 167025 - DNA, 2384 bp, Homo sapiens
  Payload ID: 12877
  Gene Symbol: PARP8
  Gene Name: poly (ADP-ribose) polymerase family, member 8
  ENST ID: ENST00000514342
  CDS Start-End: 900-2384
ttctctcacccaggatcacttccgaaaccacttcgccttcagcccctgcctcggccagaggtttcatttttaactgaatatttacgaaagctggaagcgtgcgaggggggtggggtggggtggaaatagcggctgcttcttttccagggatttatttaatggggatgtgttcaaggcaagagcgaattcagaaggatatcgacgtcgtgatccagaagtccagagctgagaaggactgcctgtttgcagatttcagatactctgactccacctttacttttacctacgttggcggccccagaagtgtatcctactcagtacatgtatctgaagattacccagataatacatatgtgtcaagttcagagaatgatgaagatgtgctagttactacagagccaataccagtaatttttcatagaatagcaacagaattaagaaaaacaaatgacattaactgttgcttatccataaaatccaaattacaaaaggaaaatggggaggaatcaagacagaatagtacagtggaggaagattctgaaggtgacaatgattccgaagaattttattacggagggcaggtgaactatgatggggaactgcacaagcacccacaactggaagctgatttgtcagcagttagagagatatatgggccacatgcagtttctctcagggaatatggagccattgatgatgtagatattgatctgcatatcgatgttagctttcttgatgaggagattgctgtggcttgggaagtaattcgaacagaacctataattgttcgactacactgttcacttacacagtatttaaatggcccagtgcccactgttgatgtctttcagatttccacaaaagagcgatttggattgggacatcagctgaaaaaaatcatgcagacatttgttacacagcagtggaaacagagcaaagaaaaatccaattgcctgcacaataaaaagttgtcagagaagaaagtgaagtctcccctgcatttattttctactttgcgcaggtcgccaagttatcctccccctggttgtggcaaaagcaaatccaaactgaaatctgagcaggacggaatctccaaaacgcataagctgctgcggaggacttgttccagcacagtcaagactgatgatgtgtgtgtcacaaagtcacacaggacctttggccgctccttgtccagcgatcccagggcggagcaggctatgacagcaattaaatcgcacaaacttttgaaccgtccttgccctgcagctgttaagtcagaggaatgcctaactctaaagtcgcatagactattgactcgatcttgttctggagatccacgatgtgagcacaacacaaacttgaagccccataaactgttaagcaggtcttactctagtaatctcagaatggaagaattatatggactgaaaaatcacaaattgctcagcaagtcctactccagtgcccccaagtcatccaaaactgagcttttcaaggaacctaacgcagagggcaggaggctctctcttacctcagggcttattggtatcctaacaccatcttcatcttcatcttctcagcttgctccaaatggtgcaaaatgcattccagtacgagaccgtggcttcctggtgcagacaattgagtttgctgaacagcggatccctgtattaaatgaatattgtgtggtttgtgatgagccacatgtgtttcaaaatggccctatgcttaggcctaccgtatgtgaacgggagctgtgtgtgtttgcttttcaaaccctgggagtaatgaatgaagctgctgatgaaatagcaactggagctcagaaaaagaactatgatcgagtaatgaaagcactggatagcataacttctatcagagaaatgacacaagcaccatatctggaaatcaagaagcaaatggataaacaggacccccttgctcatcccttactgcaatgggttatatcaagtaatagatcacatattgtgaaactgccagttaacaggcaattgaagtttatgcatactccacatcagttccttcttctcagcagtccaccagccaaagaatccaattttagagctgctaaaaaactctttggaagcacctttgcatttcatggctcacacattgaaaactggcactccatcctgaggaatggtctggttgttgcttctaatacacgattgcagctccatggtgcaatgtatggaagtggaatctatcttagtccaatgtcaagcatatcatttggttactcagggatgaacaagaaacagaaggtgtcagccaaggacgagccagcttcaagcagtaaaagcagcaatacatcacagaaaacaaaaaaaaggacagcaatcccaattcctgcaaagccgtaa

SEQ ID NO: 167026 - DNA, 2809 bp, Homo sapiens
  Payload ID: 12877
  Gene Symbol: PARP8
  Gene Name: poly (ADP-ribose) polymerase family, member 8
  ENST ID: ENST00000503750
  CDS Start-End: 758-2239
agtcgggggcgcgccgcatcccctcggacgcggcgcagagggacctcgccgccctctagcccttgccttctgcccggccaggcctcccctgacaccaccgaatgtggggctcaagtcctgatcggggttaaaacaaatccactccaggggtagcttttgacgggactttctgtttcagatttcagatactctgactccacctttacttttacctacgttggcggccccagaagtgtatcctactcagtacatgtatctgaagattacccagataatacatatgtgtcaagttcagagaatgatgaagatgtgctagttactacagagccaataccagtaatttttcatagaatagcaacaggaatcaagacagaatagtacagtggaggaagattctgaaggtgacaatgattccgaagaattttattacggagggcaggtgaactatgatggggaactgcacaagcacccacaactggaagctgatttgtcagcagttagagagatatatgggccacatgcagtttctctcagggaatatggagccattgatgatgtagatattgatctgcatatcgatgttagctttcttgatgaggagattgctgtggcttgggaagtaattcgaacagaacctataattgttcgactacactgttcacttacacagtatttaaatggcccagtgcccactgttgatgtctttcagatttccacaaaagagcgatttggattgggacatcagctgaaaaaaatcatgcagacatttgttacacagcagtggaaacagagcaaagaaaaatccaattgcctgcacaataaaaagttgtcagagaagaaagtgaagtctcccctgcatttattttctactttgcgcaggtcgccaagttatcctccccctggttgtggcaaaagcaaatccaaactgaaatctgagcaggacggaatctccaaaacgcataagctgctgcggaggacttgttccagcacagtcaagactgatgatgtgtgtgtcacaaagtcacacaggacctttggccgctccttgtccagcgatcccagggcggagcaggctatgacagcaattaaatcgcacaaacttttgaaccgtccttgccctgcagctgttaagtcagaggaatgcctaactctaaagtcgcatagactattgactcgatcttgttctggagatccacgatgtgagcacaacacaaacttgaagccccataaactgttaagcaggtcttactctagtaatctcagaatggaagaattatatggactgaaaaatcacaaattgctcagcaagtcctactccagtgcccccaagtcatccaaaactgagcttttcaaggaacctaacgcagagggcaggaggctctctcttacctcagggcttattggtatcctaacaccatcttcatcttcatcttctcagcttgctccaaatggtgcaaaatgcattccagtacgagaccgtggcttcctggtgcagacaattgagtttgctgaacagcggatccctgtattaaatgaatattgtgtggtttgtgatgagccacatgtgtttcaaaatggccctatgcttaggcctaccgtatgtgaacgggagctgtgtgtgtttgcttttcaaaccctgggagtaatgaatgaagctgctgatgaaatagcaactggagctcagaaaaagaactatgatcgagtaatgaaagcactggatagcataacttctatcagagaaatgacacaagcaccatatctggaaatcaagaagcaaatggataaacaggacccccttgctcatcccttactgcaatgggttatatcaagtaatagatcacatattgtgaaactgccagttaacaggcaattgaagtttatgcatactccacatcagttccttcttctcagcagtccaccagccaaagaatccaattttagagctgctaaaaaactctttggaagcacctttgcatttcatggctcacacattgaaaactggcactccatcctgaggaatggtctggttgttgcttctaatacacgattgcagctccatggtgcaatgtatggaagtggaatctatcttagtccaatgtcaagcatatcatttggttactcagggatgaacaagaaacagaaggtgtcagccaaggacgagccagcttcaagcagtaaaagcagcaatacatcacagtcacagaaaaggacagcaatcccaattcctgcaaagccgtaacttaaaatgcatagccttatgtgaagatttcaacgagaagagatatattaagtcggaatggactaggattcctttagaataaagtggttctttaattttattttccacttaacagtgatcacctcatctgacctgcacaaacatggagagatatgggttgtccccaatactgaccatgtctgcacacgattctttttcgtctatgaagacggccaagtgggagatgcaaatattaatacacaagaaggaggcattcacaaagagatcctccgagtaattggtaatcaaactgctactggttaaaggaccaccatttaattaacatgattcgaaagccttcctcgggttcaaagctggattttgaactgaagaagattataaaattatttattgttattataaacaaaattaaccctttgaatactgattttttttcttagtatttctaagtatctcattaaatacctaaaatggtataagatttatcaattgtagggttatggaatctagtaataaaatttcaacagcacttaaactgaagtttgggttgctcatacaataaacagattg

SEQ ID NO: 167027 - DNA, 3198 bp, Homo sapiens
  Payload ID: 12878
  Gene Symbol: PARP9
  Gene Name: poly (ADP-ribose) polymerase family, member 9
  Uniprot ID: Q8IXQ6
  ENST ID: ENST00000360356
  CDS Start-End: 229-2793
gggcttcgtgttcctgggtgctgaccgtgcactccccgccgcccgaggacttagagctctggaagtagctctccagcttccttcgtactcgggggccggacttgtacacccgcacgaggagcggggacggcgggcgcagaagtgggccaccatatctggaaactacagtctatgctttgaagcgcaaaagggaataaacatttaaagactcccccggggacctggaggatggacttttccatggtggccggagcagcagcttacaatgaaaaatcaggtaggattacctcgctctcactcttgtttcagaaagtctttgctcagatctttcctcagtggagaaaggggaatacagaagaatgtctcccctacaagtgctcagagactggtgctcttggagaaaactatagttggcaaattcccattaaccacaatgacttcaaaattttaaaaaataatgagcgtcagctgtgtgaagtcctccagaataagtttggctgtatctctaccctggtctctccagttcaggaaggcaacagcaaatctctgcaagtgttcagaaaaatgctgactcctaggatagagttatcagtctggaaagatgacctcaccacacatgctgttgatgctgtggtgaatgcagccaatgaagatcttctgcatgggggaggcctggccctggccctggtaaaagctggtggatttgaaatccaagaagagagcaaacagtttgttgccagatatggtaaagtgtcagctggtgagatagctgtcacgggagcagggaggcttccctgcaaacagatcatccatgctgttgggcctcggtggatggaatgggataaacagggatgtactggaaagctgcagagggccattgtaagtattctgaattatgtcatctataaaaatactcacattaagacagtagcaattccagccttgagctctgggatttttcagttccctctgaatttgtgtacaaagactattgtagagactatccgggttagtttgcaagggaagccaatgatgagtaatttgaaagaaattcacctggtgagcaatgaggaccctactgttgctgcctttaaagctgcttcagaattcatcctagggaagagtgagctgggacaagaaaccaccccttctttcaatgcaatggtcgtgaacaacctgaccctccagattgtccagggccacattgaatggcagacggcagatgtaattgttaattctgtaaacccacatgatattacagttggacctgtggcaaagtcaattctacaacaagcaggagttgaaatgaaatcggaatttcttgccacaaaggctaaacagtttcaacggtcccagttggtactggtcacaaaaggatttaacttgttctgtaaatatatataccatgtactgtggcattcagaatttcctaaacctcagatattaaaacatgcaatgaaggagtgtttggaaaaatgcattgagcaaaatataacttccatttcctttcctgcccttgggactggaaacatggaaataaagaaggaaacagcagcagagattttgtttgatgaagttttaacatttgccaaagaccatgtaaaacaccagttaactgtaaaatttgtgatctttccaacagatttggagatatataaggctttcagttctgaaatggcaaagaggtccaagatgctgagtttgaacaattacagtgtcccccagtcaaccagagaggagaaaagagaaaatgggcttgaagctagatctcctgccatcaatctgatgggattcaacgtggaagagatgtatgaggcccacgcatggatccaaagaatcctgagtctccagaaccaccacatcattgagaataatcatattctgtaccttgggagaaaggaacatgacattttgtctcagcttcagaaaacttcaagtgtctccatcacagaaattatcagcccaggaaggacagagttagagattgaaggagcccgggctgacctcattgaggtggttatgaacattgaagatatgctttgtaaagtacaggaggaaatggcaaggaaaaaggagcgaggcctttggcgctcgttaggacagtggactattcagcaacaaaaaacccaagacgaaatgaaagaaaatatcatatttctgaaatgtcctgtgcctccaactcaagagcttctagatcaaaagaaacagtttgaaaaatgtggtttgcaggttctaaaggtggagaagatagacaatgaggtccttatggctgcctttcaaagaaagaagaaaatgatggaagaaaaactgcacaggcaacctgtgagccataggctgtttcagcaagtcccataccagttctgcaatgtggtatgcagagttggctttcaaagaatgtactcgacaccttgcgatccaaaatacggagctggcatatacttcaccaagaacctcaaaaacctggcagagaaggccaagaaaatctctgctgcagataagctgatctatgtgtttgaggctgaagtactcacaggcttcttctgccagggacatccgttaaatattgttcccccaccactgagtcctggagctatagatggtcatgacagtgtggttgacaatgtctccagccctgaaacctttgttatttttagtggcatgcaggctatacctcagtatttgtggacatgcacccaggaatatgtacagtcacaagattactcatcaggaccaatgagaccctttgcacagcatccttggaggggattcgcaagtggcagccctgttgattaatctctacatcattttaacagctggtatggccttaccttgggtgaactaaccaaataatgaccatcgatggctcaaagagtggcttgaatatatcccatgggttatctgtatggactgactgggttattgaaaggactagccacatactagcatcttagtgcctttatctgtctttatgtcttggggttggggtaggtagataccaaatgaaacactttcaggaccttccttcctcttgcagttgttctttaatctcctttactagaggagataaatattttgcatataatgaagaaatttttctagtatataacgcaggccttttattttctaaaatgatgatagtataaaaatgttaggataacagaatgattttagattttccagagaatattataaagtgct

SEQ ID NO: 167028 - DNA, 1837 bp, Homo sapiens
  Payload ID: 12878
  Gene Symbol: PARP9
  Gene Name: poly (ADP-ribose) polymerase family, member 9
  ENST ID: ENST00000492382
  CDS Start-End: 233-1432
gcctgccgggtgagtaggtccggtgcctctgggccctcggggtcccctctcctgcaggctcgaggtgggcggggagaagggggacgggcgcggacccgggtcccagggccaggcctcccttgtgagtagactatgcaaagaaaaagtgggccaccatatctggaaactacagtctatgctttgaagcgcaaaagggaataaacatttaaagactcccccggggacctggaggatggacttttccatggtggccggagcagcagcttacaatgaaaaatcagatttggagatatataaggctttcagttctgaaatggcaaagaggtccaagatgctgagtttgaacaattacagtgtcccccagtcaaccagagaggagaaaagagaaaatgggcttgaagctagatctcctgccatcaatctgatgggattcaacgtggaagagatgtatgaggcccacgcatggatccaaagaatcctgagtctccagaaccaccacatcattgagaataatcatattctgtaccttgggagaaaggaacatgacattttgtctcagcttcagaaaacttcaagtgtctccatcacagaaattatcagcccaggaaggacagagttagagattgaaggagcccgggctgacctcattgaggtggttatgaacattgaagatatgctttgtaaagtacaggaggaaatggcaaggaaaaaggagcgaggcctttggcgctcgttaggacagtggactattcagcaacaaaaaacccaagacgaaatgaaagaaaatatcatatttctgaaatgtcctgtgcctccaactcaagagcttctagatcaaaagaaacagtttgaaaaatgtggtttgcaggttctaaaggtggagaagatagacaatgaggtccttatggctgcctttcaaagaaagaagaaaatgatggaagaaaaactgcacaggcaacctgtgagccataggctgtttcagcaagtcccataccagttctgcaatgtggtatgcagagttggctttcaaagaatgtactcgacaccttgcgatccaaaatacggagctggcatatacttcaccaagaacctcaaaaacctggcagagaaggccaagaaaatctctgctgcagataagctgatctatgtgtttgaggctgaagtactcacaggcttcttctgccagggacatccgttaaatattgttcccccaccactgagtcctggagctatagatggtcatgacagtgtggttgacaatgtctccagccctgaaacctttgttatttttagtggcatgcaggctatacctcagtatttgtggacatgcacccaggaatatgtacagtcacaagattactcatcaggaccaatgagaccctttgcacagcatccttggaggggattcgcaagtggcagccctgttgattaatctctacatcattttaacagctggtatggccttaccttgggtgaactaaccaaataatgaccatcgatggctcaaagagtggcttgaatatatcccatgggttatctgtatggactgactgggttattgaaaggactagccacatactagcatcttagtgcctttatctgtctttatgtcttggggttggggtaggtagataccaaatgaaacactttcaggaccttccttcctcttgcagttgttctttaatctcctttactagaggagataaatattttgcatataatgaagaaatttttctagtatataacgcaggccttttattttctaaaatgatgatagtataaaaatgttaggataacagaatgattttagattttccagagaatattataaagtgct

SEQ ID NO: 167029 - DNA, 6769 bp, Homo sapiens
  Payload ID: 12878
  Gene Symbol: PARP9
  Gene Name: poly (ADP-ribose) polymerase family, member 9
  Uniprot ID: Q8IXQ6
  ENST ID: ENST00000462315
  CDS Start-End: 295-2427
ctccctgttcccggcagagccgcttccccctcctccctgtgctgtctgcaccgaggagagcggcctgccgggtgagtaggtccggtgcctctgggccctcggggtcccctctcctgcaggctcgaggtgggcggggagaagggggacgggcgcggacccgggtcccagggccaggcctcccttgtgagtagactatgcaaagaaaaagtgggccaccatatctggaaactacagtctatgctttgaagcgcaaaagggaataaacatttaaagactcccccggggacctggaggatggacttttccatggtggccggagcagcagcttacaatgaaaaatcagagactggtgctcttggagaaaactatagttggcaaattcccattaaccacaatgacttcaaaattttaaaaaataatgagcgtcagctgtgtgaagtcctccagaataagtttggctgtatctctaccctggtctctccagttcaggaaggcaacagcaaatctctgcaagtgttcagaaaaatgctgactcctaggatagagttatcagtctggaaagatgacctcaccacacatgctgttgatgctgtggtgaatgcagccaatgaagatcttctgcatgggggaggcctggccctggccctggtaaaagctggtggatttgaaatccaagaagagagcaaacagtttgttgccagatatggtaaagtgtcagctggtgagatagctgtcacgggagcagggaggcttccctgcaaacagatcatccatgctgttgggcctcggtggatggaatgggataaacagggatgtactggaaagctgcagagggccattgtaagtattctgaattatgtcatctataaaaatactcacattaagacagtagcaattccagccttgagctctgggatttttcagttccctctgaatttgtgtacaaagactattgtagagactatccgggttagtttgcaagggaagccaatgatgagtaatttgaaagaaattcacctggtgagcaatgaggaccctactgttgctgcctttaaagctgcttcagaattcatcctagggaagagtgagctgggacaagaaaccaccccttctttcaatgcaatggtcgtgaacaacctgaccctccagattgtccagggccacattgaatggcagacggcagatgtaattgttaattctgtaaacccacatgatattacagttggacctgtggcaaagtcaattctacaacaagcaggagttgaaatgaaatcggaatttcttgccacaaaggctaaacagtttcaacggtcccagttggtactggtcacaaaaggatttaacttgttctgtaaatatatataccatgtactgtggcattcagaatttcctaaacctcagatattaaaacatgcaatgaaggagtgtttggaaaaatgcattgagcaaaatataacttccatttcctttcctgcccttgggactggaaacatggaaataaagaaggaaacagcagcagagattttgtttgatgaagttttaacatttgccaaagaccatgtaaaacaccagttaactgtaaaatttgtgatctttccaacagatttggagatatataaggctttcagttctgaaatggcaaagaggtccaagatgctgagtttgaacaattacagtgtcccccagtcaaccagagaggagaaaagagaaaatgggcttgaagctagatctcctgccatcaatctgatgggattcaacgtggaagagatgtatgaggcccacgcatggatccaaagaatcctgagtctccagaaccaccacatcattgagaataatcatattctgtaccttgggagaaaggaacatgacattttgtctcagcttcagaaaacttcaagtgtctccatcacagaaattatcagcccaggaaggacagagttagagattgaaggagcccgggctgacctcattgaggtggttatgaacattgaagatatgctttgtaaagtacaggaggaaatggcaaggaaaaaggagcgaggcctttggcgctcgttaggacagtggactattcagcaacaaaaaacccaagacgaaatgaaagaaaatatcatatttctgaaatgtcctgtgcctccaactcaagagcttctagatcaaaagaaacagtttgaaaaatgtggtttgcaggttctaaaggtggagaagatagacaatgaggtccttatggctgcctttcaaagaaagaagaaaatgatggaagaaaaactgcacaggcaacctgtgagccataggctgtttcagcaagtcccataccagttctgcaatgtggtatgcagagttggctttcaaagaatgtactcgacaccttgcggtaggtgtcaatgcctcatcattggggctactctgtggaatttggtgagctgacatcagtagattcttccactgatagcatttgttgttgtggggaagggatcatttgtgactgtgatttagaggtcacaaatgatgacccaggtcacaaagtattttggaaagagtggtattttttacttttccttcgtatcttttgttgctgatgcattttacattgatgaaaagtgtgagcagtaagaactacggttcactgtttttctcctttatgtgtttctgtgtcctatccgcagagaacacgttgaggctttttttttttttttttgccttacttatctcaacaaaattattaccaacagcactgaaccgtcctcatcccttaattaaaagggcattttcccaaatttaagaaagttggtcttttctctttcatccctttgtttcctatagcctgctagtgaatgaattaggtatcatttggcaggtgaagtgcataacatcttaagatcctcttcatccataggagttctatgtgtaactcccatgtctcttttcagatgtacaaaaacattgcatatataattcttatattgccccctctactcctcagtcactaatgaagatttctggctttagttctctccaaaagaggaaaagaaatttagtaaaaattatggagagatacttagcggggtggcttgattttgcttggtctattaaatatgtggctcttgatctttatctttcaacatatgtagcatgatccttgctgaggagtcaattccaatagacttggtttctaggatgcaaaggctctagaaatcatcttttctttgttctggagagaacataggcaaaacttggggtaaatgttgaacatagacaattactggggataaaaatagagaaatgaatccctaccaagaagccttttggggcaatcaggaaagtgatgatcagtatagtcccttcattagcaaagtcttaaaaaatctataatttccatttgctcctaaagctggcttctctgcaatccccacccactacttctacttaaattactttcattaagatcatcgctgtgctcttactttccaaatctagtgagtattctcttttcagtcctgtgacagactctgctacttgcctacccaacatctatacacatctttcttactaaaacatctaagacacccactatcctcccaaggaatatggtcccaaggtcttagccagactcatcatcagctcaagttcaggcagttctctctttatttatttatttatttttctgagacggagtcttgctctgtcactcaggctggagtgcagtggcaccatcttggctcactgcaacctccgcctccgagattcaaacagttctcctgcctcagcctcccaggtagctgggattacaggcatgtgccaccacgtgcagttaatttttgtattttttttagtagagacgaggtttcatcatgttggccaggctgatctccagctactcgtgatccgtccacctcagcctcccaaagtgttgggcttacaggtatgagccaccatgcccagcaggcagttctctcttaaagcttaaaggcaagatactgcccccaacatactcattatatagtgatataaaaaggagcgggaaaactgcaatgaaaactctcatgttgaaaggggagaagcaaaacacacaacagccactggctcacaccacttatctacatgctgccgaacaggtatagagaggactccctattccatgttgtaaaacctttattttgcactctgggaaaatcttccttatatattgtggcccttggctatttccaggttcattgcctatcagggagccatggattttctcacaggctagaatgtgctcaggctgttgcaaccaggcttgtggtttcttcagcaatacagttcctttaaaaattcagtgggcacgaggcctaatttcttctggttaagtttatgtctttataacctaaccacagatcttgtctccatatagtctttcaactcaagattttggtctcttacctgctgtctgtgtgctctgcccttctccctatcccttagcttaacagccactgccttgaggcaattcagacatgactcataatgtgacctgcaccaattgactcatctctgtaggctagagagaactcttaacagaaggtgccagacaagcccaggagacaccaatcttgctaccactgaagctgttgttatttggagtacaaaagctcttagctttttcagccgtgcaatattccaaattataggactctcagtcaatttagatggccacccacaggcaaaggagacagaacttctgttaacaaacctttattttcttttttctatttatgtttgcattccaaccagttctgaataaatctcttgcttgtaggacttggttgagtgcagcaagaaggcatctacacatgcagtttcttactgggttgattcatttgttccacaggtatttattaagcacattctatgaatcaggccctgtgctaggggtactagaaatagagtgtaaataaaaaaccatagagttcttgcccttacaatttataatctcacgagttcacctgttgcccattctttatcttctctcttttttcctctacgatgtcccccttggtgatggcacctgttcccatggcctcaactcctacctcaatgatgacgacttaggaatttctaactcttaactccctacctctctcctgacctgcaggttcatatgtctcactctctttttgacatctttacccagatgtcccataggtaactcaaattgatcccttttcttggtcatgattttccctaagaaatatgccctttgtttgctgattctccctaacctggttagtatcatcaccatctacctaccaggtttcctaaggctgaaacattatcatcctccattcctccttttccctcacccttatacccaggcattcacccagtcctagtgattcactctcatgaagatctcagcccagtttcacctctctattcctactgccttagttaatcttccttcagacctagactattactaggtcctctccttgccacaaaacacacccctacctaatctatcctttaccaccagaattatcacgctaaaaattacattcttgcttaatatctgtattcccagttgcctacgggataaaagcccaaactccttagcagagaatataaggccctagctcccacattatttcagcagtcatcacccactatgttcctcaagactgcagccattaactttttagagttccctaaacatgctgtttactttcatgcctctatcccgttgtctgtggaatgacttccctccttgcccttttcagtgctacaaacccctattctttaagacatagtacaaatggcatctcctggttggcatctttcctgcaggcctacaggcctagtaagtatcttcctcctctgtgctcctgcatacctccattcctttgttatgacatctataactttaataagtactaaaatctgtagtcctacaaaactcaggcatagaactcatttcctttatggctctataatggaactttacccaactctcacgttccccatgaccacagatgtggaaaatttgaatcttgacagttcaaggtgaactcagtcattttcagagttttcatagtcccttcaagattgaaactcagttcctgcaatgtttgccccttttctcctcttttgtctatgctgggagaggcattgtggggagggttgtctggcttatggctcccattgtcctctgcttgataaaccacctgagctttggtcattagcagtctcctgtgcctttcacactcaggtagtgtctgcacaggccactctatgtcttttccatgctgaagaaattcctttccaggccatgtctgtgttcctcctgccacacaggaaatttttgagcatgttcatcctccaagctgaatgcagggtcttgggtagtggtcctcacctgctccagagacttctccagccattgccactctccactcaggtgatgaagctggatgagggactgcacccaccagagtcaggccagggtcctgtctgctctgtgagtccctccaattgttcttattccgagatttccattgttctgccccctcttgactcccagggctctcaagggagtgggggtagtgaagggagccctttcccaagctcccccaagagctctagtcacatcacttctgatacttcttttcccaccagctggaagaaagaactttcatttgtcttgaaatgagaaaaatgttcttagaatattttgtattactctctgctctgtcatttatggtaaacaaaataaaataataaaaaaaaacaaccc

SEQ ID NO: 167030 - DNA, 3040 bp, Homo sapiens
  Payload ID: 12878
  Gene Symbol: PARP9
  Gene Name: poly (ADP-ribose) polymerase family, member 9
  Uniprot ID: Q8IXQ6
  ENST ID: ENST00000471785
  CDS Start-End: 222-2681
gagtaggtccggtgcctctgggccctcggggtcccctctcctgcaggctcgaggtgggcggggagaagggggacgggcgcggacccgggtcccagggccaggcctcccttgtgagtagactatgcaaagaaaaagtgggccaccatatctggaaactacagtctatgctttgaagcgcaaaagggaataaacatttaaagactcccccggggacctggaggatggacttttccatggtggccggagcagcagcttacaatgaaaaatcagagactggtgctcttggagaaaactatagttggcaaattcccattaaccacaatgacttcaaaattttaaaaaataatgagcgtcagctgtgtgaagtcctccagaataagtttggctgtatctctaccctggtctctccagttcaggaaggcaacagcaaatctctgcaagtgttcagaaaaatgctgactcctaggatagagttatcagtctggaaagatgacctcaccacacatgctgttgatgctgtggtgaatgcagccaatgaagatcttctgcatgggggaggcctggccctggccctggtaaaagctggtggatttgaaatccaagaagagagcaaacagtttgttgccagatatggtaaagtgtcagctggtgagatagctgtcacgggagcagggaggcttccctgcaaacagatcatccatgctgttgggcctcggtggatggaatgggataaacagggatgtactggaaagctgcagagggccattgtaagtattctgaattatgtcatctataaaaatactcacattaagacagtagcaattccagccttgagctctgggatttttcagttccctctgaatttgtgtacaaagactattgtagagactatccgggttagtttgcaagggaagccaatgatgagtaatttgaaagaaattcacctggtgagcaatgaggaccctactgttgctgcctttaaagctgcttcagaattcatcctagggaagagtgagctgggacaagaaaccaccccttctttcaatgcaatggtcgtgaacaacctgaccctccagattgtccagggccacattgaatggcagacggcagatgtaattgttaattctgtaaacccacatgatattacagttggacctgtggcaaagtcaattctacaacaagcaggagttgaaatgaaatcggaatttcttgccacaaaggctaaacagtttcaacggtcccagttggtactggtcacaaaaggatttaacttgttctgtaaatatatataccatgtactgtggcattcagaatttcctaaacctcagatattaaaacatgcaatgaaggagtgtttggaaaaatgcattgagcaaaatataacttccatttcctttcctgcccttgggactggaaacatggaaataaagaaggaaacagcagcagagattttgtttgatgaagttttaacatttgccaaagaccatgtaaaacaccagttaactgtaaaatttgtgatctttccaacagatttggagatatataaggctttcagttctgaaatggcaaagaggtccaagatgctgagtttgaacaattacagtgtcccccagtcaaccagagaggagaaaagagaaaatgggcttgaagctagatctcctgccatcaatctgatgggattcaacgtggaagagatgtatgaggcccacgcatggatccaaagaatcctgagtctccagaaccaccacatcattgagaataatcatattctgtaccttgggagaaaggaacatgacattttgtctcagcttcagaaaacttcaagtgtctccatcacagaaattatcagcccaggaaggacagagttagagattgaaggagcccgggctgacctcattgaggtggttatgaacattgaagatatgctttgtaaagtacaggaggaaatggcaaggaaaaaggagcgaggcctttggcgctcgttaggacagtggactattcagcaacaaaaaacccaagacgaaatgaaagaaaatatcatatttctgaaatgtcctgtgcctccaactcaagagcttctagatcaaaagaaacagtttgaaaaatgtggtttgcaggttctaaaggtggagaagatagacaatgaggtccttatggctgcctttcaaagaaagaagaaaatgatggaagaaaaactgcacaggcaacctgtgagccataggctgtttcagcaagtcccataccagttctgcaatgtggtatgcagagttggctttcaaagaatgtactcgacaccttgcgatccaaaatacggagctggcatatacttcaccaagaacctcaaaaacctggcagagaaggccaagaaaatctctgctgcagataagctgatctatgtgtttgaggctgaagtactcacaggcttcttctgccagggacatccgttaaatattgttcccccaccactgagtcctggagctatagatggtcatgacagtgtggttgacaatgtctccagccctgaaacctttgttatttttagtggcatgcaggctatacctcagtatttgtggacatgcacccaggaatatgtacagtcacaagattactcatcaggaccaatgagaccctttgcacagcatccttggaggggattcgcaagtggcagccctgttgattaatctctacatcattttaacagctggtatggccttaccttgggtgaactaaccaaataatgaccatcgatggctcaaagagtggcttgaatatatcccatgggttatctgtatggactgactgggttattgaaaggactagccacatactagcatcttagtgcctttatctgtctttatgtcttggggttggggtaggtagataccaaatgaaacactttcaggaccttccttcctcttgcagttgttctttaatctcctttactagaggagataaatattttgcatataatgaagaaatttttctagtatataacgcaggccttttattttctaaaatgatgatagtataaaaatgttag

SEQ ID NO: 167031 - DNA, 3128 bp, Homo sapiens
  Payload ID: 12878
  Gene Symbol: PARP9
  Gene Name: poly (ADP-ribose) polymerase family, member 9
  Uniprot ID: Q8IXQ6
  ENST ID: ENST00000477522
  CDS Start-End: 229-2688
gggcttcgtgttcctgggtgctgaccgtgcactccccgccgcccgaggacttagagctctggaagtagctctccagcttccttcgtactcgggggccggacttgtacacccgcacgaggagcggggacggcgggcgcagaagtgggccaccatatctggaaactacagtctatgctttgaagcgcaaaagggaataaacatttaaagactcccccggggacctggaggatggacttttccatggtggccggagcagcagcttacaatgaaaaatcagagactggtgctcttggagaaaactatagttggcaaattcccattaaccacaatgacttcaaaattttaaaaaataatgagcgtcagctgtgtgaagtcctccagaataagtttggctgtatctctaccctggtctctccagttcaggaaggcaacagcaaatctctgcaagtgttcagaaaaatgctgactcctaggatagagttatcagtctggaaagatgacctcaccacacatgctgttgatgctgtggtgaatgcagccaatgaagatcttctgcatgggggaggcctggccctggccctggtaaaagctggtggatttgaaatccaagaagagagcaaacagtttgttgccagatatggtaaagtgtcagctggtgagatagctgtcacgggagcagggaggcttccctgcaaacagatcatccatgctgttgggcctcggtggatggaatgggataaacagggatgtactggaaagctgcagagggccattgtaagtattctgaattatgtcatctataaaaatactcacattaagacagtagcaattccagccttgagctctgggatttttcagttccctctgaatttgtgtacaaagactattgtagagactatccgggttagtttgcaagggaagccaatgatgagtaatttgaaagaaattcacctggtgagcaatgaggaccctactgttgctgcctttaaagctgcttcagaattcatcctagggaagagtgagctgggacaagaaaccaccccttctttcaatgcaatggtcgtgaacaacctgaccctccagattgtccagggccacattgaatggcagacggcagatgtaattgttaattctgtaaacccacatgatattacagttggacctgtggcaaagtcaattctacaacaagcaggagttgaaatgaaatcggaatttcttgccacaaaggctaaacagtttcaacggtcccagttggtactggtcacaaaaggatttaacttgttctgtaaatatatataccatgtactgtggcattcagaatttcctaaacctcagatattaaaacatgcaatgaaggagtgtttggaaaaatgcattgagcaaaatataacttccatttcctttcctgcccttgggactggaaacatggaaataaagaaggaaacagcagcagagattttgtttgatgaagttttaacatttgccaaagaccatgtaaaacaccagttaactgtaaaatttgtgatctttccaacagatttggagatatataaggctttcagttctgaaatggcaaagaggtccaagatgctgagtttgaacaattacagtgtcccccagtcaaccagagaggagaaaagagaaaatgggcttgaagctagatctcctgccatcaatctgatgggattcaacgtggaagagatgtatgaggcccacgcatggatccaaagaatcctgagtctccagaaccaccacatcattgagaataatcatattctgtaccttgggagaaaggaacatgacattttgtctcagcttcagaaaacttcaagtgtctccatcacagaaattatcagcccaggaaggacagagttagagattgaaggagcccgggctgacctcattgaggtggttatgaacattgaagatatgctttgtaaagtacaggaggaaatggcaaggaaaaaggagcgaggcctttggcgctcgttaggacagtggactattcagcaacaaaaaacccaagacgaaatgaaagaaaatatcatatttctgaaatgtcctgtgcctccaactcaagagcttctagatcaaaagaaacagtttgaaaaatgtggtttgcaggttctaaaggtggagaagatagacaatgaggtccttatggctgcctttcaaagaaagaagaaaatgatggaagaaaaactgcacaggcaacctgtgagccataggctgtttcagcaagtcccataccagttctgcaatgtggtatgcagagttggctttcaaagaatgtactcgacaccttgcgatccaaaatacggagctggcatatacttcaccaagaacctcaaaaacctggcagagaaggccaagaaaatctctgctgcagataagctgatctatgtgtttgaggctgaagtactcacaggcttcttctgccagggacatccgttaaatattgttcccccaccactgagtcctggagctatagatggtcatgacagtgtggttgacaatgtctccagccctgaaacctttgttatttttagtggcatgcaggctatacctcagtatttgtggacatgcacccaggaatatgtacagtcacaagattactcatcaggaccaatgagaccctttgcacagcatccttggaggggattcgcaagtggcagccctgttgattaatctctacatcattttaacagctggtatggccttaccttgggtgaactaaccaaataatgaccatcgatggctcaaagagtggcttgaatatatcccatgggttatctgtatggactgactgggttattgaaaggactagccacatactagcatcttagtgcctttatctgtctttatgtcttggggttggggtaggtagataccaaatgaaacactttcaggaccttccttcctcttgcagttgttctttaatctcctttactagaggagataaatattttgcatataatgaagaaatttttctagtatataacgcaggccttttattttctaaaatgatgatagtataaaaatgttaggataacagaatgattttagattttccagagaatattataaagtgctttaggtatgaaaataaatcatctttgtctgattaa

SEQ ID NO: 167032 - DNA, 567 bp, Homo sapiens
  Payload ID: 12878
  Gene Symbol: PARP9
  Gene Name: poly (ADP-ribose) polymerase family, member 9
  ENST ID: ENST00000466126
  CDS Start-End: 222-567
gagtaggtccggtgcctctgggccctcggggtcccctctcctgcaggctcgaggtgggcggggagaagggggacgggcgcggacccgggtcccagggccaggcctcccttgtgagtagactatgcaaagaaaaagtgggccaccatatctggaaactacagtctatgctttgaagcgcaaaagggaataaacatttaaagactcccccggggacctggaggatggacttttccatgaaagtctttgctcagatctttcctcagtggagaaaggggaatacagaagaatgtctcccctacaagtgctcagagactggtgctcttggagaaaactatagttggcaaattcccattaaccacaatgacttcaaaattttaaaaaataatgagcgtcagctgtgtgaagtcctccagaataagtttggctgtatctctaccctggtctctccagttcaggaaggcaacagcaaatctctgcaagtgttcagaaaaatgctgactcctaggatagagttatcagtctggaaagatgacctcaccacacatgctgttgatgctgtggtgaatg

SEQ ID NO: 167033 - DNA, 2782 bp, Homo sapiens
  Payload ID: 12879
  Gene Symbol: PAIP1
  Gene Name: poly(A) binding protein interacting protein 1
  Uniprot ID: Q9H074
  ENST ID: ENST00000306846
  CDS Start-End: 234-1673
ctggaaagccgagggtagccgagcggggcgggcgctctggagcggcgggtgctcgggctgccgtccgctccgccagaagcaccgagcagccgagccggggcccgccgccctcctcctccatgaggcccgagtgaggcgcggcggctatagccgacccgcggcgccttccccccgcgtcctatcgcgagcgcagcggcagcggcccctggaggaggaggcggaggaggaggagcatgtcggacggtttcgatcgggccccaggtgctggtcggggccggagccggggcctgggccgcggagggggcgggcctgagggcggcggtttcccgaacggagcggggcctgctgagcgggcgcggcaccagccgccgcaacccaaagccccgggcttcctgcagccaccgccgctgcgccagcccaggacgaccccgccgccaggggcccagtgcgaggtccccgccagcccccagcggccttcccggcccggggcgctcccagagcaaacgaggcccctgagagctccacctagttcacaggataaaatcccacagcagaactcggagtcagcaatggctaagccccaggtggttgtagctcctgtattaatgtctaagctgtctgtgaatgcccctgaattttacccttcaggttattcttccagttacacagaatcctatgaggatggttgtgaggattatcctactctatcagaatatgttcaggattttttgaatcatcttacagagcagcctggcagttttgaaactgaaattgaacagtttgcagagaccctgaatggttgtgttacaacagatgatgctttgcaagaacttgtggaactcatctatcaacaggccacatctatcccaaatttctcttatatgggagctcgcctgtgtaattacctgtcccatcatctgacaattagcccacagagtggcaacttccgccaattgctacttcaaagatgtcggactgaatatgaagttaaagatcaagctgcaaaaggggatgaagttactcgaaaacgatttcatgcatttgtactctttctgggagaactttatcttaacctggagatcaagggaacaaatggacaggttacaagagcagatattcttcaggttggtcttcgagaattgctgaatgccctgttttctaatcctatggatgacaatttaatttgtgcagtaaaattgttaaagttgacaggatcagttttggaagatgcttggaaggaaaaaggaaagatggatatggaagaaattattcagagaattgaaaacgttgtcctagatgcaaactgcagtagagatgtaaaacagatgctcttgaagcttgtagaactccggtcaagtaactggggcagagtccatgcaacttcaacatatagagaagcaacaccagaaaatgatcctaactactttatgaatgaaccaacattttatacatctgatggtgttcctttcactgcagctgatccagattaccaagagaaataccaagaattacttgaaagagaggacttttttccagattatgaagaaaatggaacagatttatccggggctggtgatccatacttggatgatattgatgatgagatggacccagagatagaagaagcttatgaaaagttttgtttggaatcagagcgtaagcgaaaacagtaaagttaaatttcagcatatcagttttataaagcagtttaggtatggtgatttagcagaacacaagagagcaagaaaatgtcacatctataccaaattaaggatgttgagttatgttactaatgtatgcaactttaattttgtttaacactatctgccaaaataaactttattccctataacttaaaatgtgtatatatatataatagtttattatgtacagttaattctactgttttggctgcaataaaatcgattttgaaataaatgaaatgttgaaaattttgctagttggttagatgcttatcctttaaattctacttttcttgaggggaaaaagtcttcttctggaaatacatattactgcaaaaatgtagcatccttttttaggtaggagtattatagctttcattttagtttgacatttagtgtcccaatgaattgaatttcaaatatgaatcataatcttgaaaatctttagcactaaagtcttggaatatatcaacaactgatttacatatgcagatgctatttgataccaagggctttttaaatgtcatgggggggaaaaacccaacttggtgaactcccagctaaacaaccaagacttcactgaagatttattccaattctagaattgttcttttttatttttattttttcaactgactaacttcattaccttaaaggctagaacattattctgctttatttatatggctttctcacttttattttgtagcatgggttgcatcgacttttttactagagaattttactagatatttgtcattcaagttttcatctgctttataattgatacaccttgagggtcacttttctaatacttttactataatgtggtaccacctcagccctaataaataatatttttacctaatgtcaaatctttttccagctaactaaaaactgtgtacaaaaggattgcttgtaaatatgcatgtaaatagttctgttaataacccactgttttacatttggtacatctgtgtctgctaatacagttagctttctcacttttctgcttgtttgttcagtctgaattaaaattagactttgaaaataaagcttaaatagttgtttcctctaaa

SEQ ID NO: 167034 - DNA, 1814 bp, Homo sapiens
  Payload ID: 12879
  Gene Symbol: PAIP1
  Gene Name: poly(A) binding protein interacting protein 1
  Uniprot ID: Q9H074
  ENST ID: ENST00000338972
  CDS Start-End: 428-1531
acattttcttgaaatttctggaggggaaggttaacgggaagagaacgaagcttgttaaacgtaggtgtgacctactgtggtaaacacctagggtgaattaaagaggggacacatattttgattccgtttctactcccttcccccgatgctaacggagcaggtgacagtctcccagggaccactcctcagcagtccgcgggtctcggccggagccgagtcattgaacacacctgtgcgccagcgaaccctggcgcagggtccacgccccctccccccgtgtttttatttcccgggcgtcaactgtcggtctcgcacgtctctcctgagaactaccgagtaggtcgggcctgcctgtgagcaaacgaggcccctgagagctccacctagttcacaggataaaatcccacagcagaactcggagtcagcaatggctaagccccaggtggttgtagctcctgtattaatgtctaagctgtctgtgaatgcccctgaattttacccttcaggttattcttccagttacacagaatcctatgaggatggttgtgaggattatcctactctatcagaatatgttcaggattttttgaatcatcttacagagcagcctggcagttttgaaactgaaattgaacagtttgcagagaccctgaatggttgtgttacaacagatgatgctttgcaagaacttgtggaactcatctatcaacaggccacatctatcccaaatttctcttatatgggagctcgcctgtgtaattacctgtcccatcatctgacaattagcccacagagtggcaacttccgccaattgctacttcaaagatgtcggactgaatatgaagttaaagatcaagctgcaaaaggggatgaagttactcgaaaacgatttcatgcatttgtactctttctgggagaactttatcttaacctggagatcaagggaacaaatggacaggttacaagagcagatattcttcaggttggtcttcgagaattgctgaatgccctgttttctaatcctatggatgacaatttaatttgtgcagtaaaattgttaaagttgacaggatcagttttggaagatgcttggaaggaaaaaggaaagatggatatggaagaaattattcagagaattgaaaacgttgtcctagatgcaaactgcagtagagatgtaaaacagatgctcttgaagcttgtagaactccggtcaagtaactggggcagagtccatgcaacttcaacatatagagaagcaacaccagaaaatgatcctaactactttatgaatgaaccaacattttatacatctgatggtgttcctttcactgcagctgatccagattaccaagagaaataccaagaattacttgaaagagaggacttttttccagattatgaagaaaatggaacagatttatccggggctggtgatccatacttggatgatattgatgatgagatggacccagagatagaagaagcttatgaaaagttttgtttggaatcagagcgtaagcgaaaacagtaaagttaaatttcagcatatcagttttataaagcagtttaggtatggtgatttagcagaacacaagagagcaagaaaatgtcacatctataccaaattaaggatgttgagttatgttactaatgtatgcaactttaattttgtttaacactatctgccaaaataaactttattccctataacttaaaatgtgtatatatatataatagtttattatgtacagttaattctactgttttggctgcaataaaatcgattttgaaataaatgaaatgttgaaaatttt

SEQ ID NO: 167035 - DNA, 1734 bp, Homo sapiens
  Payload ID: 12879
  Gene Symbol: PAIP1
  Gene Name: poly(A) binding protein interacting protein 1
  Uniprot ID: Q9H074
  ENST ID: ENST00000436644
  CDS Start-End: 248-1450
gttttgggggagaactggaaagccgagggtagccgagcggggcgggcgctctggagcggcgggtgctcgggctgccgtccgctccgccagaagcaccgagcagccgagccggggcccgccgccctcctcctccatgaggcccgagtgaggcgcggcggctatagccgacccgcggcgccttccccccgcgtcctatcgcgagcgcagcggcagcggcccctggaggaggaggcggaggaggaggagcatgtcggacggtttcgatcgggccccagagcaaacgaggcccctgagagctccacctagttcacaggataaaatcccacagcagaactcggagtcagcaatggctaagccccaggtggttgtagctcctgtattaatgtctaagctgtctgtgaatgcccctgaattttacccttcaggttattcttccagttacacagaatcctatgaggatggttgtgaggattatcctactctatcagaatatgttcaggattttttgaatcatcttacagagcagcctggcagttttgaaactgaaattgaacagtttgcagagaccctgaatggttgtgttacaacagatgatgctttgcaagaacttgtggaactcatctatcaacaggccacatctatcccaaatttctcttatatgggagctcgcctgtgtaattacctgtcccatcatctgacaattagcccacagagtggcaacttccgccaattgctacttcaaagatgtcggactgaatatgaagttaaagatcaagctgcaaaaggggatgaagttactcgaaaacgatttcatgcatttgtactctttctgggagaactttatcttaacctggagatcaagggaacaaatggacaggttacaagagcagatattcttcaggttggtcttcgagaattgctgaatgccctgttttctaatcctatggatgacaatttaatttgtgcagtaaaattgttaaagttgacaggatcagttttggaagatgcttggaaggaaaaaggaaagatggatatggaagaaattattcagagaattgaaaacgttgtcctagatgcaaactgcagtagagatgtaaaacagatgctcttgaagcttgtagaactccggtcaagtaactggggcagagtccatgcaacttcaacatatagagaagcaacaccagaaaatgatcctaactactttatgaatgaaccaacattttatacatctgatggtgttcctttcactgcagctgatccagattaccaagagaaataccaagaattacttgaaagagaggacttttttccagattatgaagaaaatggaacagatttatccggggctggtgatccatacttggatgatattgatgatgagatggacccagagatagaagaagcttatgaaaagttttgtttggaatcagagcgtaagcgaaaacagtaaagttaaatttcagcatatcagttttataaagcagtttaggtatggtgatttagcagaacacaagagagcaagaaaatgtcacatctataccaaattaaggatgttgagttatgttactaatgtatgcaactttaattttgtttaacactatctgccaaaataaactttattccctataacttaaaatgtgtatatatatataatagtttattatgtacagttaattctactgttttggctgcaataaaatcgattttgaaataaatgaaatgttgaaaattttg

SEQ ID NO: 167036 - DNA, 1766 bp, Homo sapiens
  Payload ID: 12879
  Gene Symbol: PAIP1
  Gene Name: poly(A) binding protein interacting protein 1
  ENST ID: ENST00000504639
  CDS Start-End: 208-1008
ggcgggcgctctggagcggcgggtgctcgggctgccgtccgctccgccagaagcaccgagcagccgagccggggcccgccgccctcctcctccatgaggcccgagtgaggcgcggcggctatagccgacccgcggcgccttccccccgcgtcctatcgcgagcgcagcggcagcggcccctggaggaggaggcggaggaggaggagcatgtcggacggtttcgatcgggccccaggtgctggtcggggccggagccggggcctgggccgcggagggggcgggcctgagggcggcggtttcccgaacggagcggggcctgctgagcgggcgcggcaccagccgccgcaacccaaagccccgggcttcctgcagccaccgccgctgcgccagcccaggacgaccccgccgccaggggcccagtgcgaggtccccgccagcccccagcggccttcccggcccggggcgctcccagagcaaacgaggcccctgagagctccacctagttcacaggataaaatcccacagcagaactcggagtcagcaatggctaagccccaggtggttgtagctcctgtattaatgtctaagctgtctgtgaatgcccctgaattttacccttcaggttattcttccagttacacagaatcctatgaggatggttgtgaggattatcctactctatcagaatatgttcaggattttttgaatcatcttacagagcagcctggcagttttgaaactgaaattgaacagtttgcagagaccctgaatggttgtgttacaacagatgatgctttgcaagaacttgtggaactcatctatcaacaggccacatctatcccaaatttctcttatatgggagctcgcctgtgtaattacctgtcccatcatctgacaattagcccacagagtggcaacttccgccaattgctacttcaaagatcaagggaacaaatggacaggttacaagagcagatattcttcaggttggtcttcgagaattgctgaatgccctgttttctaatcctatggatgacaatttaatttgtgcagtaaaattgttaaagttgacaggatcagttttggaagatgcttggaaggaaaaaggaaagatggatatggaagaaattattcagagaattgaaaacgttgtcctagatgcaaactgcagtagagatgtaaaacagatgctcttgaagcttgtagaactccggtcaagtaactggggcagagtccatgcaacttcaacatatagagaagcaacaccagaaaatgatcctaactactttatgaatgaaccaacattttatacatctgatggtgttcctttcactgcagctgatccagattaccaagagaaataccaagaattacttgaaagagaggacttttttccagattatgaagaaaatggaacagatttatccggggctggtgatccatacttggatgatattgatgatgagatggacccagagatagaagaagcttatgaaaagttttgtttggaatcagagcgtaagcgaaaacagtaaagttaaatttcagcatatcagttttataaagcagtttaggtatggtgatttagcagaacacaagagagcaagaaaatgtcacatctataccaaattaaggatgttgagttatgttactaatgtatgcaactttaattttgtttaacactatctgccaaaataaactttattccctataacttaaaatgtgtatatatatataatagtttattatgtacagttaattctact

SEQ ID NO: 167037 - DNA, 1603 bp, Homo sapiens
  Payload ID: 12879
  Gene Symbol: PAIP1
  Gene Name: poly(A) binding protein interacting protein 1
  ENST ID: ENST00000514514
  CDS Start-End: 232-1287
ggaaagccgagggtagccgagcggggcgggcgctctggagcggcgggtgctcgggctgccgtccgctccgccagaagcaccgagcagccgagccggggcccgccgccctcctcctccatgaggcccgagtgaggcgcggcggctatagccgacccgcggcgccttccccccgcgtcctatcgcgagcgcagcggcagcggcccctggaggaggaggcggaggaggaggagcatgtcggacggtttcgatcgggccccagagcaaacgaggcccctgagagctccacctagttcacaggataaaatcccacagcagaactcggagtcagcaatggctaagccccaggtggttgtagctcctgtattaatgtctaagctgtctgtgaatgcccctgaattttacccttcaggttattcttccagttacacagaatcctatgaggatggttgtgaggattatcctactctatcagaatatgttcaggattttttgaatcatcttacagagcagcctggcagttttgaaactgaaattgaacagtttgcagagaccctgaatggttgtgttacaacagatgatgctttgcaagaacttgtggaactcatctatcaacaggccacatctatcccaaatttctcttatatgggagctcgcctgtgtaattacctgtcccatcatctgacaattagcccacagagtggcaacttccgccaattgctacttcaaagatgtcggactgaatatgaagttaaagatcaagctgcaaaaggggatgaagttactcgaaaacgatttcatgcatttgtactctttctgggagaactttatcttaacctggagatcaagggaacaaatggacaggttacaagagcagatattcttcaggttggtcttcgagaattgctgaatgccctgttttctaatcctatggatgacaatttaatttgtgcagtaaaattgttaaagttgacaggatcagttttggaagatgcttggaaggaaaaaggaaagatggatatggaagaaattattcagagaattgaaaacgttgtcctagatgcaaactgcagtagagatgtaaaacagatgctcttgaagcttgtagaactccggtcaagtaactggggcagagtccatgcaacttcaacatatagagaagcaacaccagaaaatgatcctaactactttatgaatgaaccaacattttatacatctgatggtgttcctttcactgcagctgatccagatacttggatgatattgatgatgagatggacccagagatagaagaagcttatgaaaagttttgtttggaatcagagcgtaagcgaaaacagtaaagttaaatttcagcatatcagttttataaagcagtttaggtatggtgatttagcagaacacaagagagcaagaaaatgtcacatctataccaaattaaggatgttgagttatgttactaatgtatgcaactttaattttgtttaacactatctgccaaaataaactttattccctataacttaaaatgtgtatatatatataatagtttattatgtacagttaattctactgttttggctgcaataaaatcgattttgaaata

SEQ ID NO: 167038 - DNA, 726 bp, Homo sapiens
  Payload ID: 12879
  Gene Symbol: PAIP1
  Gene Name: poly(A) binding protein interacting protein 1
  ENST ID: ENST00000515338
  CDS Start-End: 442-726
tattttcattggacagcactgatgcaagatgaaaaagagggcagagttacactgaaaggtagcacattttcttgaaatttctggaggggaaggttaacgggaagagaacgaagcttgttaaacgtaggtgtgacctactgtggtaaacacctagggtgaattaaagaggggacacatattttgattccgtttctactcccttcccccgatgctaacggagcaggtgacagtctcccagggaccactcctcagcagtccgcgggtctcggccggagccgagtcattgaacacacctgtgcgccagcgaaccctggcgcagggtccacgccccctccccccgtgtttttatttcccgggcgtcaactgtcggtctcgcacgtctctcctgagaactaccgagtaggtcgggataaaatcccacagcagaactcggagtcagcaatggctaagccccaggtggttgtagctcctgtattaatgtctaagctgtctgtgaatgcccctgaattttacccttcaggttattcttccagttacacagaatcctatgaggatggttgtgaggattatcctactctatcagaatatgttcaggattttttgaatcatcttacagagcagcctggcagttttgaaactgaaattgaacagtttgcagagaccctgaatggttgtgttacaacagatgatgctttgcaagaacttgtggaactcatctatcaacag

SEQ ID NO: 167039 - DNA, 706 bp, Homo sapiens
  Payload ID: 12879
  Gene Symbol: PAIP1
  Gene Name: poly(A) binding protein interacting protein 1
  ENST ID: ENST00000511321
  CDS Start-End: 106-706
caagatgaaaaagagggcagagttacactgaaagagcaaacgaggcccctgagagctccacctagttcacaggataaaatcccacagcagaactcggagtcagcaatggctaagccccaggtggttgtagctcctgtattaatgtctaagctgtctgtgaatgcccctgaattttacccttcaggttattcttccagttacacagaatcctatgaggatggttgtgaggattatcctactctatcagaatatgttcaggattttttgaatcatcttacagagcagcctggcagttttgaaactgaaattgaacagtttgcagagaccctgaatggttgtgttacaacagatgatgctttgcaagaacttgtggaactcatctatcaacaggccacatctatcccaaatttctcttatatgggagctcgcctgtgtaattacctgtcccatcatctgacaattagcccacagagtggcaacttccgccaattgctacttcaaagatgtcggactgaatatgaagttaaagatcaagctgcaaaaggggatgaagttactcgaaaacgatttcatgcatttgtactctttctgggagaactttatcttaacctggagatcaagggaacaaatggacaggttacaagagcagatattcttcaggttggtcttcgagaattgctgaatgccctgttttctaatcctatgg

SEQ ID NO: 167040 - DNA, 752 bp, Homo sapiens
  Payload ID: 12879
  Gene Symbol: PAIP1
  Gene Name: poly(A) binding protein interacting protein 1
  ENST ID: ENST00000508537
  CDS Start-End: 248-752
tggggggaggggccgggtgcgcggtctcggagttcggggtcccgggaggaagtaaaaatcgcctcccctcagcagccctctaaagcgagaccctagcgagtaaccacctcttttccaccgacccctttaaaacgacagagaggaaaaaagctcgcaagcactcatttgagaggcagagcaaacgaggcccctgagagctccacctagttcacaggataaaatcccacagcagaactcggagtcagcaatggctaagccccaggtggttgtagctcctgtattaatgtctaagctgtctgtgaatgcccctgaattttacccttcaggttattcttccagttacacagaatcctatgaggatggttgtgaggattatcctactctatcagaatatgttcaggattttttgaatcatcttacagagcagcctggcagttttgaaactgaaattgaacagtttgcagagaccctgaatggttgtgttacaacagatgatgctttgcaagaacttgtggaactcatctatcaacaggccacatctatcccaaatttctcttatatgggagctcgcctgtgtaattacctgtcccatcatctgacaattagcccacagagtggcaacttccgccaattgctacttcaaagatgtcggactgaatatgaagttaaagatcaagctgcaaaaggggatgaagttactcgaaaacgatttcatgcatttgtactctttctgggagaactttatcttaacc

SEQ ID NO: 167041 - DNA, 515 bp, Homo sapiens
  Payload ID: 12879
  Gene Symbol: PAIP1
  Gene Name: poly(A) binding protein interacting protein 1
  ENST ID: ENST00000514816
  CDS Start-End: 1-150
aatgaaccaacattttatacatctgatggtgttcctttcactgcagctgatccagattaccaagagaaataccaagaattacttgaaagagaggacttttttccagattatgaagaaaatggaacagatttatccgggatacttggatgatattgatgatgagatggacccagagatagaagaagcttatgaaaagttttgtttggaatcagagcgtaagcgaaaacagtaaagttaaatttcagcatatcagttttataaagcagtttaggtatggtgatttagcagaacacaagagagcaagaaaatgtcacatctataccaaattaaggatgttgagttatgttactaatgtatgcaactttaattttgtttaacactatctgccaaaataaactttattccctataacttaaaatgtgtatatatatataatagtttattatgtacagttaattctactgttttggctgcaataaaatcgattttgaaataaatgaaatgttgaaaatttt

SEQ ID NO: 167042 - DNA, 501 bp, Homo sapiens
  Payload ID: 12879
  Gene Symbol: PAIP1
  Gene Name: poly(A) binding protein interacting protein 1
  ENST ID: ENST00000504075
  CDS Start-End: 473-501
ggaaagccgagggtagccgagcggggcgggcgctctggagcggcgggtgctcgggctgccgtccgctccgccagaagcaccgagcagccgagccggggcccgccgccctcctcctccatgaggcccgagtgaggcgcggcggctatagccgacccgcggcgccttccccccgcgtcctatcgcgagcgcagcggcagcggcccctggaggaggaggcggaggaggaggagcatgtcggacggtttcgatcgggccccaggaatcctatgaggatggttgtgaggattatcctactctatcagaatatgttcaggattttttgaatcatcttacagagcagcctggcagttttgaaactgaaattgaacagtttgcagagaccctgaatggttgtgttacaacagatgatgctttgcaagaacttgtggaactcatctatcaacaggccacatctatcccaaatttctcttatatgggagctcgcctgtgtaattacctgtc

SEQ ID NO: 167043 - DNA, 1459 bp, Homo sapiens
  Payload ID: 12880
  Gene Symbol: PAIP2
  Gene Name: poly(A) binding protein interacting protein 2
  Uniprot ID: Q9BPZ3
  ENST ID: ENST00000265192
  CDS Start-End: 176-559
gaagtcacttccgggctggggtgtttgtttggactggagaagggaggcggcgggcgaagcgcacgtcgagcgggggagcggcgctgcctgtggagatccgcggaggccgacaggattcgttggctgccgtccccgctgctgtgcattgggttaaaaacgacaaccaacatcagccatgaaagatccaagtcgcagcagtactagcccaagcatcatcaatgaagatgtgattattaacggtcattctcatgaagatgacaatccatttgcagagtacatgtggatggaaaatgaagaagaattcaacagacaaatagaagaggagttatgggaagaagaatttattgaacgctgtttccaagaaatgctggaagaggaagaagagcatgaatggtttattccagctcgagatctcccacaaactatggaccaaatccaagaccagtttaatgaccttgttatcagtgatggctcttctctggaagatcttgtggtcaagagcaatctgaatccaaatgcaaaggagtttgttcctggggtgaagtacggaaatatttgagtagacggggccctcttttggtggatgtagcacaatttccacactgtgaaggcagtattagaagacttaattgtaaaagctctcttgtcactgtgttacacttatgcattgccaaagtttttgttagtcttgcatgcttaataaaagtgctgagactgttactaagtaaaaagctgtcaaacatttactgaaaatagaattggccccatggcttgatgtgaagacagcaaggaaagaagcaccagtcaagttgtgaacaagcaccaaattaaaagacctaaaccttaccaaattgtctttttttgaggctaatctatcacttgttaatgtctaaactttaaaatcagtacatttaatttgagttccaactgttaagcatatttctcagacttaaatttgattatgtccccatcaaaaagaatctccattttctgaaggtctgttagttaatttgagataatttgttaaaggcaagtatgtcatattactgaggctacaagttagtcagcagatgagtgccagtccagccttttctggtatgttattgttagaaatattgagttctaatgttacatctgaggaagtatgtaatttgagaattgtaacttctaagggattcactgcatcatagctatgcctgtatggagtctaacatatgaccaataccaacccataatccagctgaacaaagatactgtaacatgatttgagtggtgcttttccttgctttgttaaccatcacgagagtctgcagcacaacttttaacaaagctagaacagttttggcttcttaaacttcatatttgggtaggttaagctgccatacgtgttcagtgtgaatagtgtttaagttgaaaatattgtaaaaaaattatattttttcaaaaatatttaaaaaaa

SEQ ID NO: 167044 - DNA, 2297 bp, Homo sapiens
  Payload ID: 12880
  Gene Symbol: PAIP2
  Gene Name: poly(A) binding protein interacting protein 2
  Uniprot ID: Q9BPZ3
  ENST ID: ENST00000394795
  CDS Start-End: 992-1375
ctggggtttggggagagaggggcggagggactggcgggctcttggcgtcttgggggaacgctgcaaccgtcgacgggcctgatcagaagatcgtctttctcccgtttcttcgccatcgctaccccttatttttggttgtattgcagctcatgccctggaaaaaagaacctttggggtactgggaacccttaccctaggagggcgttgagttagatgaactttaaggtcctcttaccttttaataattttctgtgcttactctcctccttccccaccatcgccaccagaaataaataaggcttgtggtgaacttaggtcttcaaaacatttgttgcagcagccagcagtgatattttttagggactcctaaaaggggtcttacctgcttccttttgtttcttttttccctgatttggcacccgtatcaactcataaaaaccccaaactctagaaagaatttggcttccaatttgccttggaaggtgtagcagctgacagcctttgacgtttatttcaacggaaagtagatgttcatgttgggtgtgctggctaatgttgaaacgtggtggcattgttttttcacagatttcattagcacagttagatcaggtgttggtttatattttcattaagtcgcttttgaaatttcttctggcgtaggttgtgtttgcaataagtaaaagttctctacaataatttttaatgagactccactatttgcttttgtgattctgtttccagttagtgaaagacaggatatttggggaaaattagtctgtttatactacttgtcagttgtgaacttgaataaaactttttcacacacacacaaaatcacaggataggtaacttgacaagaactatagaacccacttgtgtttctttaagggatggaggttagggaatggagatttcctctaatgattcaaggctgtgcacgttgctccttaggaactcaaattgaggttaaaaacgacaaccaacatcagccatgaaagatccaagtcgcagcagtactagcccaagcatcatcaatgaagatgtgattattaacggtcattctcatgaagatgacaatccatttgcagagtacatgtggatggaaaatgaagaagaattcaacagacaaatagaagaggagttatgggaagaagaatttattgaacgctgtttccaagaaatgctggaagaggaagaagagcatgaatggtttattccagctcgagatctcccacaaactatggaccaaatccaagaccagtttaatgaccttgttatcagtgatggctcttctctggaagatcttgtggtcaagagcaatctgaatccaaatgcaaaggagtttgttcctggggtgaagtacggaaatatttgagtagacggggccctcttttggtggatgtagcacaatttccacactgtgaaggcagtattagaagacttaattgtaaaagctctcttgtcactgtgttacacttatgcattgccaaagtttttgttagtcttgcatgcttaataaaagtgctgagactgttactaagtaaaaagctgtcaaacatttactgaaaatagaattggccccatggcttgatgtgaagacagcaaggaaagaagcaccagtcaagttgtgaacaagcaccaaattaaaagacctaaaccttaccaaattgtctttttttgaggctaatctatcacttgttaatgtctaaactttaaaatcagtacatttaatttgagttccaactgttaagcatatttctcagacttaaatttgattatgtccccatcaaaaagaatctccattttctgaaggtctgttagttaatttgagataatttgttaaaggcaagtatgtcatattactgaggctacaagttagtcagcagatgagtgccagtccagccttttctggtatgttattgttagaaatattgagttctaatgttacatctgaggaagtatgtaatttgagaattgtaacttctaagggattcactgcatcatagctatgcctgtatggagtctaacatatgaccaataccaacccataatccagctgaacaaagatactgtaacatgatttgagtggtgcttttccttgctttgttaaccatcacgagagtctgcagcacaacttttaacaaagctagaacagttttggcttcttaaacttcatatttgggtaggttaagctgccatacgtgttcagtgtgaatagtgtttaagttgaaaatattgtaaaaaaattatattttttcaaaaatatttaaaaaaataaataatagtagaactgagca

SEQ ID NO: 167045 - DNA, 858 bp, Homo sapiens
  Payload ID: 12880
  Gene Symbol: PAIP2
  Gene Name: poly(A) binding protein interacting protein 2
  Uniprot ID: Q9BPZ3
  ENST ID: ENST00000510080
  CDS Start-End: 193-576
ggggagagaggggcggagggactggcgggctcttggcgtcttgggggaacgctgcaaccgtcgacgggcctgatcagaagatcgtctttctcccgtttcttcgccatcgctaccccttatttttggttgtattgcagctcatgccctggaaaaaagaacctttggggttaaaaacgacaaccaacatcagccatgaaagatccaagtcgcagcagtactagcccaagcatcatcaatgaagatgtgattattaacggtcattctcatgaagatgacaatccatttgcagagtacatgtggatggaaaatgaagaagaattcaacagacaaatagaagaggagttatgggaagaagaatttattgaacgctgtttccaagaaatgctggaagaggaagaagagcatgaatggtttattccagctcgagatctcccacaaactatggaccaaatccaagaccagtttaatgaccttgttatcagtgatggctcttctctggaagatcttgtggtcaagagcaatctgaatccaaatgcaaaggagtttgttcctggggtgaagtacggaaatatttgagtagacggggccctcttttggtggatgtagcacaatttccacactgtgaaggcagtattagaagacttaattgtaaaagctctcttgtcactgtgttacacttatgcattgccaaagtttttgttagtcttgcatgcttaataaaagtgctgagactgttactaagtaaaaagctgtcaaacatttactgaaaatagaattggccccatggcttgatgtgaagacagcaaggaaagaagcaccagtcaagttgtgaacaagcaccaaattaaaagacctaaa

SEQ ID NO: 167046 - DNA, 468 bp, Homo sapiens
  Payload ID: 12880
  Gene Symbol: PAIP2
  Gene Name: poly(A) binding protein interacting protein 2
  ENST ID: ENST00000511706
  CDS Start-End: 130-333
gcggcgggcgaagcgcacgtcgagcgggggagcggcgctgcctgtggagatccgcggaggccgacaggattcgttggctgccgtccccgctgctgtgcattgggttaaaaacgacaaccaacatcagccatgaaagatccaagtcgcagcagtactagcccaagcatcatcaatgaagatgtgattattaacggtcattctcatgaagatgacaatccatttgcagagtacatgtggatggaaaatgaagaagaattcaacagacaagtcaagagcaatctgaatccaaatgcaaaggagtttgttcctggggtgaagtacggaaatatttgagtagacggggccctcttttggtggatgtagcacaatttccacactgtgaaggcagtattagaagacttaattgtaaaagctctcttgtcactgtgttacacttatgcattgccaaagtttttgttagtcttgcat

SEQ ID NO: 167047 - DNA, 776 bp, Homo sapiens
  Payload ID: 12880
  Gene Symbol: PAIP2
  Gene Name: poly(A) binding protein interacting protein 2
  ENST ID: ENST00000507755
  CDS Start-End: 498-776
ggaagatgggcgggtgtgggaacagtggtacgcccccattcctgccttccagagagaacgtgcgacagcgttcctgctacacccggcagccggccgtaggggcgcgctggaaaggctgctgcgcgtgcacacgtgtgcagccttggagacagacttcggggtcgcgcgttctcgcgcgcgctctctagtggcttcggagggcagagctgacagaacaagagggcggggttggcggcgacggaagtgaagtcacttccgggctggggtgtttgtttggactggagaagggaggcggcgggcgaagcgcacgtcgagcgggggagcggcgctgcctgtggagatccgcggaggccgacaggattcgttggctgccgtccccgctgctgtgcattggggatggaggttagggaatggagatttcctctaatgattcaaggctgtgcacgttgctccttaggaactcaaattgaggttaaaaacgacaaccaacatcagccatgaaagatccaagtcgcagcagtactagcccaagcatcatcaatgaagatgtgattattaacggtcattctcatgaagatgacaatccatttgcagagtacatgtggatggaaaatgaagaagaattcaacagacaaatagaagaggagttatgggaagaagaatttattgaacgctgtttccaagaaatgctggaagaggaagaagagcatgaatggtttattccagctcgagatctcccacaaactatggaccaaatccaagaccagtttaatgac

SEQ ID NO: 167048 - DNA, 6279 bp, Homo sapiens
  Payload ID: 12881
  Gene Symbol: PAIP2B
  Gene Name: poly(A) binding protein interacting protein 2B
  Uniprot ID: Q9ULR5
  ENST ID: ENST00000244221
  CDS Start-End: 168-539
ctggcaagtggtagtggcgcttctcgggtgctgtgcttcacgttttggtactaaaggccgagactgttgtggcgacggcgacctctacggcaacggcttaagctctcggaggagtggcagagtacgatctgaaggaggggcttctggttagcccaggttccatcataatgaatggatccaatatggcaaatacatcaccgagtgtaaaatccaaagaggaccaggggttaagtgggcacgatgaaaaggaaaacccatttgcagagtacatgtggatggagaatgaagaggatttcaacagacaggtggaggaggaactgcaggagcaagacttcttggaccgctgcttccaagagatgctggatgaagaagaccaagactggtttattccctcacgagacctgcctcaggccatgggacagttgcaacagcagttaaatggactgtcagtcagtgaaggtcatgattctgaagatattttgagcaaaagtaacctgaacccagatgccaaggagtttattccaggagagaagtactgagccgagaaagctttgaggaagacttgtctgtccccacatctggggatagtaatgcacaaaatggtggagctgaagagggggatggggcgggcgaggggtgcacagcgggaaggggagtggtggtctcacaatactgtgactctgagtaactaatatgctcagtcttattctaagcctctgagtatttctattttgttctgctgacttttgtttggggagtttcctgttttgtttttttaaatagctctttcgagttaaggaaattgcattttccccccttcatcagaagtgttccgcggtgtgtatttaaacaaaataagctgactaagaaaaactggatatttaggaaatgcccctctcaccctgctgtatacttatcagggacagtgagcacctggagagctttttgtggaatctattgagttggatgggaaaagggacaagcagaaagagcaggtggtgcaaactggaatttgaggctcagctgccccacccccggggtctcctgcaatgaactcggataaccaatgtgctgtcaagcccttgcctgtttgtcctgaaccccattcaagaaaacacagacttaaagtacttagtttacagtaacttttgatgattgttgaaagttgtaaatcagaaggtagggctgtgatggtggttgtcacttgagtcatttagttactgttgtcctgttcataagcctgtgttcaccaccaccatcagactcaccatttataagtagaagagcactagggttgatctgccacctcatctttcatgaagtctattccccagcctcctttttaagaaaagatactgctaccaaaggcataggggaggcctgctgtgctggcaattagcatgagcctgcagaagtcatccttgaatctgttgtgtcttaattttatttggacagtttttttttccagcctcatcaacacttggtcttcctggtgtcttaattccctcagacaagtttatgcacttttttaaggaaatatttttcaggacactagtaagaagctcagttcacagtttggatatttcttcccacattacagaattatggaaaggaactcaaaatcagcctaggaaagtgagtcctgcttgacccatgtgactgtgtacctgaccttctgggatcttttcagctattaaaacattttactgttcccacatacccagctttgcaagttttgtagattgacctcttagggtgtgtttctttgtctttcctgcctttaacttgctggggtcttttgttgctacccctaaggaactaaactgggtgccaggagctaccttcgtgtatagagatgtagatggcagtgtggggtacaggagagccatccaggccattctcccagggatgaggaattggagagccctgaagataatagtggcttctttctgattgctactgtgctgtgtgataggcctaatagggaaaagatatgtaacttgaaacaaagttggtataaattcagtatgtggctgtgggacagaggttggaaggaaaggactagggtatggaaagctgaagaaattctccttatgagctctcgttgactttttgaacagtgataagctaatgccagatttaaaatacacattttttcctatttgagtctttaggattatatcatttgaaaaaattgccttccttgttaggtcacatgtcataggagagtagcttagagaacttgcattaccagacagacacattaattcccaaagcctctatgttgagagaatgaaactgttaactctttttcagagaggactatgaataaagaaacttctttattcaagcttcagctttcagctgggttgtttcctctaaaagggaaagggcattgcaagtgcatagaggaaatctctcccttctgggactgcttttcctccttcatcctcgtgagcctgtccaagctcagaattccgaaggctgttagaaatgcgttgggattgcagagagaaaggagcttgtctttccttctgctgtgctggtctgttttggatgtcagtcttcaggactatgaaaacttcctgccagtttagcatggacactgagggctggcatttctagtcttcttcagacactgaacatactgactccaggtataggaagcagctagcaaattgattcttttttaaatgcataggactctgcttccggcggttcctcttgtagtccaactctttttgccatctatttatgttgggaggtaggggcacaattgtcactcacaacacaggctagttagagtttgctaccttcttagcagaaaatgcatgtgtgtcttgttggaccttcactggggaaaggctgggagcctctggctgtcagtgacttttctcacagaagaagaaccagcaagccagactggacacctttaccctttaatggtaagacttgtatttataaggggtaattttgatgttgaatttaagccactactttgtttaaacttttttaaattggcaactagaagtttgagaatttgtatagaaatggaacatgtatttctaacagttgccaatctggctggtcccaatgttagtttattagtgattgatctgtaattattgggattatttattcaactctaaaattccaagatgaaaataatttatctctttcttttcaagggaaaaaacccaaatgaatgcattttcagtttctccaggcctttgaactgcagcagaaaattcaaggatacagcctaggcctgggcaaatgcagccctgggtctttgggccagtttctgacaataatagttgagttttgggaatcacataagggtgaaaccagaaacgatcctaaggaaaggcttgacctttgttaacacctttagtttccaaagtcacagcagctggggtccctcttttttttttttttttctttttttttgagacatagtctcactctgtcacccaggctggagtgcagtggtatgaccatagctcactgcagcatcaaattcctaggctcaagcaatcctcccatcttagcctcccgagtagctgggacaacaggtacgcaccaccacggccagctaattatttttattatttttattttttgtagagactggatcttgctctatttcccaagctactcttgaattgttgtgctcaagtgattctcccatctcagcctcccaaagtgctgggattataggctgggtgtggtgagccaccccagcctggggtctctttaattaaggttataatgctaaccatggcttaaaatactaagcaacattttccaaattgtttattactattgctttgattttggagaagctgggaagtaaggaggtgaggtgaatactctgataattaacacgtgttagagaggaaagttgtgtgaagaggctgccaaagtaaacagcacgaatgaatcttcttgtactagggctgctgcaaaccccaggtagacaaatgacagcccaggctcctgaaccatcaggaacccaggaatctacccaactgtgaggagggggcaggccttcgtcaataagggtcccaccatcacgggctaataatctttctcagtttaggtgatattgaggtattgaaactgttagaaatctgacagatttgaccaagatttggagacgtccacataattgggaaggactgagtgtccctagccactctcctctgggataacgcggacgtcattagtttgcgaagtgggtggggagaacaggaggattgactctaatttggtgtgtagtgggggccttgatgtccttctgcctctgtccacatttccccatgtgactcattgcaccctgcattgctcacagggatcattagttctcccggtagacagagcacctctgcagcctctgctctgctgccttgtgaatttcctacacagacttggttagttacaatttggaaacagtttttttgggtttttttcctttgttttaatcttctcacaatgaagctgctattggtgacagggacaggggagcaggaagccaacccagggaaacatgcgagtttcctgcacaccacttagtcacctgccctcactggccaaccccctactgctgttcccagtcagtctggtttttagaggcatcgtggcaatagaatagctggatacactaatctctacaaggtgtcaggcaggagattcaccttccccagtcccaggggacaggagagaaatctgtaaagggacagatgcaccatctttatttcaaaagaaaaagctccctcagattgtgttactaggagtctcttttgtgacatttactgagctttctccccaatcttaccttcctattggctactttttaaataaaaataaacattttaggctaatatgacaaaaatgagataaaatcttaaaaacattgtactagtgtacagttactaaaatgtgcttactacaaaacagtaaaatatttcactctgtaaatcatcactaagtagttattctgtcctgttgattatgagcctccaaaaatgtttaatgcttgaaggatggtttgggaggcagggaatccttttcttaaaacaactttaatgaggcatatgttacatatcataaaacacccatttcaagtgtacatttcagtgattttagtaacttccctcagtggtgtagctgtaactattactcagttttagaacatttttatccctcccaataagatccttcatgctcttttacagttaatcctgttcttacccccggcaaccactaatctactttctctataaatttgccctttctggacagttcaaatcaatggaatcatacaatatgtggtcccttgggtctggcttttttacttagctaatgtttttgaggtttgtccatgacagataacgtcttggtagtttgttccttttattgctgagtagaattctgttgatggatgtaccacattttgtcagcagagagccttttaaacttggattccaacttcctgttgtctaaacggaaccctccgaacgtaggacttataggggaagctgctgtgcatgtcaaaaaaactactaatcagaatgagctttgtcatccagagccagaactgctgcagaaatttttataattttgcaacttctttttttacaaggaacttttgtgctactacacatcaggacttttgaagcatccaataaatccatttaataagtatgagcatgtgtctgagtggacaagaaagtgaaaccatccatgctacattggataatttttcctcccccagactggacagggaatctcagctttcaaaacagagtaacctggctccacttacaaagctgcacaggcattaaagatcgtgctgcctttgttaggcagatttggaggggaggcccaacagcaaagatggagaggaaaaagggagtggagcttgtggaacaggaagccccccagggtctgtgcagggctgctcagctcttgaggatgttgtggatggtgaagtggtgatggtgtcccggagcagcccagcacctccactgggcccagaaggtcttgacttcggacacttacccctgtttcacaagtgtttataaagctgtttttgctttttttcccctaatcattacttggtagttattaatccttctttgggggagggacagggctttaaaactgaagaaaataattttcataaaaatatcaaaaatggaaaaaagttactttgtaaaaaatttgctatacaaaccaaatggcagctgttgagaatctcaataaaatgttaaatgc

SEQ ID NO: 167049 - DNA, 3485 bp, Homo sapiens
  Payload ID: 12882
  Gene Symbol: PABPC1
  Gene Name: poly(A) binding protein, cytoplasmic 1
  Uniprot ID: P11940
  ENST ID: ENST00000318607
  CDS Start-End: 1130-3040
cgtagtgcggtccgggtaggagagagcagggggccacgctggctccatctacgcacgtttcggaaaccgggcccggaggggaccacgcccgctcacccgtgcccggcgtcccccggagctggggctagaggagccgggccggccgcagcgggaagaggccacaggcggccgcgcacgtggggggtggttagcgcggaggaacccggaagccctttgcaccgcccaccgccgcggtgacgggttaacgctcctcctggtggaggcaggggcgggcggggcggaaggcggggacgcctcagccaacacccccgaggaccgcccgcgagccgtcctccccacccccacggacgcgacgcagcgcgggctccgcttccccggccgcggcgcctgcgcaaaagccccgccccttcgcccgagccccacccccacaccgcagcctccaccgccgccacctctcccttcctctctgctctttcctcctgttttctcttccctcctccccctggcctccgcgtctcctcctactccggcgctgacgctcgcgtaggggccctggcgtcagacgcgcgggggcggggcgagtgcggcgcggggtataagtagagggtgcaggaggcggtgcttccccttctccccggcggttagtgctgagagtgcggagtgtgtgctccgggctcggaacacacatttattattaaaaaatccaaaaaaaatctaaaaaaatcttttaaaaaaccccaaaaaaatttacaaaaaatccgcgtctcccccgccggagacttttattttttttcttcctcttttataaaataacccggtgaagcagccgagaccgacccgcccgcccgcggccccgcagcagctccaagaaggaaccaagagaccgaggccttcccgctgcccggacccgacaccgccaccctcgctccccgccggcagccggcagccagcggcagtggatcgaccccgttctgcggccgttgagtagttttcaattccggttgatttttgtccctctgcgcttgctccccgctcccctccccccggctccggcccccagccccggcactcgctctcctcctctcacggaaaggtcgcggcctgtggccctgcgggcagccgtgccgagatgaaccccagtgcccccagctaccccatggcctcgctctacgtgggggacctccaccccgacgtgaccgaggcgatgctctacgagaagttcagcccggccgggcccatcctctccatccgggtctgcagggacatgatcacccgccgctccttgggctacgcgtatgtgaacttccagcagccggcggacgcggagcgtgctttggacaccatgaattttgatgttataaagggcaagccagtacgcatcatgtggtctcagcgtgatccatcacttcgcaaaagtggagtaggcaacatattcattaaaaatctggacaaatccattgataataaagcactgtatgatacattttctgcttttggtaacatcctttcatgtaaggtggtttgtgatgaaaatggttccaagggctatggatttgtacactttgagacgcaggaagcagctgaaagagctattgaaaaaatgaatggaatgctcctaaatgatcgcaaagtatttgttggacgatttaagtctcgtaaagaacgagaagctgaacttggagctagggcaaaagaattcaccaatgtttacatcaagaattttggagaagacatggatgatgagcgccttaaggatctctttggcaagtttgggcctgccttaagtgtgaaagtaatgactgatgaaagtggaaaatccaaaggatttggatttgtaagctttgaaaggcatgaagatgcacagaaagctgtggatgagatgaacggaaaggagctcaatggaaaacaaatttatgttggtcgagctcagaaaaaggtggaacggcagacggaacttaagcgcaaatttgaacagatgaaacaagataggatcaccagataccagggtgttaatctttatgtgaaaaatcttgatgatggtattgatgatgaacgtctccggaaagagttttctccatttggtacaatcactagtgcaaaggttatgatggagggtggtcgcagcaaagggtttggttttgtatgtttctcctccccagaagaagccactaaagcagttacagaaatgaacggtagaattgtggccacaaagccattgtatgtagctttagctcagcgcaaagaagagcgccaggctcacctcactaaccagtatatgcagagaatggcaagtgtacgagctgttcccaaccctgtaatcaacccctaccagccagcacctccttcaggttacttcatggcagctatcccacagactcagaaccgtgctgcatactatcctcctagccaaattgctcaactaagaccaagtcctcgctggactgctcagggtgccagacctcatccattccaaaatatgcccggtgctatccgcccagctgctcctagaccaccatttagtactatgagaccagcttcttcacaggttccacgagtcatgtcaacacagcgtgttgctaacacatcaacacagacaatgggtccacgtcctgcagctgcagccgctgcagctactcctgctgtccgcaccgttccacagtataaatatgctgcaggagttcgcaatcctcagcaacatcttaatgcacagccacaagttacaatgcaacagcctgctgttcatgtacaaggtcaggaacctttgactgcttccatgttggcatctgcccctcctcaagagcaaaagcaaatgttgggtgaacggctgtttcctcttattcaagccatgcaccctactcttgctggtaaaatcactggcatgttgttggagattgataattcagaacttcttcatatgctcgagtctccagagtcactccgttctaaggttgatgaagctgtagctgtactacaagcccaccaagctaaagaggctgcccagaaagcagttaacagtgccaccggtgttccaactgtttaaaattgatcagggaccatgaaaagaaacttgtgcttcaccgaagaaaaatatctaaacatcgaaaaacttaaatattatggaaaaaaaacattgcaaaatataaaataaataaaaaaaggaaaggaaactttgaaccttatgtaccgagcaaatgccaggtctagcaaacataatgctagtcctagattacttattgatttaaaaacaaaaaaacacaaaaaaatagtaaaatataaaaacaaattaatgttttatagaccctgggaaaaagaattttcagcaaagtacaaaaatttaaagcattcctttctttaattttgtaattctttactgtggaatagctcagaatgtcagttctgttttaagtaacagaattgataactgagcaaggaaacgtaatttggattataaaattcttgctttaataaaaattccttaaacagtg

SEQ ID NO: 167050 - DNA, 667 bp, Homo sapiens
  Payload ID: 12882
  Gene Symbol: PABPC1
  Gene Name: poly(A) binding protein, cytoplasmic 1
  ENST ID: ENST00000519622
  CDS Start-End: 1-394
tgatgagcgccttaaggatctctttggcaagtttgggcctgccttaagtgtgaaagtaatgactgatgaaagtggaaaatccaaaggatttggatttgtaagctttgaaaggcatgaagatgcacagaaagctgtggatgagatgaacggaaaggagctcaatggaaaacaaatttatgttggtcgagctcagaaaaaggtggaacggcagacggaacttaagcgcaaatttgaacagatgaaacaagataggatcaccagataccagggtgttaatctttatgtgaaaaatcttgatgatggtattgatgatgaacgtctccggaaagagttttctccatttggtacaatcactagtgcaaagaagaagccactaaagcagttacagaaatgaacggtagaattgtggccacaaagccattgtatgtagctttagctcagcgcaaagaagagcgccaggctcacctcactaaccagtatatgcagagaatggcaagtgtacgagctgttcccaaccctgtaatcaacccctaccagccagcacctccttcaggttacttcatggcagctatcccacagactcagaaccgtgctgcatactatcctcctagccaaattgctcaactaagaccaagtcctcgctggactgctcagggtgccagacctc

SEQ ID NO: 167051 - DNA, 851 bp, Homo sapiens
  Payload ID: 12882
  Gene Symbol: PABPC1
  Gene Name: poly(A) binding protein, cytoplasmic 1
  ENST ID: ENST00000519100
  CDS Start-End: 1-851
aggtggtttgtgatgaaaatggttccaagggctatggatttgtacactttgagacgcaggaagcagctgaaagagctattgaaaaaatgaatggaatgctcctaaatgatcgcaaagtatttgttggacgatttaagtctcgtaaagaacgagaagctgaacttggagctagggcaaaagaattcaccaatgtttacatcaagaattttggagaagacatggatgatgagcgccttaaggatctctttgggcctgccttaagtgtgaaagtaatgactgatgaaagtggaaaatccaaaggatttggatttgtaagctttgaaaggcatgaagatgcacagaaagctgtggatgagatgaacggaaaggagctcaatggaaaacaaatttatgttggtcgagctcagaaaaaggtggaacggcagacggaacttaagcgcaaatttgaacagatgaaacaagataggatcaccagataccagggtgttaatctttatgtgaaaaatcttgatgatggtattgatgatgaacgtctccggaaagagttttctccatttggtacaatcactagtgcaaaggttatgatggagggtggtcgcagcaaagggtttggttttgtatgtttctcctccccagaagaagccactaaagcagttacagaaatgaacggtagaattgtggccacaaagccattgtatgtagctttagctcagcgcaaagaagagcgccaggctcacctcactaaccagtatatgcagagaatggcaagtgtacgagctgttcccaaccctgtaatcaacccctaccagccagcacctccttcaggttacttcatggcagctatcccacag

SEQ ID NO: 167052 - DNA, 971 bp, Homo sapiens
  Payload ID: 12882
  Gene Symbol: PABPC1
  Gene Name: poly(A) binding protein, cytoplasmic 1
  ENST ID: ENST00000520868
  CDS Start-End: 1-509
cagcttcttcacaggttccacgagtcatgtcaacacagcgtgttgctaacacatcaacacagacaatgggtccacgtcctgcagctgcagccgctgcagctactcctgctgtccgcaccgttccacagtataaatatgctgcaggagttcgcaatcctcagcaacatcttaatgcacagccacaagttacaatgcaacagcctgctgttcatgtacaaggtcaggaacctttgactgcttccatgttggcatctgcccctcctcaagagcaaaagcaaatgttgggtgaacggctgtttcctcttattcaagccatgcaccctactcttgctggtaaaatcactggcatgttgttggagattgataattcagaacttcttcatatgctcgagtctccagagtcactccgttctaaggttgatgaagctgtagctgtactacaagcccaccaagctaaagaggctgcccagaaagcagttaacagtgccaccggtgttccaactgtttaaagtgagcttttccctctgattgatcagggaccatgaaaagaaacttgtgcttcaccgaagaaaaatatctaaacatcgaaaaacttaaatattatggaaaaaaaacattgcaaaatataaaataaataaaaaaaggaaaggaaactttgaaccttatgtaccgagcaaatgccaggtctagcaaacataatgctagtcctagattacttattgatttaaaaacaaaaaaacacaaaaaaatagtaaaatataaaaacaaattaatgttttatagaccctgggaaaaagaattttcagcaaagtacaaaaatttaaagcattcctttctttaattttgtaattctttactgtggaatagctcagaatgtcagttctgttttaagtaacagaattgataactgagcaaggaaacgtaatttggattataaaattcttgctttaataaaaattccttaaacagtg

SEQ ID NO: 167053 - DNA, 487 bp, Homo sapiens
  Payload ID: 12882
  Gene Symbol: PABPC1
  Gene Name: poly(A) binding protein, cytoplasmic 1
  ENST ID: ENST00000517990
  CDS Start-End: 1-411
ccacgtcctgcagctgcagccgctgcagctactcctgctgtccgcaccgttccacagtataaatatgctgcaggagttcgcaatcctcagcaacatcttaatgcacagccacaagttacaatgcaacagcctgctgttcatgtacaaggtcaggaacctttgactgcttccatgttggcatctgcccctcctcaagagcaaaagcaaatgttggccatgcaccctactcttgctggtaaaatcactggcatgttgttggagattgataattcagaacttcttcatatgctcgagtctccagagtcactccgttctaaggttgatgaagctgtagctgtactacaagcccaccaagctaaagaggctgcccagaaagcagttaacagtgccaccggtgttccaactgtttaaaattgatcagggaccatgaaaagaaacttgtgcttcaccgaagaaaaatatctaaacatcgaaaaacttaaatatt

SEQ ID NO: 167054 - DNA, 560 bp, Homo sapiens
  Payload ID: 12882
  Gene Symbol: PABPC1
  Gene Name: poly(A) binding protein, cytoplasmic 1
  ENST ID: ENST00000517403
  CDS Start-End: 1-560
tcaatggaaaacaaatttatgttggtcgagctcagaaaaaggtggaacggcagacggaacttaagcgcaaatttgaacagatgaaacaagataggatcaccagataccagagaatggcaagtgtacgagctgttcccaaccctgtaatcaacccctaccagccagcacctccttcaggttacttcatggcagctatcccacagactcagaaccgtgctgcatactatcctcctagccaaattgctcaactaagaccaagtcctcgctggactgctcagggtgccagacctcatccattccaaaatatgcccggtgctatccgcccagctgctcctagaccaccatttagtactatgagaccagcttcttcacaggttccacgagtcatgtcaacacagcgtgttgctaacacatcaacacagacaatgggtccacgtcctgcagctgcagccgctgcagctactcctgctgtccgcaccgttccacagtataaatatgctgcaggagttcgcaatcctcagcaacatcttaatgcacagccacaagttacaatgcaacag

SEQ ID NO: 167055 - DNA, 493 bp, Homo sapiens
  Payload ID: 12882
  Gene Symbol: PABPC1
  Gene Name: poly(A) binding protein, cytoplasmic 1
  ENST ID: ENST00000520804
  CDS Start-End: 363-493
ttctgcggccgacgcgcgtggcggcggtgccggctgggactcgtagtgcggtccggcagccgagaccgacccgcccgcccgcggccccgcagcagctccaagaaggaaccaagagaccgaggccttcccgctgcccggacccgacaccgccaccctcgctccccgccggcagccggcagccagcggcagtggatcgaccccgttctgcggccgttgagtagttttcaattccggttgatttttgtccctctgcgcttgctccccgctcccctccccccggctccggcccccagccccggcactcgctctcctcctctcacggaaaggtcgcggcctgtggccctgcgggcagccgtgccgagatgaaccccagtgcccccagctaccccatggcctcgctctacgtgggggacctccaccccgacgtgaccgaggcgatgctctacgagaagttcagcccggccgggcccatcctctccatccgggtctgcag

SEQ ID NO: 167056 - DNA, 736 bp, Homo sapiens
  Payload ID: 12882
  Gene Symbol: PABPC1
  Gene Name: poly(A) binding protein, cytoplasmic 1
  ENST ID: ENST00000522658
  CDS Start-End: 1-552
atccgcccagctgctcctagaccaccatttagtactatgagaccagcttcttcacaggttccacgagtcatgtcaacacagcgtgttgctaacacatcaacacagacaatgggtccacgtcctgcagctgcagccgctgcagctactcctgctgtccgcaccgttccacagtataaatatgctgcaggagttcgcaatcctcagcaacatcttaatgcacagccacaagttacaatgcaacagcctgctgttcatgtacaaggtcaggaacctttgactgcttccatgttggcatctgcccctcctcaagagcaaaagcaaatgttgggtgaacggctgtttcctcttattcaagccatgcaccctactcttgctggtaaaatcactggcatgttgttggagattgataattcagaacttcttcatatgctcgagtctccagagtcactccgttctaaggttgatgaagctgtagctgtactacaagcccaccaagctaaagaggctgcccagaaagcagttaacagtgccaccggtgttccaactgtttaaagtgagcttttccctctggtttgttgttttaagcttgttttcttcatcttttataaagtttgttgagcatattttgaaatgtacatagcaaaagatcattttacagttcatttaaatgtattgctaatttttcaaggaaaagtggaactaactatagaggaattaaaggaattttacccgttaa

SEQ ID NO: 167057 - DNA, 492 bp, Homo sapiens
  Payload ID: 12882
  Gene Symbol: PABPC1
  Gene Name: poly(A) binding protein, cytoplasmic 1
  ENST ID: ENST00000521067
  CDS Start-End: 310-492
gttggtgtcagcgagcgccgcggccgttggggactccagctcccagcaggcaccgcttctgcggccgacgcgcgtggcggcggtgccggctgggactcgtagtgcggtccggcagccgagaccgacccgcccgcccgcggccccgcagcagctccaagaaggaaccaagagaccgaggccttcccgctgcccggacccgacaccgccaccctcgctccccgccggcagccggcagccagcggcagtggatcgaccccgttctgcggccgttgagtcgcggcctgtggccctgcgggcagccgtgccgagatgaaccccagtgcccccagctaccccatggcctcgctctacgtgggggacctccaccccgacgtgaccgaggcgatgctctacgagaagttcagcccggccgggcccatcctctccatccgggtctgcagggacatgatcacccgccgctccttgggctacgcgtatgtgaacttccagcag

SEQ ID NO: 167058 - DNA, 818 bp, Homo sapiens
  Payload ID: 12882
  Gene Symbol: PABPC1
  Gene Name: poly(A) binding protein, cytoplasmic 1
  ENST ID: ENST00000523636
  CDS Start-End: 1-496
ccggaaagagttttctccatttggtacaatcactagtgcaaaggttatgatggagggtggtcgcagcaaagggtttggttttgtatgtttctcctccccagaagaagccactaaagcagttacagaaatgaacggtagaattgtggccacaaagccattgtatgtagctttagctcagcgcaaagaagagcgccaggctcacctcactaaccagtatatgcagagaatggcaagtgtacgagctgttcccaaccctgtaatcaacccctaccagccagcacctccttcaggttacttcatggcagctatcccacagactcagaaccgtgctgcatactatcctcctagccaaattgctcaactaagaccaagtcctcgctggactgctcagggtgccagacctcatccctgctgttcatgtacaaggtcaggaacctttgactgcttccatgttggcatctgcccctcctcaagagcaaaagcaaatgttgggtgaacggctgtttcctcttattcaagccatgcaccctactcttgctggtaaaatcactggcatgttgttggagattgataattcagaacttcttcatatgctcgagtctccagagtcactccgttctaaggttgatgaagctgtagctgtactacaagcccaccaagctaaagaggctgcccagaaagcagttaacagtgccaccggtgttccaactgtttaaaattgatcagggaccatgaaaagaaacttgtgcttcaccgaagaaaaatatctaaacatcgaaaaacttaaatattatggaaaaaaaacattgcaaaatata

SEQ ID NO: 167059 - DNA, 453 bp, Homo sapiens
  Payload ID: 12882
  Gene Symbol: PABPC1
  Gene Name: poly(A) binding protein, cytoplasmic 1
  ENST ID: ENST00000519363
  CDS Start-End: 339-453
cccttctccccggcggttagtgctgagagtgcggaccgagaccgacccgcccgcccgcggccccgcagcagctccaagaaggaaccaagagaccgaggccttcccgctgcccggacccgacaccgccaccctcgctccccgccggcagccggcagccagcggcagtggatcgaccccgttctgcggccgttgagtagttttcaattccggttgatttttgtccctctgcgcttgctccccgctcccctccccccggctccggcccccagccccggcactcgctctcctcctctcacggaaaggtcgcggcctgtggccctgcgggcagccgtgccgagatgaaccccagtgcccccagctaccccatggcctcgctctacgtgggggacctccaccccgacgtgaccgaggcgatgctctacgagaagttcagcccggccgggcccatcctct

SEQ ID NO: 167060 - DNA, 628 bp, Homo sapiens
  Payload ID: 12882
  Gene Symbol: PABPC1
  Gene Name: poly(A) binding protein, cytoplasmic 1
  ENST ID: ENST00000521865
  CDS Start-End: 242-628
gcggccgacgcgcgtggcggcggtgccggctgggactcgtagtgcggtccggccgagaccgacccgcccgcccgcggccccgcagcagctccaagaaggaaccaagagaccgaggccttcccgctgcccggacccgacaccgccaccctcgctccccgccggcagccggcagccagcggcagtggatcgaccccgttctgcggccgtcgcggcctgtggccctgcgggcagccgtgccgagatgaaccccagtgcccccagctaccccatggcctcgctctacgtgggggacctccaccccgacgtgaccgaggcgatgctctacgagaagttcagcccggccgggcccatcctctccatccgggtctgcagggacatgatcacccgccgctccttgggctacgcgtatgtgaacttccagcagccggcggacgcggagcgtgctttggacaccatgaattttgatgttataaagggcaagccagtacgcatcatgtggtctcagcgtgatccatcacttcgcaaaagtggagtaggcaacatattcattaaaaatctggacaaatccattgataataaagcactgtatgatacattttctgcttttggtaacatcctttcatgtaag

SEQ ID NO: 167061 - DNA, 2331 bp, Homo sapiens
  Payload ID: 12882
  Gene Symbol: PABPC1
  Gene Name: poly(A) binding protein, cytoplasmic 1
  ENST ID: ENST00000522387
  CDS Start-End: 317-2131
aaatcttttaaaaaaccccaaaaaaatttacaaaaaatccgcgtctcccccgccggagacttttattttttttcttcctcttttataaaataacccggtgaagcagccgagaccgacccgcccgcccgcggccccgcagcagctccaagaaggaaccaagagaccgaggccttcccgctgcccggacccgacaccgccaccctcgctccccgccggcagccggcagccagcggcagtggatcgaccccgttctgcggccgttgagtagttttcaattccggtcgcggcctgtggccctgcgggcagccgtgccgagatgaaccccagtgcccccagctaccccatggcctcgctctacgtgggggacctccaccccgacgtgaccgaggcgatgctctacgagaagttcagcccggccgggcccatcctctccatccgggtctgcagggacatgatcacccgccgctccttgggctacgcgtatgtgaacttccagcagccggcggacgcggagcgtgctttggacaccatgaattttgatgttataaagggcaagccagtacgcatcatgtggtctcagcgtgatccatcacttcgcaaaagtggagtggtttgtgatgaaaatggttccaagggctatggatttgtacactttgagacgcaggaagcagctgaaagagctattgaaaaaatgaatggaatgctcctaaatgatcgcaaagtatttgttggacgatttaagtctcgtaaagaacgagaagctgaacttggagctagggcaaaagaattcaccaatgtttacatcaagaattttggagaagacatggatgatgagcgccttaaggatctctttggcaagtttgggcctgccttaagtgtgaaagtaatgactgatgaaagtggaaaatccaaaggatttggatttgtaagctttgaaaggcatgaagatgcacagaaagctgtggatgagatgaacggaaaggagctcaatggaaaacaaatttatgttggtcgagctcagaaaaaggtggaacggcagacggaacttaagcgcaaatttgaacagatgaaacaagataggatcaccagataccagggtgttaatctttatgtgaaaaatcttgatgatggtattgatgatgaacgtctccggaaagagttttctccatttggtacaatcactagtgcaaaggttatgatggagggtggtcgcagcaaagggtttggttttgtatgtttctcctccccagaagaagccactaaagcagttacagaaatgaacggtagaattgtggccacaaagccattgtatgtagctttagctcagcgcaaagaagagcgccaggctcacctcactaaccagtatatgcagagaatggcaagtgtacgagctgttcccaaccctgtaatcaacccctaccagccagcacctccttcaggttacttcatggcagctatcccacagactcagaaccgtgctgcatactatcctcctagccaaattgctcaactaagaccaagtcctcgctggactgctcagggtgccagacctcatccattccaaaatatgcccggtgctatccgcccagctgctcctagaccaccatttagtactatgagaccagcttcttcacaggttccacgagtcatgtcaacacagcgtgttgctaacacatcaacacagacaatgggtccacgtcctgcagctgcagccgctgcagctactcctgctgtccgcaccgttccacagtataaatatgctgcaggagttcgcaatcctcagcaacatcttaatgcacagccacaagttacaatgcaacagcctgctgttcatgtacaaggtcaggaacctttgactgcttccatgttggcatctgcccctcctcaagagcaaaagcaaatgttgggtgaacggctgtttcctcttattcaagccatgcaccctactcttgctggtaaaatcactggcatgttgttggagattgataattcagaacttcttcatatgctcgagtctccagagtcactccgttctaaggttgatgaagctgtagctgtactacaagcccaccaagctaaagaggctgcccagaaagcagttaacagtgccaccggtgttccaactgtttaaaattgatcagggaccatgaaaagaaacttgtgcttcaccgaagaaaaatatctaaacatcgaaaaacttaaatattatggaaaaaaaacattgcaaaatataaaataaataaaaaaaggaaaggaaactttgaaccttatgtaccgagcaaatgccaggtctagcaaacataatgctagtcctagattacttattgattt

SEQ ID NO: 167062 - DNA, 2401 bp, Homo sapiens
  Payload ID: 12882
  Gene Symbol: PABPC1
  Gene Name: poly(A) binding protein, cytoplasmic 1
  ENST ID: ENST00000519004
  CDS Start-End: 364-2139
cccttctccccggcggttagtgctgagagtgcggagtgtgtgctccgggctcggaacacacatttattattaaaaaatccaaaaaaaatctaaaaaaatcttttaaaaaaccccaaaaaaatttacaaaaaatccgcgtctcccccgccggagacttttattttttttcttcctcttttataaaataacccggtgaagcagccgagaccgacccgcccgcccgcggccccgcagcagctccaagaaggaaccaagagaccgaggccttcccgctgcccggacccgacaccgccaccctcgctccccgccggcagccggcagccagcggcagtggatcgaccccgttctgcggccgttgaggacatgatcacccgccgctccttgggctacgcgtatgtgaacttccagcagccggcggacgcggagcgtgctttggacaccatgaattttgatgttataaagggcaagccagtacgcatcatgtggtctcagcgtgatccatcacttcgcaaaagtggagtaggcaacatattcattaaaaatctggacaaatccattgataataaagcactgtatgatacattttctgcttttggtaacatcctttcatgtaaggtggtttgtgatgaaaatggttccaagggctatggatttgtacactttgagacgcaggaagcagctgaaagagctattgaaaaaatgaatggaatgctcctaaatgatcgcaaagtatttgttggacgatttaagtctcgtaaagaacgagaagctgaacttggagctagggcaaaagaattcaccaatgtttacatcaagaattttggagaagacatggatgatgagcgccttaaggatctctttggcaagtttgggcctgccttaagtgtgaaagtaatgactgatgaaagtggaaaatccaaaggatttggatttgtaagctttgaaaggcatgaagatgcacagaaagctgtggatgagatgaacggaaaggagctcaatggaaaacaaatttatgttggtcgagctcagaaaaaggtggaacggcagacggaacttaagcgcaaatttgaacagatgaaacaagataggatcaccagataccagggtgttaatctttatgtgaaaaatcttgatgatggtattgatgatgaacgtctccggaaagagttttctccatttggtacaatcactagtgcaaaggttatgatggagggtggtcgcagcaaagggtttggttttgtatgtttctcctccccagaagaagccactaaagcagttacagaaatgaacggtagaattgtggccacaaagccattgtatgtagctttagctcagcgcaaagaagagcgccaggctcacctcactaaccagtatatgcagagaatggcaagtgtacgagctgttcccaaccctgtaatcaacccctaccagccagcacctccttcaggttacttcatggcagctatcccacagactcagaaccgtgctgcatactatcctcctagccaaattgctcaactaagaccaagtcctcgctggactgctcagggtgccagacctcatccattccaaaatatgcccggtgctatccgcccagctgctcctagaccaccatttagtactatgagaccagcttcttcacaggttccacgagtcatgtcaacacagcgtgttgctaacacatcaacacagacaatgggtccacgtcctgcagctgcagccgctgcagctactcctgctgtccgcaccgttccacagtataaatatgctgcaggagttcgcaatcctcagcaacatcttaatgcacagccacaagttacaatgcaacagcctgctgttcatgtacaaggtcaggaacctttgactgcttccatgttggcatctgcccctcctcaagagcaaaagcaaatgttgggtgaacggctgtttcctcttattcaagccatgcaccctactcttgctggtaaaatcactggcatgttgttggagattgataattcagaacttcttcatatgctcgagtctccagagtcactccgttctaaggttgatgaagctgtagctgtactacaagcccaccaagctaaagaggctgcccagaaagcagttaacagtgccaccggtgttccaactgtttaaaattgatcagggaccatgaaaagaaacttgtgcttcaccgaagaaaaatatctaaacatcgaaaaacttaaatattatggaaaaaaaacattgcaaaatataaaataaataaaaaaaggaaaggaaactttgaaccttatgtaccgagcaaatgccaggtctagcaaacataatgctagtcctagattacttattgatttaaaaacaaaaaaacacaaaaaaatagtaaaatataaaaacaaattaatgttttatagaccct

SEQ ID NO: 167063 - DNA, 593 bp, Homo sapiens
  Payload ID: 12882
  Gene Symbol: PABPC1
  Gene Name: poly(A) binding protein, cytoplasmic 1
  ENST ID: ENST00000522720
  CDS Start-End: 369-593
aggcaccgcttctgcggccgacgcgcgtggcggcggtgccggctgggactcgtagtgcggtccggccgagaccgacccgcccgcccgcggccccgcagcagctccaagaaggaaccaagagaccgaggccttcccgctgcccggacccgacaccgccaccctcgctccccgccggcagccggcagccagcggcagtggatcgaccccgttctgcggccgttgagtagttttcaattccggttgatttttgtccctctgcgcttgctccccgctcccctccccccggctccggcccccagccccggcactcgctctcctcctctcacggaaaggtcgcggcctgtggccctgcgggcagccgtgccgagatgaaccccagtgcccccagctaccccatggcctcgctctacgtgggggacctccaccccgacgtgaccgaggcgatgctctacgagaagttcagcccggccgggcccatcctctccatccgggtctgcagggacatgatcacccgccgctccttgggctacgcgtatgtgaacttccagcagccggcggacgcggagcgtgctttggacaccatgaattttgat

SEQ ID NO: 167064 - DNA, 522 bp, Homo sapiens
  Payload ID: 12882
  Gene Symbol: PABPC1
  Gene Name: poly(A) binding protein, cytoplasmic 1
  ENST ID: ENST00000523555
  CDS Start-End: 1-522
cagctaccccatggcctcgctctacgtgggggacctccaccccgacgtgaccgaggcgatgctctacgagaagttcagcccggccgggcccatcctctccatccgggtctgcagggacatgatcacccgccgctccttgggctacgcgtatgtgaacttccagcagccggcggacgcggagcgtgctttggacaccatgaattttgatgttataaagggcaagccagtggtttgtgatgaaaatggttccaagggctatggatttgtacactttgagacgcaggaagcagctgaaagagctattgaaaaaatgaatggaatgctcctaaatgatcgcaaagtatttgttggacgatttaagtctcgtaaagaacgagaagctgaacttggagctagggcaaaagaattcaccaatgtttacatcaagaattttggagaagacatggatgatgagcgccttaaggatctctttggcaagtttgggcctgccttaagtgtgaaagtaatgactgatgaaagtgg

SEQ ID NO: 167065 - DNA, 754 bp, Homo sapiens
  Payload ID: 12882
  Gene Symbol: PABPC1
  Gene Name: poly(A) binding protein, cytoplasmic 1
  ENST ID: ENST00000520142
  CDS Start-End: 401-754
gcttccccttctccccggcggttagtgctgagagtgcggagtgtgtgctccgggctcggaacacacatttattattaaaaaatccaaaaaaaatctaaaaaaatcttttaaaaaaccccaaaaaaatttacaaaaaatccgcgtctcccccgccggagacttttattttttttcttcctcttttataaaataacccggtgaagcagccgagaccgacccgcccgcccgcggccccgcagcagctccaagaaggaaccaagagaccgaggccttcccgctgcccggacccgacaccgccaccctcgctccccgccggcagccggcagccagcggcagtggatcgaccccgttctgcggccgttgagtcgcggcctgtggccctgcgggcagccgtgccgagatgaaccccagtgcccccagctaccccatggcctcgctctacgtgggggacctccaccccgacgtgaccgaggcgatgctctacgagaagttcagcccggccgggcccatcctctccatccgggtctgcagggacatgatcacccgccgctccttgggctacgcgtatgtgaacttccagcagccggcggacgcggagcgtgctttggacaccatgaattttgatgttataaagggcaagccagtacgcatcatgtggtctcagcgtgatccatcacttcgcaaaagtggagtaggcaacatattcattaaaaatctggacaaatccattgataataaagcactgtatgataca

SEQ ID NO: 167066 - DNA, 631 bp, Homo sapiens
  Payload ID: 12882
  Gene Symbol: PABPC1
  Gene Name: poly(A) binding protein, cytoplasmic 1
  ENST ID: ENST00000518196
  CDS Start-End: 308-631
cggaacacacatttattattaaaaaatccaaaaaaaatctaaaaaaatcttttaaaaaaccccaaaaaaatttacaaaaaatccgcgtctcccccgccggagacttttattttttttcttcctcttttataaaataacccggtgaagcagccgagaccgacccgcccgcccgcggccccgcagcagctccaagaaggaaccaagagaccgaggccttcccgctgcccggacccgacaccgccaccctcgctccccgccggcagccggcagccagcggcagtggatcgaccccgttctgcggccggacatgatcacccgccgctccttgggctacgcgtatgtgaacttccagcagccggcggacgcggagcgtgctttggacaccatgaattttgatgttataaagggcaagccagtacgcatcatgtggtctcagcgtgatccatcacttcgcaaaagtggagtaggcaacatattcattaaaaatctggacaaatccattgataataaagcactgtatgatacattttctgcttttggtaacatcctttcatgtaaggtggtttgtgatgaaaatggttccaagggctatggatttgtacactttgagacgcaggaagcagctgaaaga

SEQ ID NO: 167067 - DNA, 608 bp, Homo sapiens
  Payload ID: 12882
  Gene Symbol: PABPC1
  Gene Name: poly(A) binding protein, cytoplasmic 1
  ENST ID: ENST00000518293
  CDS Start-End: 1-128
atatgctcgagtctccagagtcactccgttctaaggttgatgaagctgtagctgtactacaagcccaccaagctaaagaggctgcccagaaagcagttaacagtgccaccggtgttccaactgtttaaaaaacaaggacattctcctccataaccatgacaccgccatgaaaacgatcagcaccgtcgaatcctcacgccccactcaagttccttgattgcttcaataatgtcctccgtagcaaaaggatctagttcaaaatcgggagttacatttcattgtcatgcctaaaacgtaagaattgctcattcactttggagcagttcttcagtctatccttgattttcatgaccttgacacttttgaacattatagaccagttattcaatagaatatctttcaatctgggtttgtccgatacctctttattattagattgaaatgatacattttggtggaactatcacagaattgacattgcattcttctcattacatcctgtctggtggcctgtgattctgttttatctcattaccaatggcgtttgttttgagcatttgattaagttgttatctgccactataaagttgctatttttctctttataa

SEQ ID NO: 167068 - DNA, 1569 bp, Homo sapiens
  Payload ID: 12882
  Gene Symbol: PABPC1
  Gene Name: poly(A) binding protein, cytoplasmic 1
  ENST ID: ENST00000610907
  CDS Start-End: 1-1569
atgctctacgagaagttcagcccggccgggcccatcctctccatccgggtctgcagggacatgatcacccgccgctccttgggctacgcgtatgtgaacttccagcagccggcggacgcggagcgtgctttggacaccatgaattttgatgttataaagggcaagccagtacgcatcatgtggtctcagcgtgatccatcacttcgcaaaagtggagtaggcaacatattcattaaaaatctggacaaatccattgataataaagcactgtatgatacattttctgcttttggtaacatcctttcatgtaaggtggtttgtgatgaaaatggttccaagggctatggatttgtacactttgagacgcaggaagcagctgaaagagctattgaaaaaatgaatggaatgctcctaaatgatcgcaaagtatttgttggacgatttaagtctcgtaaagaacgagaagctgaacttggagctagggcaaaagaattcaccaatgtttacatcaagaattttggagaagacatggatgatgagcgccttaaggatctctttggcaagtttgggcctgccttaagtgtgaaagtaatgactgatgaaagtggaaaatccaaaggatttggatttgtaagctttgaaaggcatgaagatgcacagaaagctgtggatgagatgaacggaaaggagctcaatggaaaacaaatttatgttggtcgagctcagaaaaaggtggaacggcagacggaacttaagcgcaaatttgaacagatgaaacaagataggatcaccagataccagggtgttaatctttatgtgaaaaatcttgatgatggtattgatgatgaacgtctccggaaagagttttctccatttggtacaatcactagtgcaaaggttatgatggagggtggtcgcagcaaagggtttggttttgtatgtttctcctccccagaagaagccactaaagcagttacagaaatgaacggtagaattgtggccacaaagccattgtatgtagctttagctcagcgcaaagaagagcgccaggctcacctcactaaccagtatatgcagagaatggcaagtgtacgagctgttcccaaccctgtaatcaacccctaccagccagcacctccttcaggttacttcatggcagctatcccacagactcagaaccgtgctgcatactatcctcctagccaaattgctcaactaagaccaagtcctcgctggactgctcagggtgccagacctcatcctgctgttcatgtacaaggtcaggaacctttgactgcttccatgttggcatctgcccctcctcaagagcaaaagcaaatgttgggtgaacggctgtttcctcttattcaagccatgcaccctactcttgctggtaaaatcactggcatgttgttggagattgataattcagaacttcttcatatgctcgagtctccagagtcactccgttctaaggttgatgaagctgtagctgtactacaagcccaccaagctaaagaggctgcccagaaagcagttaacagtgccaccggtgttccaactgtttaa

SEQ ID NO: 167069 - DNA, 1851 bp, Homo sapiens
  Payload ID: 12883
  Gene Symbol: PABPC1L
  Gene Name: poly(A) binding protein, cytoplasmic 1-like
  Uniprot ID: Q4VXU2
  ENST ID: ENST00000217073
  CDS Start-End: 1-1845
atgaacgccagcggttctggctacccgcttgcctcgctttacgtgggcgatctgcaccccgacgtgaccgaggccatgctctatgagaagttctctcccgccggccccatcctgtccatccgcgtgtgccgcgatgtagccacccggcgctcgctgggctacgcctacatcaacttccagcagcccgcggacgcggagcgggcactggacacaatgaactttgagatgctcaaaggccagcctattcgcatcatgtggtcccagcgagacccaggacttcgcaagtcaggtgtgggcaacatcttcatcaagaacctggaggactccattgacaacaaggctttatatgataccttctccacctttgggaacatcctctcttgcaaggtggcgtgtgacgagcatggctcccggggtttcggctttgtccattttgagacccatgaggccgcacagcaggccatcaacaccatgaatgggatgctgctgaatgaccgcaaagtctttgtgggtcacttcaagtctcgacgggagcgggaggcggagctgggggcgcgggccctggagttcaccaacatctacgtgaagaacctcccggtggatgtggacgagcaaggcctgcaggacctcttctcccagtttgggaaaatgctgagtgtgaaggtgatgagggacaacagcggccactcgcggtgctttggctttgtcaactttgagaagcatgaggaagcccagaaggccgtggtccatatgaacgggaaggaggtgagcgggcggctgctgtacgcgggccgggcccaaaagcgcgtggagcggcagaatgaactgaagcgcaggtttgagcagatgaagcaggaccggctgaggcgttaccagggtgtgaacttgtatgtgaagaatctggacgactccattgatgacgacaaactgaggaaagagttctctccctatggagtaattaccagtgcgaaggtgatgacagagggtggccacagcaaggggtttggctttgtgtgtttttcctccccagaagaggcgacaaaggccgtgacagagatgaacgggcgcatcgtgggcaccaagccactctacgtggcactggcccagcgcaaagaggagcggaaggccatcttgaccaaccagtacatgcagcgcctctccaccatgcggaccctgagcaaccccctcctgggctcctttcagcagccctccagctacttcctgcctgccatgccccagcctccagcccaggctgcatactatggctgtggcccagtgacacccacccagcctgcccccaggtggacatcccagccacctagaccttcctgtgcctcaatggtccggccaccagttgtgcctcggcgccccccggcccacatcagcagtgtcaggcaggcctccacccaggtgccacgcacggtgcctcatacccagagagtagccaacattggtactcagaccacaggacccagtggggtaggatgctgtacaccaggccggccgctcctgccgtgcaaatgttcctcagcagcacatagcacctatcgggtccaggagccggctgtgcacatcccaggacaggagcccctgaccgcgtccatgctggctgcggcgcccctgcatgagcaaaagcagatgattggggagcgtctctacccccttatccatgatgtccacacccagctggctggcaagatcacgggcatgctgctggagattgacaactcagagctgttgctcatgctggagtctccagaatccctccatgccaagatagacgaggcagtggccgtgctgcaggcacaccaggctatggagcagccgaaggcgtacatgcactgaaaccag

SEQ ID NO: 167070 - DNA, 1263 bp, Homo sapiens
  Payload ID: 12883
  Gene Symbol: PABPC1L
  Gene Name: poly(A) binding protein, cytoplasmic 1-like
  Uniprot ID: Q4VXU2
  ENST ID: ENST00000217074
  CDS Start-End: 83-1075
ggagggcttccgcccgggtgagcgcggggctgctgggtgacccggctcctgcttgccccgcagccccggccccctgcccaccatgaacgccagcggttctggctacccgcttgcctcgctttacgtgggcgatctgcaccccgacgtgaccgaggccatgctctatgagaagttctctcccgccggccccatcctgtccatccgcgtgtgccgcgatgtagccacccggcgctcgctgggctacgcctacatcaacttccagcagcccgcggacgcggagcgggcactggacacaatgaactttgagatgctcaaaggccagcctattcgcatcatgtggtcccagcgagacccaggacttcgcaagtcaggtgtgggcaacatcttcatcaagaacctggaggactccattgacaacaaggctttatatgataccttctccacctttgggaacatcctctcttgcaaggtggcgtgtgacgagcatggctcccggggtttcggctttgtccattttgagacccatgaggccgcacagcaggccatcaacaccatgaatgggatgctgctgaatgaccgcaaagtctttgtgggtcacttcaagtctcgacgggagcgggaggcggagctgggggcgcgggccctggagttcaccaacatctacgtgaagaacctcccggtggatgtggacgagcaaggcctgcaggacctcttctcccagtttgggaaaatgctgagtgtgaaggtgatgagggacaacagcggccactcgcggtgctttggctttgtcaactttgagaagcatgaggaagcccagaaggccgtggtccatatgaacgggaaggaggtgagcgggcggctgctgtacgcgggccgggcccaaaagcgcgtggagcggcagaatgaactgaagcgcaggtttgagcagatgaagcaggaccggctgaggcgttaccagggtgtgaacttgtatgtgaagaatctggacgactccattgatgacgacaaactgaggaaagagttctctccctatggagtaattaccagtgcgaagaagaggcgacaaaggccgtgacagagatgaacgggcgcatcgtgggcaccaagccactctacgtggcactggcccagcgcaaagaggagcggaaggccatcttgaccaaccagtacatgcagcgcctctccaccatgcggaccctgagcaaccccctcctgggctcctttcagcagccctccagctacttcctgcctgccatgccccag

SEQ ID NO: 167071 - DNA, 670 bp, Homo sapiens
  Payload ID: 12883
  Gene Symbol: PABPC1L
  Gene Name: poly(A) binding protein, cytoplasmic 1-like
  ENST ID: ENST00000217075
  CDS Start-End: 41-556
gtgactctgaaaattcttgcaaagctgagaaggtgcctcaatggtccggccaccagttgtgcctcggcgccccccggcccacatcagcagtgtcaggcaggcctccacccaggtgccacgcacggtgcctcatacccagagagtagccaacattggtactcagaccacaggacccagtggggtaggatgctgtacaccaggccggccgctcctgccgtgcaaatgttcctcagcagcacatagcacctatcgggtccaggagccggctgtgcacatcccaggacaggagcccctgaccgcgtccatgctggctgcggcgcccctgcatgagcaaaagcagatgattggggagcgtctctacccccttatccatgatgtccacacccagctggctggcaagatcacgggcatgctgctggagattgacaactcagagctgttgctcatgctggagtctccagaatccctccatgccaagaaaaggaaatcctcgcttccatggctgccaaaaggacagtgtttctggctctcagccctaaggccctgcaaactctaacttatttcccaattagtctgtatctatacttgggctctgtatgtgaatgaaggttggtcacccatccagcctattaccttttgctttgtgtattaaaagtgctgcaaaatctgc

SEQ ID NO: 167072 - DNA, 2129 bp, Homo sapiens
  Payload ID: 12883
  Gene Symbol: PABPC1L
  Gene Name: poly(A) binding protein, cytoplasmic 1-like
  Uniprot ID: Q4VXU2
  ENST ID: ENST00000255136
  CDS Start-End: 83-1927
ggagggcttccgcccgggtgagcgcggggctgctgggtgacccggctcctgcttgccccgcagccccggccccctgcccaccatgaacgccagcggttctggctacccgcttgcctcgctttacgtgggcgatctgcaccccgacgtgaccgaggccatgctctatgagaagttctctcccgccggccccatcctgtccatccgcgtgtgccgcgatgtagccacccggcgctcgctgggctacgcctacatcaacttccagcagcccgcggacgcggagcgggcactggacacaatgaactttgagatgctcaaaggccagcctattcgcatcatgtggtcccagcgagacccaggacttcgcaagtcaggtgtgggcaacatcttcatcaagaacctggaggactccattgacaacaaggctttatatgataccttctccacctttgggaacatcctctcttgcaaggtggcgtgtgacgagcatggctcccggggtttcggctttgtccattttgagacccatgaggccgcacagcaggccatcaacaccatgaatgggatgctgctgaatgaccgcaaagtctttgtgggtcacttcaagtctcgacgggagcgggaggcggagctgggggcgcgggccctggagttcaccaacatctacgtgaagaacctcccggtggatgtggacgagcaaggcctgcaggacctcttctcccagtttgggaaaatgctgagtgtgaaggtgatgagggacaacagcggccactcgcggtgctttggctttgtcaactttgagaagcatgaggaagcccagaaggccgtggtccatatgaacgggaaggaggtgagcgggcggctgctgtacgcgggccgggcccaaaagcgcgtggagcggcagaatgaactgaagcgcaggtttgagcagatgaagcaggaccggctgaggcgttaccagggtgtgaacttgtatgtgaagaatctggacgactccattgatgacgacaaactgaggaaagagttctctccctatggagtaattaccagtgcgaaggtgatgacagagggtggccacagcaaggggtttggctttgtgtgtttttcctccccagaagaggcgacaaaggccgtgacagagatgaacgggcgcatcgtgggcaccaagccactctacgtggcactggcccagcgcaaagaggagcggaaggccatcttgaccaaccagtacatgcagcgcctctccaccatgcggaccctgagcaaccccctcctgggctcctttcagcagccctccagctacttcctgcctgccatgccccagcctccagcccaggctgcatactatggctgtggcccagtgacacccacccagcctgcccccaggtggacatcccagccacctagaccttcctgtgcctcaatggtccggccaccagttgtgcctcggcgccccccggcccacatcagcagtgtcaggcaggcctccacccaggtgccacgcacggtgcctcatacccagagagtagccaacattggtactcagaccacaggacccagtggggtaggatgctgtacaccaggccggccgctcctgccgtgcaaatgttcctcagcagcacatagcacctatcgggtccaggagccggctgtgcacatcccaggacaggagcccctgaccgcgtccatgctggctgcggcgcccctgcatgagcaaaagcagatgattggggagcgtctctacccccttatccatgatgtccacacccagctggctggcaagatcacgggcatgctgctggagattgacaactcagagctgttgctcatgctggagtctccagaatccctccatgccaagatagacgaggcagtggccgtgctgcaggcacaccaggctatggagcagccgaaggcgtacatgcactgaaaccagaaaaggaaatcctcgcttccatggctgccaaaaggacagtgtttctggctctcagccctaaggccctgcaaactctaacttatttcccaattagtctgtatctatacttgggctctgtatgtgaatgaaggttggtcacccatccagcctattaccttttgctttgtgtattaaaagtgctgcaaaatctgccttg

SEQ ID NO: 167073 - DNA, 2100 bp, Homo sapiens
  Payload ID: 12883
  Gene Symbol: PABPC1L
  Gene Name: poly(A) binding protein, cytoplasmic 1-like
  ENST ID: ENST00000372819
  CDS Start-End: 902-1351
cctgagatgggaggaaggagctttcattacagccttgtgggtcttgactcaccagtccctgcaggagccagtggagttcctgccatggtgtccctgaggaggtgtagcttctcacctaccctgccgccaagcccctcagtctgggtcttcttttcccatgcagcctccagcccaggctgcatactatggctgtggcccagtgacacccacccagcctgcccccaggtggacatcccagccacctagaccttcctgtgagtgacccagccccttccactctcagactggcctattggtgtgggccccgtgaggcagtcataacacagggatgaaacctggctctgccacttcccaaggtgggtgacttcacttctctgagcctcagtttcctcttctgagcatgggcctgaatgagacgtgtgtaaagtaccaagcacagtggtgagccaatggaagacacgcagctagccaccagcagtcatcaccaaagatgcctctgatttgtgactctgaaaattcttgcaaagctgagaaggtgaaattcctctggctatattgttgaccaaaggccctcctctgtaagagtgaattgcacgctcacttgaaactatcttgagggactaaggtgtacaatcctggtgcttatgcagtttggggctctaggtagacacgagctggctttgaaattgtagattcctacactccccctttctggagttctgggtctaagtgaattgactcctatttctgttgtgaatgttgtagtttcccttcccattctcttggtggccctggaagcttctaggcacagtgtgccaccctgattattcccaccactccatccaacttttctctctctgtggtgtctgcaccacaagctgcctaccctccaggtgcctcaatggtccggccaccagttgtgcctcggcgccccccggcccacatcagcagtgtcaggcaggcctccacccaggtgccacgcacggtgcctcatacccagagagtagccaacattggtactcagaccacaggacccagtggggtaggatgctgtacaccaggccggccgctcctgccgtgcaaatgttcctcagcagcacatagcacctatcgggtccaggagccggctgtgcacatcccaggacaggagcccctgaccgcgtccatgctggctgcggcgcccctgcatgagcaaaagcagatgattggggagcgtctctacccccttatccatgatgtccacacccagctggctggcaagatcacgggcatgctgctggagattgacaactcagagctgttgctcatgctggagtctccagaatccctccatgccaagatttcagcttaaaatgccacccagagaccaagttcattctgtcaactgatctccagcacctggcccagagacggaaagtacaaagactagtaaaatacatccttgcccttaaggagctaagtacccaaaacctgtaatccatcttgagtcaccagagtacggttgctcagaaacagcagtggtgcggtggaaagggcatcaaccctgcgatccggacaagtcactccatccctctgatcatgcgtgcccacctaccacatgaggatatcacttcatagacttgctggaagggttcattgtgttagcctgttccctgagctctcttcgtgatcaagaagactgatcagataaatcaagagacttgcccaaaattacctaggaaatctgtagcagcagcagaaccaaactccggtccttgctaaatctagataccaggctagcttttctatggacccagaattaacccatacaaatgtacaagcttttccagaccagctggggtgagatgaatgaaaatggcagcaacatcaatacctcagcttcttcagcaacttcatcaagtaaggctgccatgaggaagtgggcctaaaggagagttttctagaacaaagaagggggcaaaggagtggcttgaaactgcaaaaagtgcagacaaaaaaaaaaaaaaaaagaatgaaatctggagaggatgtgaggagaggtctagcaaaatgattaaaaatttggacttagcatcaaagtcaaacagatccatattcaaa

SEQ ID NO: 167074 - DNA, 536 bp, Homo sapiens
  Payload ID: 12883
  Gene Symbol: PABPC1L
  Gene Name: poly(A) binding protein, cytoplasmic 1-like
  ENST ID: ENST00000372822
  CDS Start-End: 1-405
tgcaaatgttcctcagcagcacatagcacctatcgggtccaggagccggctgtgcacatcccaggacaggagcccctgaccgcgtccatgctggctgcggcgcccctgcatgagcaaaagcagatgattggcacctgttatcttgtcttaaaacgctggtcagactggatggtcctgagctttcttccactgctgctgtcctgtgactttgaggggagcgtctctacccccttatccatgatgtccacacccagctggctggcaagatcacgggcatgctgctggagattgacaactcagagctgttgctcatgctggagtctccagaatccctccatgccaagaaaaggaaatcctcgcttccatggctgccaaaaggacagtgtttctggctctcagccctaaggccctgcaaactctaacttatttcccaattagtctgtatctatacttgggctctgtatgtgaatgaaggttggtcacccatccagcctattaccttttgctttgtgtattaaaagtgctgcaaaatctgc

SEQ ID NO: 167075 - DNA, 2223 bp, Homo sapiens
  Payload ID: 12883
  Gene Symbol: PABPC1L
  Gene Name: poly(A) binding protein, cytoplasmic 1-like
  ENST ID: ENST00000372824
  CDS Start-End: 1519-2025
ttggctcgctgcaaactcttcctcctgggttcaagtgattcttgtgcctcagcctcccgggtagctgggattacaggtgcgtgccaccacactcagctaattttttgtatttttagtagagacggggtttcaccatgttggccaggctggtcttgaactcctgacctcaagtgatgtgccctccttgacctcctaaagtgctgggattacaggcatgagccaccatgatcggccctaaatttctttactatctacactattctaccctaagatgccaatgtctactgagactctccaaaacaggcacagattatccagcatttccccagcttagatggtcatttttttgtgggatgcctgttaacatctcccctggatgttaatgttctgaggagcatggtttgggaaaggacctcgtgggacttacaggaagtagaaagatgtcacccattaaaggccaccacggtaagaacattcctctccttttagcagttgcttaagctgcacaagttggagtaagatgtcaccctttttatccaggtcattgggttagctgacagggagccaagattgaaatctaagatctttgccctgcaggattcagggctaatggacatcctgagatgggaggaaggagctttcattacagccttgtgggtcttgactcaccagtccctgcaggagccagtggagttcctgccatggtgtccctgaggaggtgtagcttctcacctaccctgccgccaagcccctcagtctgggtcttcttttcccatgcagcctccagcccaggctgcatactatggctgtggcccagtgacacccacccagcctgcccccaggtggacatcccagccacctagaccttcctgtgagtgacccagccccttccactctcagactggcctattggtgtgggccccgtgaggcagtcataacacagggatgaaacctggctctgccacttcccaaggtgggtgacttcacttctctgagcctcagtttcctcttctgagcatgggcctgaatgagacgtgtgtaaagtaccaagcacagtggtgagccaatggaagacacgcagctagccaccagcagtcatcaccaaagatgcctctgatttgtgactctgaaaattcttgcaaagctgagaaggtgaaattcctctggctatattgttgaccaaaggccctcctctgtaagagtgaattgcacgctcacttgaaactatcttgagggactaaggtgtacaatcctggtgcttatgcagtttggggctctaggtagacacgagctggctttgaaattgtagattcctacactccccctttctggagttctgggtctaagtgaattgactcctatttctgttgtgaatgttgtagtttcccttcccattctcttggtggccctggaagcttctaggcacagtgtgccaccctgattattcccaccactccatccaacttttctctctctgtggtgtctgcaccacaagctgcctaccctccaggtgcctcaatggtccggccaccagttgtgcctcggcgccccccggcccacatcagcagtgtcaggcaggcctccacccaggtgccacgcacggtgcctcatacccagagagtagccaacattggtactcagaccacaggacccagtggggtaggatgctgtacaccaggccggccgctcctgccgtgcaaatgttcctcagcagcacatagcacctatcgggtccaggagccggctgtgcacatcccaggacaggagcccctgaccgcgtccatgctggctgcggcgcccctgcatgagcaaaagcagatgattggggagcgtctctacccccttatccatgatgtccacacccagctggctggcaagatcacgggcatgctgctggagattgacaactcagagctgttgctcatgctggagtctccagaatccctccatgccaagatagacgaggcagtggccgtgctgcaggcacaccaggctatggagcagccgaaggcgtacatgcactgaaaccagaaaaggaaatcctcgcttccatggctgccaaaaggacagtgtttctggctctcagccctaaggccctgcaaactctaacttatttcccaattagtctgtatctatacttgggctctgtatgtgaatgaaggttggtcacccatccagcctattaccttttgctttgtgtattaaaagtgctgcaaaatctgc

SEQ ID NO: 167076 - DNA, 854 bp, Homo sapiens
  Payload ID: 12883
  Gene Symbol: PABPC1L
  Gene Name: poly(A) binding protein, cytoplasmic 1-like
  ENST ID: ENST00000372826
  CDS Start-End: 1-458
ggcaggcctccacccaggtgccacgcacggtgcctcatacccagagagtagccaacattggtactcagaccacaggacccagtggggtaggatgctgtacaccaggccggccgctcctgccgtgcaaatgttcctcagcagcacatagcacctatcgggtccaggagccggctgtgcacatcccaggacaggagcccctgaccgcgtccatgctggctgcggcgcccctgcatgagcaaaagcagatgattggggagcgtctctacccccttatccatgatgtccacacccagctggctggcaagatcacgggcatgctgctggagattgacaactcagagctgttgctcatgctggagtctccagaatccctccatgccaaggcccagagacggaaagtacaaagactagtaaaatacatccttgcccttaaggagctaagtacccaaaacctgtaatccatcttgagtcaccagagtacggttgctcagaaacagcagtggtgcggtggaaagggcatcaaccctgcgatccggacaagtcactccatccctctgatcatgcgtgcccacctaccacatgaggatatcacttcatagacttgctggaagggttcattgtgttagcctgttccctgagctctcttcgtgatcaagaagactgatcagataaatcaagagacttgcccaaaattacctaggaaatctgtagcagcagcagaaccaaactccggtccttgctaaatctagataccaggctagcttttctatggacccagaattaacccatacaaatgtacaagcttttccagaccagctggggtgagatgaatgaaaatggcagcaacatcaata

SEQ ID NO: 167077 - DNA, 1178 bp, Homo sapiens
  Payload ID: 12883
  Gene Symbol: PABPC1L
  Gene Name: poly(A) binding protein, cytoplasmic 1-like
  ENST ID: ENST00000479873
  CDS Start-End: 391-915
gaaaattcttgcaaagctgagaaggtgaaattcctctggctatattgttgaccaaaggccctcctctgtaagagtgaattgcacgctcacttgaaactatcttgagggactaaggtgtacaatcctggtgcttatgcagtttggggctctaggtagacacgagctggctttgaaattgtagattcctacactccccctttctggagttctgggtctaagtgaattgactcctatttctgttgtgaatgttgtagtttcccttcccattctcttggtggccctggaagcttctaggcacagtgtgccaccctgattattcccaccactccatccaacttttctctctctgtggtgtctgcaccacaagctgcctaccctccaggtgcctcaatggtccggccaccagttgtgcctcggcgccccccggcccacatcagcagtgtcaggcaggcctccacccaggtgccacgcacggtgcctcatacccagagagtagccaacattggtactcagaccacaggacccagtggggtaggatgctgtacaccaggccggccgctcctgccgtgcaaatgttcctcagcagcacatagcacctatcgggtccaggagccggctgtgcacatcccaggacaggagcccctgaccgcgtccatgctggctgcggcgcccctgcatgagcaaaagcagatgattggcacctgttatcttgtcttaaaacgctggtcagactggatggtcctgagctttcttccactgctgctgtcctgtgactttgaggggagcgtctctacccccttatccatgatgtccacacccagctggctggcaagatcacgggcatgctgctggagattgacaactcagagctgttgctcatgctggagtctccagaatccctccatgccaagatagacgaggcagtggccgtgctgcaggcacaccaggctatggagcagccgaaggcgtacatgcactgaaaccagaaaaggaaatcctcgcttccatggctgccaaaaggacagtgtttctggctctcagccctaaggccctgcaaactctaacttatttcccaattagtctgtatctatacttgggctctgtatgtgaatgaaggttggtcacccatccagcctattaccttttgctttgtgtattaaaagtgctgcaaaatctgc

SEQ ID NO: 167078 - DNA, 1910 bp, Homo sapiens
  Payload ID: 12883
  Gene Symbol: PABPC1L
  Gene Name: poly(A) binding protein, cytoplasmic 1-like
  Uniprot ID: Q4VXU2
  ENST ID: ENST00000537323
  CDS Start-End: 21-1013
gccccggccccctgcccaccatgaacgccagcggttctggctacccgcttgcctcgctttacgtgggcgatctgcaccccgacgtgaccgaggccatgctctatgagaagttctctcccgccggccccatcctgtccatccgcgtgtgccgcgatgtagccacccggcgctcgctgggctacgcctacatcaacttccagcagcccgcggacgcggagcgggcactggacacaatgaactttgagatgctcaaaggccagcctattcgcatcatgtggtcccagcgagacccaggacttcgcaagtcaggtgtgggcaacatcttcatcaagaacctggaggactccattgacaacaaggctttatatgataccttctccacctttgggaacatcctctcttgcaaggtggcgtgtgacgagcatggctcccggggtttcggctttgtccattttgagacccatgaggccgcacagcaggccatcaacaccatgaatgggatgctgctgaatgaccgcaaagtctttgtgggtcacttcaagtctcgacgggagcgggaggcggagctgggggcgcgggccctggagttcaccaacatctacgtgaagaacctcccggtggatgtggacgagcaaggcctgcaggacctcttctcccagtttgggaaaatgctgagtgtgaaggtgatgagggacaacagcggccactcgcggtgctttggctttgtcaactttgagaagcatgaggaagcccagaaggccgtggtccatatgaacgggaaggaggtgagcgggcggctgctgtacgcgggccgggcccaaaagcgcgtggagcggcagaatgaactgaagcgcaggtttgagcagatgaagcaggaccggctgaggcgttaccagggtgtgaacttgtatgtgaagaatctggacgactccattgatgacgacaaactgaggaaagagttctctccctatggagtaattaccagtgcgaagaagaggcgacaaaggccgtgacagagatgaacgggcgcatcgtgggcaccaagccactctacgtggcactggcccagcgcaaagaggagcggaaggccatcttgaccaaccagtacatgcagcgcctctccaccatgcggaccctgagcaaccccctcctgggctcctttcagcagccctccagctacttcctgcctgccatgccccaggtgcctcaatggtccggccaccagttgtgcctcggcgccccccggcccacatcagcagtgtcaggcaggcctccacccaggtgccacgcacggtgcctcatacccagagagtagccaacattggtactcagaccacaggacccagtggggtaggatgctgtacaccaggccggccgctcctgccgtgcaaatgttcctcagcagcacatagcacctatcgggtccaggagccggctgtgcacatcccaggacaggagcccctgaccgcgtccatgctggctgcggcgcccctgcatgagcaaaagcagatgattggggagcgtctctacccccttatccatgatgtccacacccagctggctggcaagatcacgggcatgctgctggagattgacaactcagagctgttgctcatgctggagtctccagaatccctccatgccaagatagacgaggcagtggccgtgctgcaggcacaccaggctatggagcagccgaaggcgtacatgcactgaaaccagaaaaggaaatcctcgcttccatggctgccaaaaggacagtgtttctggctctcagccctaaggccctgcaaactctaacttatttcccaattagtctgtatctatacttgggctctgtatgtgaatgaaggttggtcacccatccagcctattaccttttgctttgtgtattaaaagtgctgcaaaat

SEQ ID NO: 167079 - DNA, 2237 bp, Homo sapiens
  Payload ID: 12884
  Gene Symbol: PABPC1L2A
  Gene Name: poly(A) binding protein, cytoplasmic 1-like 2A
  Uniprot ID: Q5JQF8
  ENST ID: ENST00000373519
  CDS Start-End: 127-729
gcggatgcggatgcggatgcgaaggtggcggccgaggtggcggccgaggtggcggctgcggcggccgccgcggatgcagatgcggatgagaccctcggtgactgtgaggggaacccagattttcagatggcctccctgtacgtgggcgacctgcaccctgaggtgaccgaggcaatgctgtacgagaagttcagtccagctgggcccatcctctccatccgcatctgcagggacaagatcacccgccgctcattgggctacgcgtatgtcaactaccagcaaccggtggacgccaagcgggccctggagaccctgaactttgatgtcataaagggcaggccagtgcgcatcatgtggtcccagagggacccgtcgctccgcaagagcggggtgggcaacgtcttcatcaagaacctgggcaagaccatcgacaacaaggcgctgtacaacatcttctcggcgttcggcaacatcctctcctgcaaagtggcctgtgacgaaaaggggcccaagggctacgggttcgtgcacttccaaaagcaggaatctgcggagcgggccatcgatgtgatgaatggcatgttcctgaactaccgcaaaattttcgtcgggagattcaagtcgcataaagaacgagaggccgaaaggggagcctgggccaggcagtccactagtgctgacgtcaaggatttcgaggaagacaccgacgaggaggccaccttgcgatgaagacatcccaggagctagccagccagcagagccaaaccttggctcacacccggtttacaaccccccacccccagccctcccccgccaacccaccagcagtgtatttattgtattgagagtgcaggtctctctctctctctctctccccttctctctccccgcttcctattttctccctccacctctcctctccttcccttcctctcccccgcccacccccaccaagggcgttgtgaataatcttactaatctgtgccatttgtaggttaaaggctgcctcttctccctgtggtttgatttaaaaagcattttcattctctctttgtttactgcacaggtggtacaatttcatggtagaatcatcagaaaggagaaggatatcagatgagggaagaaacaagagagtaattgctcccctggtcctactccccagagagaaccacttttacctttttggtgtgctgcttttccaggctctcttctctccctctctctcctttgctcacccccaccccgccttcccttttaacacaccgttatagaatggttcatgtatgtggtgtttcttaacctgctttttcagcaactaaaaccaaacaaaaatcaacccattgaacttctttccatgttatcaacaggcttatgaaacgtcatcttcagtgcctgcagagtgctccagtgtatccgtggaccttaacatttctgtaatcattcccgcattgttggacattcaggtggtgcctagttctttccctgtgtttaagaccaacattgcgtgctctgtgctttgatgagtgaatccttccttgtcaagccaaatctttgctagcatcccggtggtctccttaactgcggacttgcaagatccacatatagacattttaaagacttttcctgtgtgttgccaaaaggcccccttcataagcattgtaccgatttgcactcgtgccggccagcgcagctagtaaagagtatgcccgtttcccctgcatagtctcctggtcactgtaattgatcgtgtgtgtgcgtgcgtgtgtgtgtgtgtgtgtgtgtgtgtgtgtcttggccagcttggcgggctacaaagggtgtttcgctgtcctcggtagttttgctggaaacaaacactgcttatgaccccattcccctgtgccctcttcctgtccttttccctgttgtcagaaaagtaattcagcgtcattgcaagaaaaaaaaatcacaaagcagacaagttaccagaagaaaattaaagtcaccagtaatcatttctgatgattacacacacattccagaaacattttcatgcacacctctctgatattttctagaactacctgaaacatttttgtctgtaggtctagtttttttcttatgcatatatcatatatgtatattatgatgtacagactgtttttatatctgcttttcacacatacatgtgtgtgtatatttatacacacacatattcttgaacttcatttcatgtcattaaagatacttttaaaata

SEQ ID NO: 167080 - DNA, 2197 bp, Homo sapiens
  Payload ID: 12885
  Gene Symbol: PABPC1L2B
  Gene Name: poly(A) binding protein, cytoplasmic 1-like 2B
  Uniprot ID: Q5JQF8
  ENST ID: ENST00000373521
  CDS Start-End: 127-729
gcggatgcggatgcgaatgcgaaggtggcggccgaggtggcggccgaggtggcggctgcggcggccgccgcggatgcagatgcggatgagaccctcggtgactgtgaggggaacccagattttcagatggcctccctgtacgtgggcgacctgcaccctgaggtgaccgaggcaatgctgtacgagaagttcagtccagctgggcccatcctctccatccgcatctgcagggacaagatcacccgccgctcattgggctacgcgtatgtcaactaccagcaaccggtggacgccaagcgggccctggagaccctgaactttgatgtcataaagggcaggccagtgcgcatcatgtggtcccagagggacccgtcgctccgcaagagcggggtgggcaacgtcttcatcaagaacctgggcaagaccatcgacaacaaggcgctgtacaacatcttctcggcgttcggcaacatcctctcctgcaaagtggcctgtgacgaaaaggggcccaagggctacgggttcgtgcacttccaaaagcaggaatctgcggagcgggccatcgatgtgatgaatggcatgttcctgaactaccgcaaaattttcgtcgggagattcaagtcgcataaagaacgagaggccgaaaggggagcctgggccaggcagtccactagtgctgacgtcaaggatttcgaggaagacaccgacgaggaggccaccttgcgatgaagacatcccaggagctagccagccagcagagccaaaccttggctcacacccggtttacaaccccccacccccagccctcccccgccaacccaccagcagtgtatttattgtattgagagtgcaggtctctctctctctctctctccccttctctctccccgcttcctattttctccctccacctctcctctccttcccttcctctcccccgcccacccccaccaagggcgttgtgaataatcttactaatctgtgccatttgtaggttaaaggctgcctcttctccctgtggtttggtttaaaaagcattttcattctctctttgtttactgcacaggtggtacaatttcatggtagaatcatcagaaaggagaaggatatcagatgagggaagaaacaagagagtaattgctcccctggtcctactccccagagagaaccacttttacctttttggtgtgctgcttttccaggctctcttctctccctctctctcctttgctcacccccaccccgccttcccttttaacacaccgttatagaatggttcatgtatgtggtgtttcttaacctgctttttcagcaactaaaaccaaacaaaaatcaacccattgaacttctttccatgttatcaacaggcttatgaaatgtcatcttcagtgcctgcagagtgctccagtgtatccgtggaccttaacatttctgtaatcattcccgcattgttggacattcaggtggtgcctagttctttccctgtgtttaagaccaacattgcgtgctctgtgctttgatgagtgaatccttccttgtcaagccaaatctttgctagcatcccggtggtctccttaactgcggacttgcaagatccacatatagacattttaaagacttttcctgtgtgttgccaaaaggcccccttcataagcattgtaccgatttgcactcgtgccggccagcgcagctagtaaagagtatgcccgtttcccctgcatagcctcctggtcactgtaattgatcgtgtgtgtgcgtgcgtgcgtgtgtgcatgcgtgtgtgtgtctttgtgtgtgtgtcttggccagcttggcgggctgcaaagggtgtttccctgtcctcagtggttttgctgcaatcaaacactgtttattacccccttcccctgtgcccacttcctgtccttttccctgttgtcagaaaaataattcagcgtcattgcaggaaaaaaataatcacgaagcagacaagttaacagaagaaaattaatgtcaccagtaatcatttctgatgattacttatacattcctgaaacattttcatctgtatctgccctgtatttttcatgtgatatatatgtgaaattattgtatatactgtttcaatatctgctttttcacacagaaatatatattatagacatagatttatagatattcttgaactttcatgtcattaaatattcttctaaaatag

SEQ ID NO: 167081 - DNA, 3387 bp, Homo sapiens
  Payload ID: 12886
  Gene Symbol: PABPC3
  Gene Name: poly(A) binding protein, cytoplasmic 3
  Uniprot ID: Q9H361
  ENST ID: ENST00000281589
  CDS Start-End: 332-2227
ctcttttacaaaataacccggtgaagcagctgagcccgagccgcccgccagcggccccgcagcagctccaagaaggaactaagagaccaaggccttcctgctgcccggacccgacaccgctaccctggctccccgccggcagccggcagccagcggcagcggatcgaccccgttctgcggccgttgagtagttttcgatttcggctgatttttgtccctctgcgcttgcccccgctcccctccctccggctacgcccccggccccggcacgcgctctactcctgtaacggaaaggtcgcggcttgtgtgcctgcgggcagccgtgccgagaatgaaccccagcacccccagctacccaacggcctcgctctacgtgggggacctccaccccgacgtgactgaggcgatgctctacgagaagttcagcccggcagggcccatcctctccatccggatctgcagggacttgatcaccagcggctcctccaactacgcgtatgtgaacttccagcatacgaaggacgcggagcatgctctggacaccatgaattttgatgttataaagggcaagccagtacgcatcatgtggtctcagcgtgatccatcacttcgaaaaagtggagtgggcaacatattcgttaaaaatctggataagtccattaataataaagcactgtatgatacagtttctgcttttggtaacatcctttcgtgtaacgtggtttgtgatgaaaatggttccaagggttatggatttgtacactttgagacacacgaagcagctgaaagagctattaaaaaaatgaacggaatgctcctaaatggtcgcaaagtatttgttggacaatttaagtctcgtaaagaacgagaagctgaacttggagctagggcaaaagagttccccaatgtttacatcaagaattttggagaagacatggatgatgagcgccttaaggatctctttggcaagttcgggcccgccttaagtgtgaaagtaatgaccgatgaaagtggaaaatccaaaggatttggatttgtaagctttgaaaggcatgaagatgcacagaaagctgtagatgagatgaatggaaaggagctcaatggaaaacaaatttacgttggtcgagctcagaaaaaagtggaacggcagacggaacttaagcgcacatttgaacagatgaagcaagataggatcaccagataccaggttgttaatctttatgtgaaaaatcttgatgatggtattgatgatgaacgtctccggaaagcgttttctccatttggtacaatcactagtgcaaaggttatgatggaaggtggtcgcagcaaagggtttggttttgtatgtttctcctccccagaagaagccactaaagcagttacagaaatgaacggtagaattgtggccacaaagccattgtatgtagctttagctcagcgcaaagaagagcgccaggcttacctcactaacgagtatatgcagagaatggcaagtgtacgagctgtgcccaaccagcgagcacctccttcaggttacttcatgacagctgtcccacagactcagaaccatgctgcatactatcctcctagccaaattgctcgactaagaccaagtcctcgctggactgctcagggtgccagacctcatccattccaaaataagcccagtgctatccgcccaggtgctcctagagtaccatttagtactatgagaccagcttcttcacaggttccacgagtcatgtcaacgcagcgtgttgctaacacatcaacacagacagtgggtccacgtcctgcagctgctgctgctgctgcagctacccctgctgtgcgcacggttccacggtataaatatgctgcgggagttcgcaatcctcagcaacatcgtaatgcacagccacaagttacaatgcaacagcttgctgttcatgtacaaggtcaggaaactttgactgcctccaggttggcatctgcccctcctcaaaagcaaaagcaaatgttaggtgaacggctctttcctcttattcaagccatgcaccctactcttgctgggaaaatcactggcatgttgttggagattgataattcagaacttctttatatgctcgagtctccagagtcactccgttctaaggttgatgaagctgtagctgtactacaagcccaccaagctaaagaggctacccagaaagcagttaacagtgctaccggtgttccaactgtttaaaattgatcagagaccacgaaaagaaatttgtgcttcaccgaagaaaaatatctaaacatcgagaaactatgggaaaaaaaattgcaaaatctaaaataaaaaatgcaaaatctaaaataaaaaatggaaaggaaactttgaaccttatgtaccgagcaaatgcaaggtctagcaaatataatgctagtcctagattacttattgatttaaaaacaaaaaaaagattacttaattttgatttaaaaacaaaaaatcgtaaaatacaaaaaccagttaatgttttgtagaccctgggaaaagaattttcagcaaagtacaaaaatttaaagcattcctttaattttttaattctttactgtggaatagctcaaaatgtccattctgttttaagtaacagaattgataactgagcaaggaaacatggtttggattataaaattcttgctttaataaaaatttcttaaacagtgaaaaaaagaaaaatcatcaattttactaatagtctttctttacattttctattattctatctcccactatatttcaaatatgaaaatcactttttcaccaaaattttaggtctttacataatagtgtttatttttaatattcataaatgaaaatatgcaatgacaaaatagtaattataaattcagtaacatttgttcaaaattgtaagacaattattaatttatactgcattatttttaaataaaaaataaatacatagttttaaaaatctaattgaacaggaggctaaacatggttctgatcacagagataatcacttttaatcatttggttttagtgtttctggtagttgattttcttcaataataattgtacatagttatttcttggtttatcaattttgtaatttaactattgacttcctgctgtaacaaataaggatatgtttcatctacctcttcccaccatccctcctcctcctcccaatataatttatcactacttgtagctcctttattggtaatattaattaatataaatatttataattaatgttacacctagtgaattgtataaaaggacagcccatttgagcattctcctttaagatgagtagaggctgtgacattgcactacatagaaatataattataccatattactttgcaataaactatgtattatagaga

SEQ ID NO: 167082 - DNA, 3016 bp, Homo sapiens
  Payload ID: 12887
  Gene Symbol: PABPC4
  Gene Name: poly(A) binding protein, cytoplasmic 4 (inducible form)
  Uniprot ID: Q13310
  ENST ID: ENST00000372856
  CDS Start-End: 801-2696
gggcttcgcagcctgaggaaaaaaagagaaaaagataaaaaaaatctgaaaacgcttcaaaatcctgaaaaaaaaaaaggaaaagaaaaaacgaatcctcggagaacccgcggggaagtcactttcgtacgcttccggcctgccccgcgcccgccgccgcagcgcttggcgtccgtcggtctccgtccgtcggtccgggggtgagccgcccgcccggcccgccgtgccctccccccgctcgggccccgagccccgcgccccgcgcctgccccggcgcaccacgtgtccgtgctgcccttcgccgcccgcccggggctcgccgagtcggcgcccacaaagatttggtttccctctgccccggcggttgtaatcttaaaccgccggagcccgaggcctatatttatagagaaacgcgtgtccccgaggccgccgtgggcagcgtccggtcgcctcttaaaggatttttacccttcggaaggggattccccgtttaatttttttcctactttgattttttgaaatttggagcttcgcaccaggaccgcggagaagtgcaaagtcgcggggagggccgtattgtgcggagagccttttgtctgcggtgctgcggccgtgggagccggcccccgcctcccgtttccgtcccgtctccaagcccgccgactccagctcgtcctcgccgcgccggtgccacctgtgagccgcggcgcgggcccgggctccgaaggcgcccctttgtcctgcggcgggcccgataagaagtcctcctggcggggctcggggtggtggggggcggggagatgaacgctgcggccagcagctaccccatggcctccctgtacgtgggcgacctgcattcggacgtcaccgaggccatgctgtacgaaaagttcagccccgcggggcctgtgctgtccatccgggtctgccgcgatatgatcacccgccgctccctgggctatgcctacgtcaacttccagcagccggccgacgctgagcgggctttggacaccatgaactttgatgtgattaagggaaagccaatccgcatcatgtggtctcagagggatccctctttgagaaaatctggtgtgggaaacgtcttcatcaagaacctggacaaatctatagataacaaggcactttatgatactttttctgcttttggaaacatactgtcctgcaaggtggtgtgtgatgagaacggctctaagggttatgcctttgtccacttcgagacccaagaggctgccgacaaggccatcgagaagatgaatggcatgctcctcaatgaccgcaaagtatttgtgggcagattcaagtctcgcaaagagcgggaagctgagcttggagccaaagccaaggaattcaccaatgtttatatcaaaaactttggggaagaggtggatgatgagagtctgaaagagctattcagtcagtttggtaagaccctaagtgtcaaggtgatgagagatcccaatgggaaatccaaaggctttggctttgtgagttacgaaaaacacgaggatgccaataaggctgtggaagagatgaatggaaaagaaataagtggtaaaatcatatttgtaggccgtgcacaaaagaaagtagaacggcaggcagagttaaaacggaaatttgaacagttgaaacaggagagaattagtcgatatcagggggtgaatctctacattaagaacttggatgacactattgatgatgagaaattaaggaaagaattttctccttttggatcaattaccagtgctaaggtaatgctggaggatggaagaagcaaagggtttggcttcgtctgcttctcatctcctgaagaagcaaccaaagcagtcactgagatgaatggacgcattgtgggctccaagccactatatgttgccctggcccagaggaaggaagagagaaaggctcacctgaccaaccagtatatgcaacgagtggctggaatgagagcacttcctgccaatgccatcttaaatcagttccagcctgcagcgggtggctactttgtgccagcagtcccacaggctcagggaaggcctccatattatacacctaaccagttagcacagatgaggcctaatccacgctggcagcaaggtgggagacctcaaggcttccaaggaatgccaagtgctatacgccagtctgggcctcgtccaactcttcgccatctggctccaactggtaatgctccggcctctcgtggcctccctactaccactcagagagtcggcgttcccacagctgtgcagaacttagcgccacgcgctgctgttgctgctgctgctccccgggctgttgccccctacaaatacgcctccagtgtccgcagccctcatcctgccatacagcctctgcaggcaccccagcctgcggtccatgtgcaggggcaggagccactgactgcctccatgctggctgcagcacccccccaggaacagaagcagatgctgggagaacgcttgttcccactcatccaaacaatgcattcaaatctggctgggaagatcacgggaatgctgctggagatagacaactctgagctgctgcacatgttagagtcccccgagtctctccgctccaaggtggatgaagctgtagcagttctacaggctcatcatgccaagaaagaagctgcccagaaggtgggcgctgttgctgctgctacctcttagacaaggaaaaaccgattcaaaagccaaataaccccttatggaattcaactcaaggtttgaagacttcctagcttgtcctatggacctcaacaccaaggattacaaattgcaaatttaataggtcattttgtatcaaaaggtcaattatgaagcacctagaatttttcaattatacgaatatgttctttgggttctgctgtggcccagacagtgttaactttttttttattgtgggttttgattttttcccccagaaattggttttatttgatgtacccaagtcttacgtttcccaataaagaaaaaaaatctccataaaa

SEQ ID NO: 167083 - DNA, 3048 bp, Homo sapiens
  Payload ID: 12887
  Gene Symbol: PABPC4
  Gene Name: poly(A) binding protein, cytoplasmic 4 (inducible form)
  Uniprot ID: Q13310
  ENST ID: ENST00000372857
  CDS Start-End: 794-2728
gcagcctgaggaaaaaaagagaaaaagataaaaaaaatctgaaaacgcttcaaaatcctgaaaaaaaaaaaggaaaagaaaaaacgaatcctcggagaacccgcggggaagtcactttcgtacgcttccggcctgccccgcgcccgccgccgcagcgcttggcgtccgtcggtctccgtccgtcggtccgggggtgagccgcccgcccggcccgccgtgccctccccccgctcgggccccgagccccgcgccccgcgcctgccccggcgcaccacgtgtccgtgctgcccttcgccgcccgcccggggctcgccgagtcggcgcccacaaagatttggtttccctctgccccggcggttgtaatcttaaaccgccggagcccgaggcctatatttatagagaaacgcgtgtccccgaggccgccgtgggcagcgtccggtcgcctcttaaaggatttttacccttcggaaggggattccccgtttaatttttttcctactttgattttttgaaatttggagcttcgcaccaggaccgcggagaagtgcaaagtcgcggggagggccgtattgtgcggagagccttttgtctgcggtgctgcggccgtgggagccggcccccgcctcccgtttccgtcccgtctccaagcccgccgactccagctcgtcctcgccgcgccggtgccacctgtgagccgcggcgcgggcccgggctccgaaggcgcccctttgtcctgcggcgggcccgataagaagtcctcctggcggggctcggggtggtggggggcggggagatgaacgctgcggccagcagctaccccatggcctccctgtacgtgggcgacctgcattcggacgtcaccgaggccatgctgtacgaaaagttcagccccgcggggcctgtgctgtccatccgggtctgccgcgatatgatcacccgccgctccctgggctatgcctacgtcaacttccagcagccggccgacgctgagcgggctttggacaccatgaactttgatgtgattaagggaaagccaatccgcatcatgtggtctcagagggatccctctttgagaaaatctggtgtgggaaacgtcttcatcaagaacctggacaaatctatagataacaaggcactttatgatactttttctgcttttggaaacatactgtcctgcaaggtggtgtgtgatgagaacggctctaagggttatgcctttgtccacttcgagacccaagaggctgccgacaaggccatcgagaagatgaatggcatgctcctcaatgaccgcaaagtatttgtgggcagattcaagtctcgcaaagagcgggaagctgagcttggagccaaagccaaggaattcaccaatgtttatatcaaaaactttggggaagaggtggatgatgagagtctgaaagagctattcagtcagtttggtaagaccctaagtgtcaaggtgatgagagatcccaatgggaaatccaaaggctttggctttgtgagttacgaaaaacacgaggatgccaataaggctgtggaagagatgaatggaaaagaaataagtggtaaaatcatatttgtaggccgtgcacaaaagaaagtagaacggcaggcagagttaaaacggaaatttgaacagttgaaacaggagagaattagtcgatatcagggggtgaatctctacattaagaacttggatgacactattgatgatgagaaattaaggaaagaattttctccttttggatcaattaccagtgctaaggtaatgctggaggatggaagaagcaaagggtttggcttcgtctgcttctcatctcctgaagaagcaaccaaagcagtcactgagatgaatggacgcattgtgggctccaagccactatatgttgccctggcccagaggaaggaagagagaaaggctcacctgaccaaccagtatatgcaacgagtggctggaatgagagcacttcctgccaatgccatcttaaatcagttccagcctgcagcgggtggctactttgtgccagcagtcccacaggctcagggaaggcctccatattatacacctaaccagttagcacagatgaggcctaatccacgctggcagcaaggtgggagacctcaaggcttccaaggaatgccaagtgctatacgccagtctgggcctcgtccaactcttcgccatctggctccaactgggtctgagtgcccggaccgcttggctatggactttggtggggctggtgccgcccagcaagggctgactgacagctgccagtctggaggcgttcccacagctgtgcagaacttagcgccacgcgctgctgttgctgctgctgctccccgggctgttgccccctacaaatacgcctccagtgtccgcagccctcatcctgccatacagcctctgcaggcaccccagcctgcggtccatgtgcaggggcaggagccactgactgcctccatgctggctgcagcacccccccaggaacagaagcagatgctgggagaacgcttgttcccactcatccaaacaatgcattcaaatctggctgggaagatcacgggaatgctgctggagatagacaactctgagctgctgcacatgttagagtcccccgagtctctccgctccaaggtggatgaagctgtagcagttctacaggctcatcatgccaagaaagaagctgcccagaaggtgggcgctgttgctgctgctacctcttagacaaggaaaaaccgattcaaaagccaaataaccccttatggaattcaactcaaggtttgaagacttcctagcttgtcctatggacctcaacaccaaggattacaaattgcaaatttaataggtcattttgtatcaaaaggtcaattatgaagcacctagaatttttcaattatacgaatatgttctttgggttctgctgtggcccagacagtgttaactttttttttattgtgggttttgattttttcccccagaaattggttttatttgatgtacccaagtcttacgtttcccaataaagaaaaaaaatctccataaaa

SEQ ID NO: 167084 - DNA, 2753 bp, Homo sapiens
  Payload ID: 12887
  Gene Symbol: PABPC4
  Gene Name: poly(A) binding protein, cytoplasmic 4 (inducible form)
  Uniprot ID: Q13310
  ENST ID: ENST00000372858
  CDS Start-End: 451-2433
ctctgccccggcggttgtaatcttaaaccgccggagcccgaggcctatatttatagagaaacgcgtgtccccgaggccgccgtgggcagcgtccggtcgcctcttaaaggatttttacccttcggaaggggattccccgtttaatttttttcctactttgattttttgaaatttggagcttcgcaccaggaccgcggagaagtgcaaagtcgcggggagggccgtattgtgcggagagccttttgtctgcggtgctgcggccgtgggagccggcccccgcctcccgtttccgtcccgtctccaagcccgccgactccagctcgtcctcgccgcgccggtgccacctgtgagccgcggcgcgggcccgggctccgaaggcgcccctttgtcctgcggcgggcccgataagaagtcctcctggcggggctcggggtggtggggggcggggagatgaacgctgcggccagcagctaccccatggcctccctgtacgtgggcgacctgcattcggacgtcaccgaggccatgctgtacgaaaagttcagccccgcggggcctgtgctgtccatccgggtctgccgcgatatgatcacccgccgctccctgggctatgcctacgtcaacttccagcagccggccgacgctgagcgggctttggacaccatgaactttgatgtgattaagggaaagccaatccgcatcatgtggtctcagagggatccctctttgagaaaatctggtgtgggaaacgtcttcatcaagaacctggacaaatctatagataacaaggcactttatgatactttttctgcttttggaaacatactgtcctgcaaggtggtgtgtgatgagaacggctctaagggttatgcctttgtccacttcgagacccaagaggctgccgacaaggccatcgagaagatgaatggcatgctcctcaatgaccgcaaagtatttgtgggcagattcaagtctcgcaaagagcgggaagctgagcttggagccaaagccaaggaattcaccaatgtttatatcaaaaactttggggaagaggtggatgatgagagtctgaaagagctattcagtcagtttggtaagaccctaagtgtcaaggtgatgagagatcccaatgggaaatccaaaggctttggctttgtgagttacgaaaaacacgaggatgccaataaggctgtggaagagatgaatggaaaagaaataagtggtaaaatcatatttgtaggccgtgcacaaaagaaagtagaacggcaggcagagttaaaacggaaatttgaacagttgaaacaggagagaattagtcgatatcagggggtgaatctctacattaagaacttggatgacactattgatgatgagaaattaaggaaagaattttctccttttggatcaattaccagtgctaaggtaatgctggaggatggaagaagcaaagggtttggcttcgtctgcttctcatctcctgaagaagcaaccaaagcagtcactgagatgaatggacgcattgtgggctccaagccactatatgttgccctggcccagaggaaggaagagagaaaggctcacctgaccaaccagtatatgcaacgagtggctggaatgagagcacttcctgccaatgccatcttaaatcagttccagcctgcagcgggtggctactttgtgccagcagtcccacaggctcagggaaggcctccatattatacacctaaccagttagcacagatgaggcctaatccacgctggcagcaaggtgggagacctcaaggcttccaaggaatgccaagtgctatacgccagtctgggcctcgtccaactcttcgccatctggctccaactggtaatgctccggcctctcgtggcctccctactaccactcagagagtcgggtctgagtgcccggaccgcttggctatggactttggtggggctggtgccgcccagcaagggctgactgacagctgccagtctggaggcgttcccacagctgtgcagaacttagcgccacgcgctgctgttgctgctgctgctccccgggctgttgccccctacaaatacgcctccagtgtccgcagccctcatcctgccatacagcctctgcaggcaccccagcctgcggtccatgtgcaggggcaggagccactgactgcctccatgctggctgcagcacccccccaggaacagaagcagatgctgggagaacgcttgttcccactcatccaaacaatgcattcaaatctggctgggaagatcacgggaatgctgctggagatagacaactctgagctgctgcacatgttagagtcccccgagtctctccgctccaaggtggatgaagctgtagcagttctacaggctcatcatgccaagaaagaagctgcccagaaggtgggcgctgttgctgctgctacctcttagacaaggaaaaaccgattcaaaagccaaataaccccttatggaattcaactcaaggtttgaagacttcctagcttgtcctatggacctcaacaccaaggattacaaattgcaaatttaataggtcattttgtatcaaaaggtcaattatgaagcacctagaatttttcaattatacgaatatgttctttgggttctgctgtggcccagacagtgttaactttttttttattgtgggttttgattttttcccccagaaattggttttatttgatgtacccaagtcttacgtttcccaataaagaaaaaaaatctccataaaa

SEQ ID NO: 167085 - DNA, 2470 bp, Homo sapiens
  Payload ID: 12887
  Gene Symbol: PABPC4
  Gene Name: poly(A) binding protein, cytoplasmic 4 (inducible form)
  ENST ID: ENST00000372862
  CDS Start-End: 303-2150
tttcctactttgattttttgaaatttggagcttcgcaccaggaccgcggagaagtgcaaagtcgcggggagggccgtattgtgcggagagccttttgtctgcggtgctgcggccgtgggagccggcccccgcctcccgtttccgtcccgtctccaagcccgccgactccagctcgtcctcgccgcgccggtgccacctgtgagccgcggcgcgggcccgggctccgaaggcgcccctttgtcctgcggcgggcccgataagaagtcctcctggcggggctcggggtggtggggggcggggagatgaacgctgcggccagcagctaccccatggcctccctgtacgtgggcgacctgcattcggacgtcaccgaggccatgctgtacgaaaagttcagccccgcggggcctgtgctgtccatccgggtctgccgcgatatgatcacccgccgctccctgggctatgcctacgtcaacttccagcagccggccgacgctgagcgggctttggacaccatgaactttgatgtgattaagggaaagccaatccgcatcatgtggtctcagagggatccctctttgagaaaatctggtgtgggaaacgtcttcatcaagaacctggacaaatctatagataacaaggcactttatgatactttttctgcttttggaaacatactgtcctgcaaggtggtgtgtgatgagaacggctctaagggttatgcctttgtccacttcgagacccaagaggctgccgacaaggccatcgagaagatgaatggcatgctcctcaatgaccgcaaagtatttgtgggcagattcaagtctcgcaaagagcgggaagctgagcttggagccaaagccaaggaattcaccaatgtttatatcaaaaactttggggaagaggtggatgatgagagtctgaaagagctattcagtcagtttggtaagaccctaagtgtcaaggtgatgagagatcccaatgggaaatccaaaggctttggctttgtgagttacgaaaaacacgaggatgccaataaggctgtggaagagatgaatggaaaagaaataagtggtaaaatcatatttgtaggccgtgcacaaaagaaagtagaacggcaggcagagttaaaacggaaatttgaacagttgaaacaggagagaattagtcgatatcagggggtgaatctctacattaagaacttggatgacactattgatgatgagaaattaaggaaagaattttctccttttggatcaattaccagtgctaaggtaatgctggaggatggaagaagcaaagggtttggcttcgtctgcttctcatctcctgaagaagcaaccaaagcagtcactgagatgaatggacgcattgtgggctccaagccactatatgttgccctggcccagaggaaggaagagagaaaggctcacctgaccaaccagtatatgcaacgagtggctggaatgagagcacttcctgccaatgccatcttaaatcagttccagcctgcagcgggtggctactttgtgccagcagtcccacaggctcagggaaggcctccatattatacacctaaccagttagcacagatgaggcctaatccacgctggcagcaaggtgggagacctcaaggcttccaaggaatgccaagtgctatacgccagtctgggcctcgtccaactcttcgccatctggctccaactggcgttcccacagctgtgcagaacttagcgccacgcgctgctgttgctgctgctgctccccgggctgttgccccctacaaatacgcctccagtgtccgcagccctcatcctgccatacagcctctgcaggcaccccagcctgcggtccatgtgcaggggcaggagccactgactgcctccatgctggctgcagcacccccccaggaacagaagcagatgctgggagaacgcttgttcccactcatccaaacaatgcattcaaatctggctgggaagatcacgggaatgctgctggagatagacaactctgagctgctgcacatgttagagtcccccgagtctctccgctccaaggtggatgaagctgtagcagttctacaggctcatcatgccaagaaagaagctgcccagaaggtgggcgctgttgctgctgctacctcttagacaaggaaaaaccgattcaaaagccaaataaccccttatggaattcaactcaaggtttgaagacttcctagcttgtcctatggacctcaacaccaaggattacaaattgcaaatttaataggtcattttgtatcaaaaggtcaattatgaagcacctagaatttttcaattatacgaatatgttctttgggttctgctgtggcccagacagtgttaactttttttttattgtgggttttgattttttcccccagaaattggttttatttgatgtacccaagtcttacgtttcccaataaagaaaaaaaatctccataaaa

SEQ ID NO: 167086 - DNA, 1663 bp, Homo sapiens
  Payload ID: 12887
  Gene Symbol: PABPC4
  Gene Name: poly(A) binding protein, cytoplasmic 4 (inducible form)
  ENST ID: ENST00000421687
  CDS Start-End: 1-1652
gaaacgtcttcatcaagaacctggacaaatctatagataacaaggcactttatgatactttttctgcttttggaaacatactgtcctgcaaggtggtgtgtgatgagaacggctctaagggttatgcctttgtccacttcgagacccaagaggctgccgacaaggccatcgagaagatgaatggcatgctcctcaatgaccgcaaagtatttgtgggcagattcaagtctcgcaaagagcgggaagctgagcttggagccaaagccaaggaattcaccaatgtttatatcaaaaactttggggaagaggtggatgatgagagtctgaaagagctattcagtcagtttggtaagaccctaagtgtcaaggtgatgagagatcccaatgggaaatccaaaggctttggctttgtgagttacgaaaaacacgaggatgccaataaggctgtggaagagatgaatggaaaagaaataagtggtaaaatcatatttgtaggccgtgcacaaaagaaagtagaacggcaggcagagttaaaacggaaatttgaacagttgaaacaggagagaattagtcgatatcagggggtgaatctctacattaagaacttggatgacactattgatgatgagaaattaaggaaagaattttctccttttggatcaattaccagtgctaaggtaatgctggaggatggaagaagcaaagggtttggcttcgtctgcttctcatctcctgaagaagcaaccaaagcagtcactgagatgaatggacgcattgtgggctccaagccactatatgttgccctggcccagaggaaggaagagagaaaggctcacctgaccaaccagtatatgcaacgagtggctggaatgagagcacttcctgccaatgccatcttaaatcagttccagcctgcagcgggtggctactttgtgccagcagtcccacaggctcagggaaggcctccatattatacacctaaccagttagcacagatgaggcctaatccacgctggcagcaaggtgggagacctcaaggcttccaaggaatgccaagtgctatacgccagtctgggcctcgtccaactcttcgccatctggctccaactggtaatgctccggcctctcgtggcctccctactaccactcagagagtcgggtctgagtgcccggaccgcttggctatggactttggtggggctggtgccgcccagcaagggctgactgacagctgccagtctggaggcgttcccacagctgtgcagaacttagcgccacgcgctgctgttgctgctgctgctccccgggctgttgccccctacaaatacgcctccagtgtccgcagccctcatcctgccatacagcctctgcagccactgactgcctccatgctggctgcagcacccccccaggaacagaagcagatgctgggagaacgcttgttcccactcatccaaacaatgcattcaaatctggctgggaagatcacgggaatgctgctggagatagacaactctgagctgctgcacatgttagagtcccccgagtctctccgctccaaggtggatgaagctgtagcagttctacaggctcatcatgccaagaaagaagctgcccagaaggtgggcgctgttgctgctgctacctcttagacaaggaaaaa

SEQ ID NO: 167087 - DNA, 898 bp, Homo sapiens
  Payload ID: 12887
  Gene Symbol: PABPC4
  Gene Name: poly(A) binding protein, cytoplasmic 4 (inducible form)
  ENST ID: ENST00000451091
  CDS Start-End: 512-898
ctctctccgccccgggtcgctgccgcctccgccgctttcgggcttcgcagcctgaggaaaaaaagagaaaaagataaaaaaaatctgaaaacgcttcaaaatcctgaaaaaaaaaaaggaaaagaaaaaacgaatcctcggagaacccgcggggaagtcactttcgtacgcttccggcctgccccgcgcccgccgccgcagcgcttggcgtccgtcggtctccgtccgtcggtccggggcttcgcaccaggaccgcggagaagtgcaaagtcgcggggagggccgtattgtgcggagagccttttgtctgcggtgctgcggccgtgggagccggcccccgcctcccgtttccgtcccgtctccaagcccgccgactccagctcgtcctcgccgcgccggtgccacctgtgagccgcggcgcgggcccgggctccgaaggcgcccctttgtcctgcggcgggcccgataagaagtcctcctggcggggctcggggtggtggggggcggggagatgaacgctgcggccagcagctaccccatggcctccctgtacgtgggcgacctgcattcggacgtcaccgaggccatgctgtacgaaaagttcagccccgcggggcctgtgctgtccatccgggtctgccgcgatatgatcacccgccgctccctgggctatgcctacgtcaacttccagcagccggccgacgctgagcgggctttggacaccatgaactttgatgtgattaagggaaagccaatccgcatcatgtggtctcagagggatccctctttgagaaaatctggtgtgggaaacgtcttcatcaagaacctggacaaatctatagataacaaggcactttatgatactttttctgcttttggaaacatactgtcctgcaag

SEQ ID NO: 167088 - DNA, 876 bp, Homo sapiens
  Payload ID: 12887
  Gene Symbol: PABPC4
  Gene Name: poly(A) binding protein, cytoplasmic 4 (inducible form)
  ENST ID: ENST00000437136
  CDS Start-End: 1-587
ttcgccatctggctccaactggtaatgctccggcctctcgtggcctccctactaccactcagagagtcgggtctgagtgcccggaccgcttggctatggactttggtggggctggtgccgcccagcaagggctgactgacagctgccagtctggaggcgttcccacagctgtgcagaacttagcgccacgcgctgctgttgctgctgctgctccccgggctgttgccccctacaaatacgcctccagtgtccgcagccctcatcctgccatacagcctctgcaggcaccccagcctgcggtccatgtgcaggggcaggagccactgactgcctccatgctggctgcagcacccccccaggaacagaagcagatgctgggagaacgcttgttcccactcatccaaacaatgcattcaaatctggctgggaagatcacgggaatgctgctggagatagacaactctgagctgctgcacatgttagagtcccccgagtctctccgctccaaggtggatgaagctgtagcagttctacaggctcatcatgccaagaaagaagctgcccagaaggattcaaaagccaaataaccccttatggaattcaactcaaggtttgaagacttcctagcttgtcctatggacctcaacaccaaggattacaaattgcaaatttaataggtcattttgtatcaaaaggtcaattatgaagcacctagaatttttcaattatacgaatatgttctttgggttctgctgtggcccagacagtgttaactttttttttattgtgggttttgattttttcccccagaaattggttttatttgatgtacccaagtcttacgtttcccaataaagaaaaaaaatctccataaaa

SEQ ID NO: 167089 - DNA, 591 bp, Homo sapiens
  Payload ID: 12887
  Gene Symbol: PABPC4
  Gene Name: poly(A) binding protein, cytoplasmic 4 (inducible form)
  ENST ID: ENST00000474378
  CDS Start-End: 1-591
cttttggaaacatactgtcctgcaagagacagggtctccattgtccaacgatctggctccaacgatcctcctgctttggcctcccaaagcattgggattacaggcatgagccacagcacccaattgtggtgtgtgatgagaacggctctaagggttatgcctttgtccacttcgagacccaagaggctgccgacaaggccatcgagaagatgaatggcatgctcctcaatgaccgcaaagtatttgtgggcagattcaagtctcgcaaagagcgggaagctgagcttggagccaaagccaaggaattcaccaatgtttatatcaaaaactttggggaagaggtggatgatgagagtctgaaagagctattcagtcagtttggtaagaccctaagtgtcaaggtgatgagagatcccaatgggaaatccaaaggctttggctttgtgagttacgaaaaacacgaggatgccaataaggctgtggaagagatgaatggaaaagaaataagtggtaaaatcatatttgtaggccgtgcacaaaagaaagtagaacggcaggcagagttaaaacggaaatttgaacagttgaaac

SEQ ID NO: 167090 - DNA, 1212 bp, Homo sapiens
  Payload ID: 12887
  Gene Symbol: PABPC4
  Gene Name: poly(A) binding protein, cytoplasmic 4 (inducible form)
  ENST ID: ENST00000470443
  CDS Start-End: 1-337
caacttccagcagccggccgacgctgagcgggctttggacaccatgaactttgatgtgattaagggaaagccaatccgcatcatgtggtctcagagggatccctctttgagaaaatctggtgtgggaaacgtcttcatcaagaacctggacaaatctatagataacaaggcactttatgatactttttctgcttttggaaacatactgtcctgcaaggtggtgtgtgatgagaacggctctaagggttatgcctttgtccacttcgagacccaagaggctgccgacaaggccatcgagaagatgaatggcatgctcctcaatgaccgcaaagtgtgagtgtcccagtccggagcaacaaccatcgcatgagccagccgtggccccacctcgctattaactggcacacacaaggcggctactggttctcggcccaagtgtggcctgctcctacctctccactccagggctgatttgtgggcagattcaagtctcgcaaagagcgggaagctgagcttggagccaaagccaaggaattcaccaatgtttatatcaaaaactttggggaagaggtggatgatgagagtctgaaagagctattcagtcagtttggtaagaccctaagtgtcaaggtgatgagagatcccaatgggaaatccaaaggctttggctttgtgagttacgaaaaacacgaggatgccaataaggctgtggaagagatgaatggaaaagaaataagtggtaaaatcatatttgtaggccgtgcacaaaagaaagtagaacggcaggcagagttaaaacggaaatttgaacagttgaaacaggagagaattagtcgatatcagggggtgaatctctacattaagaacttggatgacactattgatgatgagaaattaaggaaagaattttctccttttggatcaattaccagtgctaaggtaatgctggaggatggaagaagcaaagggtttggcttcgtctgcttctcatctcctgaagaagcaaccaaagcagtcactgagatgaatggacgcattgtgggctccaagccactatatgttgccctggcccagaggaaggaagagagaaaggctcacctgaccaaccagtatatgcaacgagtggctggaatgagagcacttcctgccaatgccatcttaaatcagttccagcctgcagcgggtggctactttgtgccagcagtcccacag

SEQ ID NO: 167091 - DNA, 352 bp, Homo sapiens
  Payload ID: 12887
  Gene Symbol: PABPC4
  Gene Name: poly(A) binding protein, cytoplasmic 4 (inducible form)
  ENST ID: ENST00000530186
  CDS Start-End: 1-206
cactcatccaaacaatgcattcaaatctggctgggaagatcacgggaatgctgctggagatagacaactctgagctgctgcacatgttagagtcccccgagtctctccgctccaaggtggatgaagctgtagcagttctacaggctcatcatgccaagaaagaagctgcccagaaggtgggcgctgttgctgctgctacctcttagacaaggaaaaaccgtatgtgtggctattttcatttttgttcctatgagcattgttcctatgagcattgtctttgtggtttgacctgaggttgtatatatgctcactgcttagctctgggaatacaataagtacagttagttacacg

SEQ ID NO: 167092 - DNA, 746 bp, Homo sapiens
  Payload ID: 12887
  Gene Symbol: PABPC4
  Gene Name: poly(A) binding protein, cytoplasmic 4 (inducible form)
  ENST ID: ENST00000527718
  CDS Start-End: 1-746
cagagttaaaacggaaatttgaacagttgaaacaggagagaattagtcgatatcagggggtgaatctctacattaagaacttggatgacactattgatgatgagaaattaaggaaagaattttctccttttggatcaattaccagtgctaaggtaatgctggaggatggaagaagcaaagggtttggcttcgtctgcttctcatctcctgaagaagcaaccaaagcagtcactgagatgaatggacgcattgtgggctccaagccactatatgttgccctggcccagaggaaggaagagagaaaggctcacctgaccaaccagtatatgcaacgagtggctggaatgagagcacttcctgccaatgccatcttaaatcagttccagcctgcagcgggtggctactttgtgccagcagtcccacaggctcagggaaggcctccatattatacacctaaccagttagcacagatgaggcctaatccacgctggcagcaaggcttccaaggaatgccaagtgctatacgccagtctgggcctcgtccaactcttcgccatctggctccaactggtaatgctccggcctctcgtggcctccctactaccactcagagagtcggcgttcccacagctgtgcagaacttagcgccacgcgctgctgttgctgctgctgctccccgggctgttgccccctacaaatacgcctccagtgtccgcagccctcatcctgccatacagcctctgcag

SEQ ID NO: 167093 - DNA, 532 bp, Homo sapiens
  Payload ID: 12887
  Gene Symbol: PABPC4
  Gene Name: poly(A) binding protein, cytoplasmic 4 (inducible form)
  ENST ID: ENST00000531243
  CDS Start-End: 519-532
tctccgccccgggtcgctgccgcctccgccgctttcgggcttcgcagcctgaggaaaaaaagagaaaaagataaaaaaaatctgaaaacgcttcaaaatcctgaaaaaaaaaaaggaaaagaaaaaacgaatcctcggagaacccgcggggaagtcactttcgtacgcttccggcctgccccgcgcccgccgccgcagcgcttggcgtccgtcggtctccgtccgtcggtccggggaaatttggagcttcgcaccaggaccgcggagaagtgcaaagtcgcggggagggccgtattgtgcggagagccttttgtctgcggtgctgcggccgtgggagccggcccccgcctcccgtttccgtcccgtctccaagcccgccgactccagctcgtcctcgccgcgccggtgccacctgtgagccgcggcgcgggcccgggctccgaaggcgcccctttgtcctgcggcgggcccgataagaagtcctcctggcggggctcggggtggtggggggcggggagatgaacgctgcggc

SEQ ID NO: 167094 - DNA, 4944 bp, Homo sapiens
  Payload ID: 12888
  Gene Symbol: PABPC4L
  Gene Name: poly(A) binding protein, cytoplasmic 4-like
  Uniprot ID: P0CB38
  ENST ID: ENST00000421491
  CDS Start-End: 258-1370
gggcttcccgcccgcccgcagacgaccgccgttctgttgccgcgtcctaggagggccagattggtggctgtggggacttttggatgagggtgttgcctgagctgggggagtcgtgtctgaactccattgcttggcctttgtgtggtgatcccgaggcctccacacttgaaccgggccaaagctgtgacctagtatccccccacagggattgctcaaagaactccaggggacaaactcacagtggcaaggacaaggagatgaatgtagcagccaagtaccgcatggcctccctgtatgtgggtgacttacatgcagatgtcaccgaggacctgctgttcaggaagttcagcactgtggggcctgtgctgtccatccgcatttgcagggaccaggtcacccgccgctctctgggctatgcctacgtgaacttcttgcagctggctgatgcccagaaggcgctggacacaatgaactttgacatcataaaaggcaaatccatccgtctcatgtggtctcagcgcgatgcctacttgaggagatctggaattgggaacgtattcatcaagaatctggacaaatctatcgataacaaaaccctttatgaacatttttcagcttttggaaagatcctttcctccaaggtgatgagtgatgatcaaggctccaagggctatgcatttgtgcactttcagaaccagagtgctgcagacagggccattgaggagatgaatggaaaactactcaagggctgcaaggtgtttgttggcagattcaaaaaccgaaaagatcgtgaagctgaactcagaagcaaagccagtgaattcaccaatgtttacataaaaaactttggaggtgacatggatgatgagagattgaaggacgttttcagcaaatatggcaaaactctgagtgttaaggtgatgacagattccagtgggaaatccaaaggctttggctttgtgagttttgatagccatgaggctgccaagaaagctgttgaagaaatgaatggaagggacataaatgggcagctgatttttgtaggccgggctcaaaagaaagtcgagcgacaggctgagttaaagcaaatgtttgagcagctgaaaagggaacgaattcgtgggtgccagggggtaaaactctatattaagaaccttgatgacaccatcgatgatgaaaaactacgaaacgaattttcttcatttggatcaattagcagagttaaggtaatgcaggaagaggggcagagcaaagggtttggcttgatctgcttctcctctcctgaggatgctactaaagcaatgactgagatgaatggccgcatcttgggctccaaacctcttagcattgccttggcccagagacactaggaaagaaaaacgtacctttccagctagtatctgcagcaggtgggagaatgatagtgatctctgcctgaattgacctcagtaaatttcatattccacatgatgggtgcttagtttagtaaactttatgataaaacgttttttatacaaagccattttttttcttttgtggaaaaatagatggagcttagttcattttacagaggcacattttctaattttaatattgcacatttttcttattttgatatgttcatagcaataagtataaatagatatatttttacatttgaaccaaatgaaatgaggtaattatttgaatttattgcatatttattattttagtaatattgctagctttaatttcttctatgaaaatatgctcaaaatagttcttacaactaaagattccaaagtatttttaccaacagaaattttctaatttttcatccaagttttgagaaatcaaacttttagaaatttatagtacgaatttaaagacctaatttcattttgaattaatgcttaaaatagtcagatatagttgaatttcttttaaatttatatcctgacatgcttgtttttcggatggtttaaattaagatgatggaagtttttaatgttgcctaaaaactggctttatgtgttttgttctttccattagttgactataattcaggtacttactagttaatctaaattgtaacttgcactgtaaaaccttaacttctacattccttaagttataaatctgttatcaactcaggtgatccaaagttggcctggtcttaaatctcttcatacctatatggcttaatatattatcttaaatttttaccagatgctaatattatgaaaatcatacatacagattatagaaattctgtttaaaaacttttaaaatctcttttatattgttttgtgtagtgattttctcttagggttcagaaaagtaagttcctctatttttatgtactcacatctccttttattagaatgtggcagctatggaacccattaaggttcacttttagccttcattgatcagaaacactgattgattttctgatgaattgaagttacatcacttattctgttttctagcataatttttagtttagaaccattcccctattttccttgctctcctgcctttcatctatattcctcagctttttaaaatactttctaaaggatttttttatgttggcttttaatatgtgctgcttcaaatccatttggaaatcgaggcaagagttatttaattacatttaaataattgctttacaaattctgattcataccaaaggtatctagcaagcaagtgcttttgtttttactgttttcatatttttacttggcttagttttttctcataactattattcacattctctatttcatatattactaatataaaagaaatagtaaaatattttttggcaatacctcagcttatgaatgagaaaaatttgttgccttttatttttatagaaattatatgtatattctttgcacattttctaaaatgaaaatcttttagtccataaaaaattatggacaatgaaaaaattaaaagaatttgcatataattgtattatgcaaaccaattccctattataatttgttacatatttttctatttttttctctctctacatatatacacctaggtaatttaagaaaaataggataatattacaaatgttgtttgaaattgctttcttaaacaatatgctatggtcaacttttatgctcacaataattatttgtcttataatctgagtgacttttatgttttgttcaatgactgtaccaaaatataactaatttcttattgataaacttcttgttgctagataatttcttccttttttcttcttcctctgtcataaataacttggagattaacatccttgcgaacttatatatgcaaatatatctattttcttaagaaaatgtttagaagtagaattaatggttaaaaaagaatcaattttaaaaagtaattttgataaatattgcttaaatgctgtccagaatacttgtggcacttacatttccattgtcattgtaggagaatgcctatttccatatgctccaagaaacaagggttttttttaagctgttggtcaattcaacatgatatgtaaaacaaaccatttcatcattgctttatttcacttttgtaaattacaaaagttaaacagtatttgtgtactcactgaccatttgtattttcatacttataagttaatgtctcatgatcataatttattttcctgttggggtgttttttatttacatggatttttagatttctttgcatattatgactacattttagacttttccccctgatatttcactgtctttatagttttgaaggttattccaaaattgaatgttaagctggaaagttttagtattctactgaaatggctttgatgtcatgcttcaaaatattttgaacactttaaatacatatattcacacaaatatatatacacccacacaatttatctgtattgtgtttatgactttcagattttcatattctcaatgcttctaactaaaattttggttcataaaaagtatcttatataaaacctatagtaaatattttaaaaatgtgcttttccatttttaataacatgtattttggtaaatacttgattcagagagccaatgaattagagttggcatatgagtttcacatagattcttatactaggtaagtatttaccaaaacatgtatcagaagcagaaagttgttaaaaaggtttaccagacaacaagactggaaagtgtattaagtgtgcctggccttgacatcttgttctggataatctagtctacatcttaatttaggaaagctaatctgtaaaactgttcaaatatttgaacaatatttgataatgcttacataatctttcaagataatatcaggaaacagagttctttcatgtatgtaagtagttaataggacataacatcagatgtctagatgaattatagctatggcttaattacacaataatctgccttcttagtagaaattgcttatttccagcatttgctgtaaaaaaaaaaaagacagtcagtttacaaaaatatacaatcctatggatttaatttatttaaattttgttcattctaattttttttggtgcgtgataatagcaagttatcttagttgaaaatagagattcattcattaaagaatattaaatcttttgtgcccaagtgccttaataaataagtagaatcttaacttttctgataagcattccagtaaaagctaatgtacatagatatgccttgagccactgtttctactttcacccttctctccacacatattgccacgtctgctgtgtagttacctgcttacatgtacagccatttcaataaatgtattcttttaacattttatcttttaaatttcaaataggaatttatagttggtaaaaataaaaattttaaagtgatttaatattgtcattttcatgttctcaatattgttatagatccactgagaaaatgtcaaataaaatctaatatttcaaaggtgaaa

SEQ ID NO: 167095 - DNA, 3221 bp, Homo sapiens
  Payload ID: 12889
  Gene Symbol: PABPC5
  Gene Name: poly(A) binding protein, cytoplasmic 5
  Uniprot ID: Q96DU9
  ENST ID: ENST00000312600
  CDS Start-End: 215-1363
gcgcgtttgccagtcagtctctccggacctgcctcgagcctcaggctgctgaaatcaccgcgcctcactcgcctcgacagtgattctgagtctgcttttagcttccttttgcctgccttggctttttctgttcgtgaacagctgtttggcccatagcttagagaaagcagccttttttctcttcaaagagaacctcctcccagtgctcagagagatggggagcggggagcctaatcctgctggcaagaaaaagaagtatctcaaggccgctctgtacgtgggtgacttggacccagatgtcaccgaggacatgctctataagaagttcaggcctgctggccctctgcgattcacccgaatctgccgtgatccggtgacccgcagccccctgggctatgggtatgttaacttccgctttcccgcggatgcagagtgggccttgaacaccatgaattttgatttgattaatggaaaaccattccgccttatgtggtctcagccagatgaccgcttaagaaagtctggagtgggaaatatattcatcaaaaacctggacaaatccatagacaatagggccctgttttacttattttctgcttttgggaacattctgtcctgcaaagtcgtatgcgatgacaacggctctaagggttatgcctatgttcactttgacagcctggccgctgccaatagagccatctggcacatgaatggagtgcggctcaacaaccgccaggtgtatgttggcagattcaaattcccagaagagcgggcggctgaggtcagaaccagggatagagcaactttcaccaatgttttcgttaaaaacattggagacgacatagatgacgaaaaactgaaggaacttttctgtgaatatgggccaactgagagtgttaaagtaataagagatgccagtgggaaatctaaaggctttggatttgtgagatatgagacacacgaggctgcccaaaaggctgtgctagacttgcatggaaagtccatcgatggaaaagtcctctatgtagggcgagcacagaagaaaattgaacgcctggctgagttgaggcggagatttgaacggctgaggttaaaagaaaaaagtcggcccccaggggtgcctatctatattaagaacttggatgagacaatcaatgatgaaaaactgaaggaggaattttcttcctttgggtcaattagtcgggccaaagtgatgatggaagtggggcaaggcaaaggatttggtgtggtctgcttttcctcttttgaagaggctaccaaagcagtggatgagatgaatggccgcatagtgggctccaagcccctgcatgtcaccctgggccaggccaggcgcaggtgctgagaataagaatgctcagtttgtttcagccttagttggtgcctccttagtttgggctcctttgtgataaggggttattttatgctaattcacaagtttttttttgaagtgaattcttttgaaaaaaaaatgcaaaactagaaaactttattcattttagaatagaacataatttctaactgtaaaattgtcattttgtactttttttgatgtaatatccttagaaatctgtagaataaagtgtattcctccacttttttttcctgaacagtcaaggtgaggcaattgattgagtatatttcccttcttatttcagtaatactctattttttttcatgaaaatgtcaacatggttcttctgaatctatcacagtgaaaagttctaacttgtttttgagaagtcagtacagcaggggaaaacatatgtgatgcaattaacatctgcataatttcacttaaaattattatgcaaaaatgaatgttttttcaaaaaatgtgaaatgtattttattttctttatttgtattcttgtttcattttttaatatgttgtgaacatgctacagatttgatagtacttttgactaaatgttgggagtggtcgtattaacttcttgcccaaagaagtaagcatattggtgttttctcaattagtcactgagaaaattaacactttaggcagtggctatttaaagtaggaattgcatcttaaaaacctttcctaagagatttggtatgtgaggatactttcagtaccactcctaccattcatttttctaaattccttagtacatatacttggatcatgttaaattaacaagaaagatgaataactgcgctgaattgcctttacctataaataatttaatattttaccttcgggttttatcaactgtcaatataaaaggcagtactccacagaatgatgttgaaaaacttcttcgaagaacaccttctattaaacttgttatctcttgtaaattattgtgtgtgtccttttgataatattcacaggtgtttcaaaggtaaggaataggttgtctcttggattaagtcatatgcctccagccattatatgagaactgtgaaaccaatatggttttctttatgtcttggctgcttgaaaattaaaaaaaaaaaaggtttgttcaatattgccgttacatttattagcctgtaatttctaaattggagattctctacatttcacttgcagtttcctgttctcctcattgcctgccttccattcatattacacttatttttctattttttgtattacctttttaaaaatatataccagttcaagtccttttaggaagaagaaaatacctaatttatgtaaaatttaaataattacttttttataatatgattcacttatgccacagattcaacattagaatatgttttatctctactgtcagttttattaccttatatacaaatcttcattttcatacatagtacaatgtaaatatataactttgttaacacttttgttagctctttgaccataaaataatgacaataagctgtttctatgtatttgtttatctacaaattacaggtttatccatttgcaaatattttcaaaatggaaatcactgtttatattgattataaacataagacatgctcattgtaaaaaatgtacacaaggcagaaggaagtaaaatttccacagttcagaaataccacaattaatattttcaatgtgtaaatatcttttcataatttttcctacgtatacacaaacattttgaccaaaaatccacactatatgtactgttctgtatttttaattttaaactgaacaataatcatcttttcctgacaataaatatcaatctctatcatca

SEQ ID NO: 167096 - DNA, 1262 bp, Homo sapiens
  Payload ID: 12889
  Gene Symbol: PABPC5
  Gene Name: poly(A) binding protein, cytoplasmic 5
  ENST ID: ENST00000373105
  CDS Start-End: 332-988
cagaggaagcgggaagttacttagcacggttccgggtttctcgcgccccgcctgtcccccctccctatcactgctactggctcttggtccctccgttggactgtcctgcggagagaaaccccagcccatcggtctgcgctgggaccgcccgccgcgcatctgcccttcttcgctgactccgccccgcatctggccagacccgcctcgcgtcagagctgacccactcactgcgcgtttgccagtcagtctctccggacctgcctcgagcctcaggctgctgaaatcaccgcgcctcactcgcctggccgctgccaatagagccatctggcacatgaatggagtgcggctcaacaaccgccaggtgtatgttggcagattcaaattcccagaagagcgggcggctgaggtcagaaccagggatagagcaactttcaccaatgttttcgttaaaaacattggagacgacatagatgacgaaaaactgaaggaacttttctgtgaatatgggccaactgagagtgttaaagtaataagagatgccagtgggaaatctaaaggctttggatttgtgagatatgagacacacgaggctgcccaaaaggctgtgctagacttgcatggaaagtccatcgatggaaaagtcctctatgtagggcgagcacagaagaaaattgaacgcctggctgagttgaggcggagatttgaacggctgaggttaaaagaaaaaagtcggcccccaggggtgcctatctatattaagaacttggatgagacaatcaatgatgaaaaactgaaggaggaattttcttcctttgggtcaattagtcgggccaaagtgatgatggaagtggggcaaggcaaaggatttggtgtggtctgcttttcctcttttgaagaggctaccaaagcagtggatgagatgaatggccgcatagtgggctccaagcccctgcatgtcaccctgggccaggccaggcgcaggtgctgagaataagaatgctcagtttgtttcagccttagttggtgcctccttagtttgggctcctttgtgataaggggttattttatgctaattcacaagtttttttttgaagtgaattcttttgaaaaaaaaatgcaaaactagaaaactttattcattttagaatagaacataatttctaactgtaaaattgtcattttgtactttttttgatgtaatatccttagaaatctgtagaataaagtgtattcctccacttttttttcctgaacagtcaagg

SEQ ID NO: 167097 - DNA, 2001 bp, Homo sapiens
  Payload ID: 12890
  Gene Symbol: PABPN1
  Gene Name: poly(A) binding protein, nuclear 1
  Uniprot ID: Q86U42
  ENST ID: ENST00000216727
  CDS Start-End: 182-1102
cgggatttgagaatttggcgcagtgccccgccttagaggtggggccttatttgattgccaagtaatattccccaatggagtactagctcatggtgacgggcaggcagcttgactaatgagtcctcggcgtggccggcgcagctctccaatcgccgggcggcgggccccagtctgagcggcgatggcggcggcggcggcggcggcagcagcagcgggggctgcgggcggtcggggctccgggccggggcggcggcgccatcttgtgcccggggccggtggggaggccggggagggggccccggggggcgcaggggactacgggaacggcctggagtctgaggaactggagcctgaggagctgctgctggagcccgagccggagcccgagcccgaagaggagccgccccggccccgcgcccccccgggagctccgggccctgggcctggttcgggagcccccggcagccaagaggaggaggaggagccgggactggtcgagggtgacccgggggacggcgccattgaggacccggagctggaagctatcaaagctcgagtcagggagatggaggaagaagctgagaagctaaaggagctacagaacgaggtagagaagcagatgaatatgagtccacctccaggcaatgctggcccggtgatcatgtccattgaggagaagatggaggctgatgcccgttccatctatgttggcaatgtggactatggtgcaacagcagaagagctggaagctcactttcatggctgtggttcagtcaaccgtgttaccatactgtgtgacaaatttagtggccatcccaaagggtttgcgtatatagagttctcagacaaagagtcagtgaggacttccttggccttagatgagtccctatttagaggaaggcaaatcaaggtgatcccaaaacgaaccaacagaccaggcatcagcacaacagaccggggttttccacgagcccgctaccgcgcccggaccaccaactacaacagctcccgctctcgattctacagtggttttaacagcaggccccggggtcgcgtctacaggggccgggctagagcgacatcatggtattccccttactaaaaaaagtgtgtattaggaggagagagaggaaaaaaagaggaaagaaggaaaaaaaaaagaattaaaaaaaaaaaaaagaaaaacagaagatgaccttgatggaaaaaaaatattttttaaaaaaaagatatactgtggaaggggggagaatcccataactaactgctgaggagggacctgctttggggagtaggggaaggcccagggagtggggcagggggctgcttattcactctggggattcgccatggacacgtctcaactgcgcaagctgctgcccatgtttccctgccccacttcacccccttgggggctgctcaagggtaggtgggcgtgggtggtaggaggtttttttttttacccagggctctggaaggacaccaaactgttctgcttgttaccttccctccgtcttctcctcgcctttcacagtcccctcctgcctgctcctgtccagccaggtctaccacccaccccacccctcttctccggctccctgcccctccagattgcctggtgatctattttgtttccttttgtgtttctttttctgttttgagtgtctttctttgcaggtttctgtagccggaagatctccgttccgctcccagcggctccagtgtaaattccccttccccctggggaaatgcactaccttgttttggggggtttaggggtgtttttgtttttcagttgttttgtttttttgttttttttttttttcctttgccttttttcccttttatttggagggaatgggaggaagtgggaacagggaggtgggaggtggattttgtttatttttttagctcatttccaggggtgggaatttttttttaatatgtgtcatgaataaagttgtttttgaaaataaaaattgtttggccttttgggtgtaa

SEQ ID NO: 167098 - DNA, 2768 bp, Homo sapiens
  Payload ID: 12890
  Gene Symbol: PABPN1
  Gene Name: poly(A) binding protein, nuclear 1
  Uniprot ID: Q86U42
  ENST ID: ENST00000397276
  CDS Start-End: 14-904
agtctgagcggcgatggcggcggcggcggcggcggcagcagcagcgggggctgcgggcggtcggggctccgggccggggcggcggcgccatcttgtgcccggggccggtggggaggccggggagggggccccggggggcgcaggggactacgggaacggcctggagtctgaggaactggagcctgaggagctgctgctggagcccgagccggagcccgagcccgaagaggagccgccccggccccgcgcccccccgggagctccgggccctgggcctggttcgggagcccccggcagccaagaggaggaggaggagccgggactggtcgagggtgacccgggggacggcgccattgaggacccggagctggaagctatcaaagctcgagtcagggagatggaggaagaagctgagaagctaaaggagctacagaacgaggtagagaagcagatgaatatgagtccacctccaggcaatgctggcccggtgatcatgtccattgaggagaagatggaggctgatgcccgttccatctatgttggcaatgtggactatggtgcaacagcagaagagctggaagctcactttcatggctgtggttcagtcaaccgtgttaccatactgtgtgacaaatttagtggccatcccaaagggtttgcgtatatagagttctcagacaaagagtcagtgaggacttccttggccttagatgagtccctatttagaggaaggcaaatcaaggtgatcccaaaacgaaccaacagaccaggcatcagcacaacagaccggggttttccacgagcccgctaccgcgcccggaccaccaactacaacagctcccgctctcgattctacagtggttttaacagcaggccccggggtcgcgtctacaggtcaggatagatgggctgctcctctttcccccgcctcccgtgagccccgtatgcttcctcctctctggtctgaggaacctccctccccccacccctccccgtggtcttcaggaactttgtctcctgcctgtgcaggttgaggaaggtagttgcaggccaggccagaaggccagcctcatcatcttttctgcagtagaaattggtgataagggctgcatccctcccttggttcaaagaggcttccacccccagccttttttttcttgggagttggtggcatttgaaggtgtttgcggacaaaactgggaggaacagggcctccaggcagtgaaagcactgcttggacatttgttacttttttcggagttagggagggattgaagactgaacctcccttggaagaataccagaggctagctagttgatcctccccaacagccttgtgggaggattttgagatacttattctttatttgagccagtcttgcaaggttaacttctcactgggcctagtgtggtgcccaggtttttgccttgcttcacttctgtctctacatttaaatagacgggttaggcatataaaccttggcttttcataagctctacctgcctatccccaggagttagggaggatctatttgtgatggcctagggtttaagagctgtggaggactgaaaactggataaaaagggggtccttttccttgcccctgtctctcactcagatgcgcttctttttcgccactgtttggcagttttctgttaagcccccctccccctgccccagttctccaggtgcgttactatttctgggatcatggggtcagttttaggacacttgaacacttcttttccccccttcccttcacagtaactggggcaggggcctacggggaggggcttgtactgaactatctagtgatcacgttaacacctaactctccttctttcttccaggggccgggctagagcgacatcatggtattccccttactaaaaaaagtgtgtattaggaggagagagaggaaaaaaagaggaaagaaggaaaaaaaaaagaattaaaaaaaaaaaaaagaaaaacagaagatgaccttgatggaaaaaaaatattttttaaaaaaaagatatactgtggaaggggggagaatcccataactaactgctgaggagggacctgctttggggagtaggggaaggcccagggagtggggcagggggctgcttattcactctggggattcgccatggacacgtctcaactgcgcaagctgctgcccatgtttccctgccccacttcacccccttgggggctgctcaagggtaggtgggcgtgggtggtaggaggtttttttttttacccagggctctggaaggacaccaaactgttctgcttgttaccttccctccgtcttctcctcgcctttcacagtcccctcctgcctgctcctgtccagccaggtctaccacccaccccacccctcttctccggctccctgcccctccagattgcctggtgatctattttgtttccttttgtgtttctttttctgttttgagtgtctttctttgcaggtttctgtagccggaagatctccgttccgctcccagcggctccagtgtaaattccccttccccctggggaaatgcactaccttgttttggggggtttaggggtgtttttgtttttcagttgttttgtttttttgttttttttttttttcctttgccttttttcccttttatttggagggaatgggaggaagtgggaacagggaggtgggaggtggattttgtttatttttttagctcatttccaggggtgggaatttttttttaatatgtgtcatgaataaagttgtttttgaaaataaaaa

SEQ ID NO: 167099 - DNA, 778 bp, Homo sapiens
  Payload ID: 12890
  Gene Symbol: PABPN1
  Gene Name: poly(A) binding protein, nuclear 1
  ENST ID: ENST00000557702
  CDS Start-End: 193-699
gttgttctagagagggtagcttttcttttatcacgaccctcgcatggggcgagggaaatggccgagcatggctgaggccgcgctctggccgagagcagggcacagcccctgcgttggttcctcttaagctgtcctccataccctccccacttatattaggagctggaagctatcaaagctcgagtcagggagatggaggaagaagctgagaagctaaaggagctacagaacgaggtagagaagcagatgaatatgagtccacctccaggcaatgctggcccggtgatcatgtccattgaggagaagatggaggctgatgcccgttccatctatgttggcaatgtggactatggtgcaacagcagaagagctggaagctcactttcatggctgtggttcagtcaaccgtgttaccatactgtgtgacaaatttagtggccatcccaaagggtttgcgtatatagagttctcagacaaagagtcagtgaggacttccttggccttagatgagtccctatttagaggaaggcaaatcaaggtgatcccaaaacgaaccaacagaccaggcatcagcacaacagaccggggttttccacgagcccgctaccgcgcccggaccaccaactacaacagctcccgctctcgattctacagtggttttaacagcaggccccggggtcgcgtctacaggtcaggatagatgggctgctcctctttcccccgcctcccgtgagccccgtatgcttcctcctctctggtctgaggaacctccctccccc

SEQ ID NO: 167100 - DNA, 406 bp, Homo sapiens
  Payload ID: 12890
  Gene Symbol: PABPN1
  Gene Name: poly(A) binding protein, nuclear 1
  ENST ID: ENST00000555295
  CDS Start-End: 1-289
taccatactgtgtgacaaatttagtggccatcccaaagggtttgcgtatatagagttctcagacaaagagtcagtgaggacttccttggccttagatgagtccctatttagaggaaggcaaatcaaggtgatcccaaaacgaaccaacagaccaggcatcagcacaacagaccggggttttccacgagcccgctaccgcgcccggaccaccaactacaacagctcccgctctcgattctacagtggttttaacagcaggccccggggtcgcgtctacaggtcaggatagatgggctgctcctctttcccccgcctcccgggccgggctagagcgacatcatggtattccccttactaaaaaaagtgtgtattaggaggagagagaggaaaaaaagaggaaagaagg

SEQ ID NO: 167101 - DNA, 1220 bp, Homo sapiens
  Payload ID: 12890
  Gene Symbol: PABPN1
  Gene Name: poly(A) binding protein, nuclear 1
  ENST ID: ENST00000556821
  CDS Start-End: 672-1208
gccatcttgtgcccggggccggtggggaggccggggagggggccccggggggcgcaggggactacgggaacggcctggagtctgaggaactggagcctgaggagctgctgctggagcccgagccggagcccgagcccgaagaggagccgccccggccccgcgcccccccgggagctccgggccctgggcctggttcgggagcccccggcagccaagaggaggaggaggagccgggactggtcgagggtgacccgggggacggcgccattgaggacccggtgagggaaggagggcgagcgagcaggccggcggctggccggccgggtcactggaggcccagagctcgggcgagcgggtggcaggcggggggtggggttgggcggggaataacgtggctggggccgggtcgggccggggatgggtcagcgatcactacaaggggcccgactggcttgattcgggcgtcacggttgcctagtgttgttctagagagggtagcttttcttttatcacgaccctcgcatggggcgagggaaatggccgagcatggctgaggccgcgctctggccgagagcagggcacagcccctgcgttggttcctcttaagctgtcctccataccctccccacttatattaggagctggaagctatcaaagctcgagtcagggagatggaggaagaagctgagaagctaaaggagctacagaacgaggtagagaagcagatgaatatgagtccacctccaggcaatgctggcccggtgatcatgtccattgaggagaagatggaggctgatgcccgttccatctatgttggcaatgtggactatggtgcaacagcagaagagctggaagctcactttcatggctgtggttcagtcaaccgtgttaccatactgtgtgacaaatttagtggccatcccaaagggtttgcgtatatagagttctcagacaaagagtcagtgaggacttccttggccttagatgagtccctatttagaggaaggcaaatcaaggtgatcccaaaacgaaccaacagaccaggcatcagcacaacagaccggggttttccacgagcccgctaccgcgcccggaccaccaactacaacagctcccgctctcgattctacagtggttttaacagcaggccccggggtcgcgtctacaggggccgggctagagcgacatcatggtattccccttactaaaaaaagtgtgta

SEQ ID NO: 167102 - DNA, 873 bp, Homo sapiens
  Payload ID: 12891
  Gene Symbol: PABPN1L
  Gene Name: poly(A) binding protein, nuclear 1-like (cytoplasmic)
  Uniprot ID: A6NDY0
  ENST ID: ENST00000411789
  CDS Start-End: 55-822
gaggggagtggaggggaggcctcgcctggcccaccttcctcctgcccctctaccatgtggcccttcccgagccgctctctcttcccacccccgactcaggcctggctccagacggtctcctcagaccctgaggcccagggctggggggcctggaacgagaccaaggagattctggggccagagggtggggaagggaaggaggagaaagaggaggaagaggatgcagaggaagaccaggatggggatgcaggctttctgctgtctctgctggagcaagagaacctggctgagtgcccattgcctgaccaggagctggaggccatcaagatgaaggtgtgtgccatggagcaggccgaggggacgccacggcctccaggagtgcagcaacaggccgaggaagaggagggcaccgcggccgggcagctgctgagccctgagaccgtgggctgccccctctctgggacccccgaggagaaggtggaggctgaccacagatccgtctacgtgggcaacgtggactacgggggctccgccgaggagctggaggcccacttcagccgctgtggggaggtccaccgagtcacgatcctgtgtgacaagttctctggacaccccaaggggtgctgccgaaaagaaccaacttccctgggatcagctccacagaccgcgggggccttcgaggacacccaggctccaggggggcacccttcccccacagcggcctccagggcaggccccggctcagaccacaagggcagaaccgggcccgtggaaaattctcaccatggttttcaccgtattaaagggaagacccgattttgagagaggggctggggcctggatcaggagtaaaccacttgtgctccatcctgg

SEQ ID NO: 167103 - DNA, 1272 bp, Homo sapiens
  Payload ID: 12891
  Gene Symbol: PABPN1L
  Gene Name: poly(A) binding protein, nuclear 1-like (cytoplasmic)
  Uniprot ID: A6NDY0
  ENST ID: ENST00000419291
  CDS Start-End: 13-849
tgcccctctaccatgtggcccttcccgagccgctctctcttcccacccccgactcaggcctggctccagacggtctcctcagaccctgaggcccagggctggggggcctggaacgagaccaaggagattctggggccagagggtggggaagggaaggaggagaaagaggaggaagaggatgcagaggaagaccaggatggggatgcaggctttctgctgtctctgctggagcaagagaacctggctgagtgcccattgcctgaccaggagctggaggccatcaagatgaaggtgtgtgccatggagcaggccgaggggacgccacggcctccaggagtgcagcaacaggccgaggaagaggagggcaccgcggccgggcagctgctgagccctgagaccgtgggctgccccctctctgggacccccgaggagaaggtggaggctgaccacagatccgtctacgtgggcaacgtggactacgggggctccgccgaggagctggaggcccacttcagccgctgtggggaggtccaccgagtcacgatcctgtgtgacaagttctctggacaccccaagggttatgcctacatagagtttgccaccaagggctccgtgcaggccgccgtggagctggaccagagcctcttccggggccgggtcatcaaggtgctgccgaaaagaaccaacttccctgggatcagctccacagaccgcgggggccttcgaggacacccaggctccaggggggcacccttcccccacagcggcctccagggcaggccccggctcagaccacaagggcagaaccgggcccgtggaaaattctcaccatggttttcaccgtattaaagggaagacccgattttgagagaggggctggggcctggatcaggagtaaaccacttgtgctccatcctggggctggggcagggagtggcgcgggggcgaggccagaggagaggggtgtccagagcagccactggccccctcttggcggggggatggcccagtagggccttgtatggtggtccagacccaaggccacagccacgagtcacagccacggcccggtggtgagcctggcatgggccccacggggatctgcggggctctgggtgttgagggaggggaggagcagagtcccaggcagtgccaggccagcttggggttggcatgctcagctcttcaactaagtcattttaagaaaaatagaaacgtgtgtcttaatggtgaagcataaattattaaacttgggctctttttaaaagcaaa

SEQ ID NO: 167104 - DNA, 854 bp, Homo sapiens
  Payload ID: 12891
  Gene Symbol: PABPN1L
  Gene Name: poly(A) binding protein, nuclear 1-like (cytoplasmic)
  ENST ID: ENST00000547152
  CDS Start-End: 55-854
gaggggagtggaggggaggcctcgcctggcccaccttcctcctgcccctctaccatgtggcccttcccgagccgctctctcttcccacccccgactcaggcctggctccagacggtctcctcagaccctgaggcccagggctggggggcctggaacgagaccaaggagattctggggccagagggtggggaagggaaggaggagaaagaggaggaagaggatgcagaggaagaccaggatggggatgcaggctttctgctgtctctgctggagcaagagaacctggctgagtgcccattgcctgaccaggagctggaggccatcaagatgaaggtgtgtgccatggagcaggccgaggggacgccacggcctccaggagtgcagcaacaggccgaggaagaggagggcaccgcggccgggcagctgctgagccctgagaccgtgggctgccccctctctgggacccccgaggagaaggtggaggctgaccacagatccgtctacgtgggcaacttatgcctacatagagtttgccaccaagggctccgtgcaggccgccgtggagctggaccagagcctcttccggggccgggtcatcaaggtgctgccgaaaagaaccaacttccctgggatcagctccacagaccgcgggggccttcgaggacacccaggctccaggggggcacccttcccccacagcggcctccagggcaggccccggctcagaccacaagggcagaaccgggcccgtggaaaattctcaccatggttttcaccgtattaaagggaagacccgattttgagagaggggctggggcctggatcaggagtaaaccacttgtgctccatcctgg

SEQ ID NO: 167105 - DNA, 4519 bp, Homo sapiens
  Payload ID: 12892
  Gene Symbol: PAPOLA
  Gene Name: poly(A) polymerase alpha
  Uniprot ID: P51003
  ENST ID: ENST00000216277
  CDS Start-End: 221-2458
agcagttctagaacgttgctgtggtagcgctcgggcgccatgttaggacgaaggggaaggaggagaagcgcttaaagcggcgggagcggtgcgggagaggggttggacccagggctgaggcaggcccccccctccctcccgcctcagtggatcatgcccagggcggcagcggcggcggttgcgggggggaagtgactgggcggtgccggcgccggagacgatgccgtttccagttacaacacagggatcacaacaaacacaaccgccacagaagcactatggcattacttctcctatcagcttagcagcccccaaggagactgactgcgtacttacacagaaactaattgagacattgaaaccctttggggtttttgaagaggaagaggaactgcagcgcaggattttaattttgggaaaactaaataacctggtaaaagagtggatacgagaaatcagtgaaagcaagaatcttccacaatctgtaattgaaaatgttggaggaaaaatttttacatttggatcttacagattaggagtgcatacaaaaggtgctgatattgatgcgttgtgtgttgcaccaagacatgttgatcgaagtgactttttcacctcattctatgataagttgaaattacaggaagaagtaaaagatttaagagctgttgaagaggcattcgtaccagttattaaactctgttttgatgggatagagattgatattttgtttgcaagattagcactgcagacaattcctgaagatttggatctacgagatgacagtctgctaaaaaatttagatataagatgtataagaagtcttaacggttgcagggtaaccgatgaaattttacatctagtaccaaacattgacaacttcaggttaactctgagagctatcaaactatgggccaaacgccacaacatctattccaatatattaggtttcctcggtggtgtttcctgggctatgctagtagcaagaacttgccagctttatccaaatgcaatagcatcaactcttgtacataaatttttcttggtattttctaaatgggaatggccaaatccagtgctattgaaacagcctgaagaatgcaatcttaatttgcctgtatgggacccaagggtaaaccccagtgataggtaccatcttatgcctataattacaccagcatacccacaacagaactccacgtacaatgtgtccgtttcaacacggatggtcatggttgaggagtttaaacaaggtcttgctatcacagatgaaattttgctgagtaaggcagagtggtccaaactttttgaagctccaaacttctttcaaaagtacaagcattatattgtacttctagcaagtgcaccaacagaaaaacaacgcctggaatgggtgggcttggtggaatcaaaaatccgaatcctggttggaagcttggagaagaatgaatttattacactggctcatgtgaatccccagtcatttccagcacccaaagaaaatcccgacaaggaagaatttcgcacgatgtgggtgattgggttagtgtttaaaaaaacagaaaactctgaaaacctcagtgttgatctcacctatgatattcagtctttcacagatacagtttataggcaagcaataaacagcaagatgtttgaggtggatatgaaaattgctgcaatgcatgtaaaaagaaagcaactccatcaactactacctaatcatgtgcttcagaaaaagaaaaagcattcaacagaaggtgtcaaattgacagctctcaatgacagcagcctcgacttgtctatggacagtgataacagcatgtctgtgccttcacctactagtgctacgaagaccagtccattgaacagttctggcagctctcagggcagaaacagtcctgctccagctgtaacagcagcatctgtgaccaacatacaggctactgaagtttctgtgccacaagtaaattccagtgaaagctcagggggtacatcgagtgaaagcattcctcaaactgccacacaaccagccatttctccaccaccaaagcctacggtctccagagttgtttcttcaacacgtctggtaaacccaccacctagatcttcaggaaatgcagcaacttcaggaaatgcagcaacaaaaatacctactcctatagtaggagtcaagaggacatcctcacctcataaagaagagagtcccaagaaaaccaaaacagaagaggatgaaacaagtgaagatgctaactgtcttgctttgagtggacatgataaaacagaagcaaaggaacaacttgatacagagacaagtacaactcaatcagaaactattcagacagcggcttctctgttggcctctcagaaaacatccagtacagacctttctgatatccctgctctccctgcaaatcctattcctgttatcaagaattcaataaaactgagattgaatcggtaaaaacaacctcaggggtccataaacaatatctgccaactcaacctgttgtcttcaaatgctaaaaaaggagaatggagggtacaagactagacatgactgaaatggatttgggttttttggtgacctcccttactgggctaatcagcacttgatcggaagtccaggttagtatgtgaagccaggagtactattattattgtgttagcaacagttgcattaactatttcaaaaattactgcctttaaaaaaaacaacctcaagctatatttgtattcataattgacatctggattgggtttatgtttgatgcattgtttggaaaatttgcaatacaaactggcataagaattacttattctgatgatgcacttttatgtatttttcattagaaagtagaactaattttagattttcagcttgatggattttcagtttttcctgaagaattttctttaccattagtcttcaaattggatactgttgtgcagtggtgtactgttatacttcagagaaagggtaagagtacatctagttcagttcctatgaggtagctgtaacccttaaaaatgaaacgtcaactctagggtacatttgacattgaaagaatagttaggaaataacttggttttgatagggtcatgattaagaaatgatatattggttttatttatggaattgttttatagtgcatacaaatcagcgatcagccagcaaatatttttctttgagcttgtgaaagctctgtgttcttttgccttcaatctgttgtcttcaaaacaaacaaacaaaaaaagcttcttgcgcctttccctcccctgttttcttcctttttctttttgcttgtatgcacaaggtaggacttacttcgtaagaaacaaaatgccagtattttcttaagccatgatgtgaaaccaatgaccctgtgaccacatggcacagaacactaaattttggtcccatggctgaaacttgagggtgactaaaagtaatgcctgtgaaacatgatatctatctgggatggccatttgatctctaaaaggaattttgtacactccacagaactcctatctatagtaaaattgattttcagttttaaatgtgggcaaaaaggcattttctccaagattttaaaactaattcttatttttaaatggtttaccaaaatttgtcagtacattttacgtgtagaagcattttaaaaatcatttctagcaagcacttgacatctagtcagctctctactcctttattttgttttatcaaaagattaagagctcctttctttgaataaaataatttctcataattaagcagtagaagatctatcttcacaaagtatgagggatgccagatgttgataaacttactctttctgaatctggacaaagtcgacttaacagatttttctgatgagcatgttttatgaatcctccattgtgctccattctatcacatgtgcatttttcatgttaaactgcaattacttaatctcttcccctatccttctaaattaattttctgaagttggagtgtagtcttttcccccttaggctatgcattaatcgaagctttcttttcaccatgactttataatgtctagtaaacaatatttctacttcccacatctttgctttacacagtcaccttgcccttccttccaccaccgaagaaaaaagatggtcatactaacaggtgaaatgtacaaggtgtctgtgtgttttgtgtagcttcagagttagattgaaattaccaggcacagatttagtcttgtcattttgtttacacattggggaaaacaattcagtttattaaacgtttcatgtaactgcacccaagttttgccaagctggaaacttggaccttttctgtgtagtgactttttaattatagttttcataacctggagatcagactgttgctttcgcatgatgtatgtagtgtctcatgactggagtttgctttgttttatagtatctgtactccttgtatttttcaagagctattttgtaaacagatgatgtatttctccattgaaaacacaataaaaaaaaaacagcacaa

SEQ ID NO: 167106 - DNA, 2588 bp, Homo sapiens
  Payload ID: 12892
  Gene Symbol: PAPOLA
  Gene Name: poly(A) polymerase alpha
  ENST ID: ENST00000392990
  CDS Start-End: 36-2210
ggggaagtgactgggcggtgccggcgccggagacgatgccgtttccagttacaacacagggatcacaacaaacacaaccgccacagaagcactatggcattacttctcctatcagcttagcagcccccaaggagactgactgcgtacttacacagaaactaattgagacattgaaaccctttggggtttttgaagaggaagaggaactgcagcgcaggattttaattttgggaaaactaaataacctggtaaaagagtggatacgagaaatcagtgaaagcaagaatcttccacaatctgtaattgaaaatgttggaggaaaaatttttacatttggatcttacagattaggagtgcatacaaaaggtgctgatattgatgcgttgtgtgttgcaccaagacatgttgatcgaagtgactttttcacctcattctatgataagttgaaattacaggaagaagtaaaagatttaagagctgttgaagaggcattcgtaccagttattaaactctgttttgatgggatagagattgatattttgtttgcaagattagcactgcagacaattcctgaagatttggatctacgagatgacagtctgctaaaaaatttagatataagatgtataagaagtcttaacggttgcagggtaaccgatgaaattttacatctagtaccaaacattgacaacttcaggttaactctgagagctatcaaactatgggccaaacgccacaacatctattccaatatattaggtttcctcggtggtgtttcctgggctatgctagtagcaagaacttgccagctttatccaaatgcaatagcatcaactcttgtacataaatttttcttggtattttctaaatgggaatggccaaatccagtgctattgaaacagcctgaagaatgcaatcttaatttgcctgtatgggacccaagggtaaaccccagtgataggtaccatcttatgcctataattacaccagcatacccacaacagaactccacgtacaatgtgtccgtttcaacacggatggtcatggttgaggagtttaaacaaggtcttgctatcacagatgaaattttgctgagtaaggcagagtggtccaaactttttgaagctccaaacttctttcaaaagtacaagcattatattgtacttctagcaagtgcaccaacagaaaaacaacgcctggaatgggtgggcttggtggaatcaaaaatccgaatcctggttggaagcttggagaagaatgaatttattacactggctcatgtgaatccccagtcatttccagcacccaaagaaaatcccgacaaggaagaatttcgcacgatgtgggtgattgggttagtgtttaaaaaaacagaaaactctgaaaacctcagtgttgatctcacctatgatattcagtctttcacagatacagtttataggcaagcaataaacagcaagatgtttgaggtggatatgaaaattgctgcaatgcatgtaaaaagaaagcaactccatcaactactacctaatcatgtgcttcagaaaaagaaaaagcattcaacagaaggtgtcaaattgacagctctcaatgacagcagcctcgacttgtctatggacagtgataacagcatgtctgtgccttcacctactagtgctacgaagaccagtccattgaacagttctggcagctctcagggcagaaacagtcctgctccagctgtaacagcagcatctgtgaccaacatacaggctactgaagtttctgtgccacaagtaaattccagtgaaagctcagggggtacatcgagtgaaagcattcctcaaactgccacacaaccagccatttctccaccaccaaagcctacggtctccagagttgtttcttcaacacgtctggtaaacccaccacctagatcttcaggaaatgcagcaacttcaggaaatgcagcaacaaaaatacctactcctatagtaggagtcaagaggacatcctcacctcataaagaagagagtcccaagaaaaccaaaacagaagaggaacaacttgatacagagacaagtacaactcaatcagaaactattcagacagcggcttctctgttggcctctcagaaaacatccagtacagacctttctgatatccctgctctccctgcaaatcctattcctgttatcaagaattcaataaaactgagattgaatcggtaaaaacaacctcaggggtccataaacaatatctgccaactcaacctgttgtcttcaaatgctaaaaaaggagaatggagggtacaagactagacatgactgaaatggatttgggttttttggtgacctcccttactgggctaatcagcacttgatcggaagtccaggttagtatgtgaagccaggagtactattattattgtgttagcaacagttgcattaactatttcaaaaattactgcctttaaaaaaaacaacctcaagctatatttgtattcataattgacatctggattgggtttatgtttgatgcattgtttggaaaatttgcaatacaaactggcataagaattacttattctgatgatgcacttttatgta

SEQ ID NO: 167107 - DNA, 3264 bp, Homo sapiens
  Payload ID: 12892
  Gene Symbol: PAPOLA
  Gene Name: poly(A) polymerase alpha
  Uniprot ID: P51003
  ENST ID: ENST00000557320
  CDS Start-End: 193-1050
gctcgggcgccatgttaggacgaaggggaaggaggagaagcgcttaaagcggcgggagcggtgcgggagaggggttggacccagggctgaggcaggcccccccctccctcccgcctcagtggatcatgcccagggcggcagcggcggcggttgcgggggggaagtgactgggcggtgccggcgccggagacgatgccgtttccagttacaacacagggatcacaacaaacacaaccgccacagaagcactatggcattacttctcctatcagcttagcagcccccaaggagactgactgcgtacttacacagaaactaattgagacattgaaaccctttggggtttttgaagaggaagaggaactgcagcgcaggattttaattttgggaaaactaaataacctggtaaaagagtggatacgagaaatcagtgaaagcaagaatcttccacaatctgtaattgaaaatgttggaggaaaaatttttacatttggatcttacagattaggagtgcatacaaaaggtgctgatattgatgcgttgtgtgttgcaccaagacatgttgatcgaagtgactttttcacctcattctatgataagttgaaattacaggaagaagtaaaagatttaagagctgttgaagaggcattcgtaccagttattaaactctgttttgatgggatagagattgatattttgtttgcaagattagcactgcagacaattcctgaagatttggatctacgagatgacagtctgctaaaaaatttagatataagatgtataagaagtcttaacggttgcagggtaaccgatgaaattttacatctagtaccaaacattgacaacttcaggttaactctgagagctatcaaactatgggccaaacgccacaacatctattccaatatattaggtttcctcggtggtgtttcctgggctatgctagtagcaagaacttgccagctttatccaaatgcaatagcatcaactcttgtacataaatttttcttggtattttctaaatggtatgtgtttagattatattaaaataaaattgattgtagacactgaagtttagtcttatttctatgacatttctcagcttggtttcagattcaaattttagttcatgatgtagtcatgtaggcagccttggagatcacattgtgtataaaatggcaaactgaaactattttttttccctagtttggccaggatagtaaggcagattctatttgtacttccttgcataaacttaccctctgaataaactctgaattttagcagctaagatccaatttattgataggttgggaaatcagttactatacttttggataaaacttgtacacactacctctttcactcttttaattctctatctataggccattagtttcttgtgattgttttttttttctttttgctttcagcatttatttggcctaatattaaagatacgaattttcataagaagcttttaaagaataaattaacattaagtgcttcgggacaaaaaaggaatttgagattagtcattaacccagatttttttaagtttcttcgtttcatttccacatatgtcaactatgatttaagaaaaagtagaataaaagattactgccattttatattaattgccttggcccaaaaggtgagggttcttggtttttaatcaaattaagataaatcgtccattcctgttcttatgaactcctgctcctccctctgcaaaagagatgttcttttctagtaattttataaaaattagttatttgagacaatttagagctgtgttcaactggaggaaaaataaaaaaaatttagaaccatgccacacttttcagtacacattctggctgttttgggatttagtagcacttataatcaggtgtgataagattaaagaatgtcagaatttcttttttttttttttttttttttgtttgagacggagtctcactctgtcacccaggctggagtgcagtggcacgatcttggctcactgcaagctctgcctcctggattcatgctattctcctgccttagtctcctgagtagctgggactacaagcgcctgccaccacgcctggctaatttttgtatttttagtagagacgaggtttcactgtgttagccaggatggtctcgatctcctgacctcataatccgcccgcctcggcctcccatagtgctgggattacaggcgtgagccaccgcgtccggctgtcagaatttcttttaatgctacacatatataagcaaataatgtttttaagaagctaaccttgatgttaagagtggcaggtgttctccagtttttacctctttcatatgggaccaaagtagctagtttatggaacacatatgaaaatgtggttatgccaccaagttttactactacacttgtcttaccacttttaagtcatgaattctataattattcatacccctttgcctgtgatcagaagtaacttttaaaattatcacttgactttggatggaactagtataaaggcaggaattttgtctttcagtggagatttattctgttcaaggttgaagtggacacatcattatcttgggatggtacttctttatttaaatagtcctttaaagttctttgagtggcagagaacgtttttggtttcagtctgagaaggctaccaaatggtttaagttcatttcatagttaggagaaaaagattttgagtagtctaatgtcgtcagaaaggattaaaacgttgtatgtaccaagaaggcagaatgaagaaggatcacgttcacaaatgctgtatgtttaacaaaatacgtttagatggtaatatccaatagtcttatcaagtgctacaatctttttaaacagggaatggccaaatccagtgctattgaaacagcctgaagaatgcaatcttaatttgcctgtatgggacccaagggttagtgtattattttttcccctaccaattcacactgtgcaataacaagtaaaaatcatctgcataaactccagggagacttccagccttttacttatgaatggtcatgtccgtattacactttcttttagataacctcaactataattgtcctcaactataattgatgtgagaagcataattatgtaccctgtaaaccacatttaattgtacatagtttttaatacagattttactaacattttaatttattctatatagaactaccttgtaagtcaaagttgtgtgggcatttgtgctttaaaaaaaataaaaggatact

SEQ ID NO: 167108 - DNA, 2272 bp, Homo sapiens
  Payload ID: 12892
  Gene Symbol: PAPOLA
  Gene Name: poly(A) polymerase alpha
  ENST ID: ENST00000555626
  CDS Start-End: 847-2272
tccggaattgctggcggaacctctaactcgcccggccactccagcttctccgccccgtccacaaagaaaatcaaaacaacccgaaaacaaaacattgcctggtgtccagttacaacacagggatcacaacaaacacaaccgccacagaagcactatggcattacttctcctatcagcttagcagcccccaaggagactgactgcgtacttacacagaaactaattgagacattgaaaccctttggggtttttgaagaggaagaggaactgcagcgcaggattttaattttgggaaaactaaataacctggtaaaagagtggatacgagaaatcagtgaaagcaagaatcttccacaatctgtaattgaaaatgttggaggaaaaatttttacatttggatcttacagattaggagtgcatacaaaaggtgctgatattgatgcgttgtgtgttgcaccaagacatgttgatcgaagtgactttttcacctcattctatgataagttgaaattacaggaagaagtaaaagatttaagagctgttgaagaggcattcgtaccagttattaaactctgttttgatgggatagagattgatattttgtttgcaagattagcactgcagacaattcctgaagatttggatctacgagatgacagtctgctaaaaaatttagatataagatgtataagaagtcttaacggttgcagggtaaccgatgaaattttacatctagtaccaaacattgacaacttcaggttaactctgagagctatcaaactatgggccaaacgccacaacatctattccaatatattaggtttcctcggtggtgtttcctgggctatgctagtagcaagaacttgccagctttatccaaatgcaatagcatcaactcttgtacataaatttttcttggtattttctaaatgggaatggccaaatccagtgctattgaaacagcctgaagaatgcaatcttaatttgcctgtatgggacccaagggtaaaccccagtgataggtaccatcttatgcctataattacaccagcatacccacaacagaactccacgtacaatgtgtccgtttcaacacggatggtcatggttgaggagtttaaacaaggtcttgctatcacagatgaaattttgctgagtaaggcagagtggtccaaactttttgaagctccaaacttctttcaaaagtacaagcattatattgtacttctagcaagtgcaccaacagaaaaacaacgcctggaatgggtgggcttggtggaatcaaaaatccgaatcctggttggaagcttggagaagaatgaatttattacactggctcatgtgaatccccagtcatttccagcacccaaagaaaatcccgacaaggaagaatttcgcacgatgtgggtgattgggttagtgtttaaaaaaacagaaaactctgaaaacctcagtgttgatctcacctatgatattcagtctttcacagatacagtttataggcaagcaataaacagcaagatgtttgaggtggatatgaaaattgctgcaatgcatgtaaaaagaaagcaactccatcaactactacctaatcatgtgcttcagaaaaagaaaaagcattcaacagaaggtgtcaaattgacagctctcaatgacagcagcctcgacttgtctatggacagtgataacagcatgtctgtgccttcacctactagtgctacgaagaccagtccattgaacagttctggcagctctcagggcagaaacagtcctgctccagctgtaacagcagcatctgtgaccaacatacaggctactgaagtttctgtgccacaagtaaattccagtgaaagctcagggggtacatcgagtgaaagcattcctcaaactgccacacaaccagccatttctccaccaccaaagcctacggtctccagagttgtttcttcaacacgtctggtaaacccaccacctagatcttcaggaaatgcagcaacttcaggaaatgcagcaacaaaaatacctactcctatagtaggagtcaagaggacatcctcacctcataaagaagagagtcccaagaaaaccaaaacagaagaggatgaaacaagtgaagatgctaactgtcttgctttgagtggacatgataaaacagaagcaaaggaacaacttgatacagagacaagtacaactcaatcagaaactattcagacagcggcttctctgttggcctctcagaaaacatccagtacagacctttctgatatccctg

SEQ ID NO: 167109 - DNA, 892 bp, Homo sapiens
  Payload ID: 12892
  Gene Symbol: PAPOLA
  Gene Name: poly(A) polymerase alpha
  ENST ID: ENST00000553461
  CDS Start-End: 1-611
atgcgttgtgtgttgcaccaagacatgttgatcgaagtgactttttcacctcattctatgataagttgaaattacaggaagaagtaaaagatttaagagctgttgaagaggcattcgtaccagttattaaactctgttttgatgggatagagattgatattttgtttgcaagattagcactgcagacaattcctgaagatttggatctacgagatgacagtctgctaaaaaatttagatataagatgtataagaagtcttaacggttgcagggtaaccgatgaaattttacatctagtaccaaacattgacaacttcaggttaactctgagagctatcaaactatgggccaaacgccacaacatctattccaatatattaggtttcctcggtggtgtttcctgggctatgctagtagcaagaacttgccagctttatccaaatgcaatagcatcaactcttgtacataaatttttcttggtattttctaaatgggaatggccaaatccagtgctattgaaacagcctgaagaatgcaatcttaatttgcctgtatgggacccaagggttagtgtattattttttcccctaccaattcacactgtgcaataacaagtaaaaatcatctgcataaactccagggagacttccagccttttacttatgaatggtcatgtccgtattacactttcttttagataacctcaactataattgtcctcaactataattgatgtgagaagcataattatgtaccctgtaaaccacatttaattgtacatagtttttaatacagattttactaacattttaatttattctatatagaactaccttgtaagtcaaagttgtgtgggcatttgtgctttaaaaaaaataaaaggatactaaaa

SEQ ID NO: 167110 - DNA, 1421 bp, Homo sapiens
  Payload ID: 12892
  Gene Symbol: PAPOLA
  Gene Name: poly(A) polymerase alpha
  ENST ID: ENST00000557471
  CDS Start-End: 153-869
cgcttaaagcggcgggagcggtgcgggagaggggttggacccagggctgaggcaggcccccccctccctcccgcctcagtggatcatgcccagggcggcagcggcggcggttgcgggggggaagtgactgggcggtgccggcgccggagacgatgccgtttccagttacaacacagggatcacaacaaacacaaccgccacagaagcactatggcattacttctcctatcagcttagcagcccccaaggagactgactgcgtacttacacagaaactaattgagacattgaaaccctttggggtttttgaagaggaagaggaactgcagcgcaggattttaattttgggaaaactaaataacctggtaaaagagtggatacgagaaatcagtgaaagcaagaatcttccacaatctgtaattgaaaatgttggaggaaaaatttttacatttggatcttacagattaggagtgcatacaaaaggtgctgatattgatgcgttgtgtgttgcaccaagacatgttgatcgaagtgactttttcacctcattctatgataagttgaaattacaggaagaagtaaaagatttaagagctgttgaagaggcattcgtaccagttattaaactctgttttgatgggatagagattgatattttgtttgcaagattagcactgcagacaattcctgaagatttggatctacgagatgacagtctgctaaaaaatttagatataagatgtataagaagtcttaacggtatgagaaagcctacttccttttgtgtacttcagtttttgtcagatattagttgtttttacacaagttttgtattgaagctttttatagctatattgttaacacagtagtgagttaaataaaatgaactttgcctaataaactacagaagagtatgtagtagtttatttcactctacagtattttatacactgtatttcttctgtcattaatggtatactcaggacacttaaaaagaccatctgacttttgtactctgttgctagtgatttaggtttcatggcctaacccaaattaattttgatcctgttattctttagtaatgctttcagcattgctgagatcagaaggactactttggtacaattttatattagcatagcttgttactgtgctcttgaagagcagttcttggaaactttagtggattaagtcttccgcagtatatgtgggaagttttaattgtgaatctgaagttcaaattggggcaggttacagtttactttggtttctttggtcagtgcttacaataggagataaatgctttagattttttccccctctttattgaattagctttactggttctaccaaataaaaatttatgtttacttttaacttcaatctcagaaaatttggaagcattaccattaaacttttga

SEQ ID NO: 167111 - DNA, 584 bp, Homo sapiens
  Payload ID: 12892
  Gene Symbol: PAPOLA
  Gene Name: poly(A) polymerase alpha
  ENST ID: ENST00000556619
  CDS Start-End: 52-584
cggcggcggttgcgggggggaagtgactgggcggtgccggcgccggagacgatgccgtttccagttacaacacagggatcacaacaaacacaaccgccacagaagcactatggcattacttctcctatcagcttagcagcccccaaggagactgactgcgtacttacacagaaactaattgagacattgaaaccctttggggtttttgaagaggaagaggaactgcagcgcagtaatgatctggaatacttgattgataattgttttatcaacaggattttaattttgggaaaactaaataacctggtaaaagagtggatacgagaaatcagtgaaagcaagaatcttccacaatctgtaattgaaaatgttggaggaaaaatttttacatttggatcttacagattaggagtgcatacaaaaggtgctgatattgatgcgttgtgtgttgcaccaagacatgttgatcgaagtgactttttcacctcattctatgataagttgaaattacaggaagaagtaaaagatttaagagctgttgaagaggcattcgtaccagttattaaactctgttttgatgggat

SEQ ID NO: 167112 - DNA, 2267 bp, Homo sapiens
  Payload ID: 12892
  Gene Symbol: PAPOLA
  Gene Name: poly(A) polymerase alpha
  ENST ID: ENST00000553689
  CDS Start-End: 196-531
agcgctcgggcgccatgttaggacgaaggggaaggaggagaagcgcttaaagcggcgggagcggtgcgggagaggggttggacccagggctgaggcaggcccccccctccctcccgcctcagtggatcatgcccagggcggcagcggcggcggttgcgggggggaagtgactgggcggtgccggcgccggagacgatgccgtttccagttacaacacagggatcacaacaaacacaaccgccacagaagcactatggcattacttctcctatcagcttagcagcccccaaggagactgactgcgtacttacacagaaactaattgagacattgaaaccctttggggtttttgaagaggaagaggaactgcagcgcaggattttaattttgggaaaactaaataacctggtaaaagagtggatacgagaaatcagtgaaagcaagaatcttccacaatctgtaattgaaaatgttggaggaaaaatttttacatttggatcttacagattaggagtgcatacaaaagattgatattttgtttgcaagattagcactgcagacaattcctgaagatttggatctacgagatgacagtctgctaaaaaatttagatataagatgtataagaagtcttaacggttgcagggtaaccgatgaaattttacatctagtaccaaacattgacaacttcaggttaactctgagagctatcaaactatgggccaaacgccacaacatctattccaatatattaggtttcctcggtggtgtttcctgggctatgctagtagcaagaacttgccagctttatccaaatgcaatagcatcaactcttgtacataaatttttcttggtattttctaaatgggaatggccaaatccagtgctattgaaacagcctgaagaatgcaatcttaatttgcctgtatgggacccaagggtaaaccccagtgataggtaccatcttatgcctataattacaccagcatacccacaacagaactccacgtacaatgtgtccgtttcaacacggatggtcatggttgaggagtttaaacaaggtcttgctatcacagatgaaattttgctgagtaaggcagagtggtccaaactttttgaagctccaaacttctttcaaaagtacaagcattatattgtacttctagcaagtgcaccaacagaaaaacaacgcctggaatgggtgggcttggtggaatcaaaaatccgaatcctggttggaagcttggagaagaatgaatttattacactggctcatgtgaatccccagtcatttccagcacccaaagaaaatcccgacaaggaagaatttcgcacgatgtgggtgattgggttagtgtttaaaaaaacagaaaactctgaaaacctcagtgttgatctcacctatgatattcagtctttcacagatacagtttataggcaagcaataaacagcaagatgtttgaggtggatatgaaaattgctgcaatgcatgtaaaaagaaagcaactccatcaactactacctaatcatgtgcttcagaaaaagaaaaagcattcaacagaaggtgtcaaattgacagctctcaatgacagcagcctcgacttgtctatggacagtgataacagcatgtctgtgccttcacctactagtgctacgaagaccagtccattgaacagttctggcagctctcagggcagaaacagtcctgctccagctgtaacagcagcatctgtgaccaacatacaggctactgaagtttctgtgccacaagtaaattccagtgaaagctcagggggtacatcgagtgaaagcattcctcaaactgccacacaaccagccatttctccaccaccaaagcctacggtctccagagttgtttcttcaacacgtctggtaaacccaccacctagatcttcaggaaatgcagcaacttcaggaaatgcagcaacaaaaatacctactcctatagtaggagtcaagaggacatcctcacctcataaagaagagagtcccaagaaaaccaaaacagaagaggatgaaacaagtgaagatgctaactgtcttgctttgagtggacatgataaaacagaagcaaaggaacaacttgatacagagacaagtacaactcaatcagaaactattcagacagcggcttctctgttggcctctcagaaaacatccagtacagacctttctgatatccctgctctccctgcaaatcctattcctgttatcaagaattcaataaaactgagattgaatcggt

SEQ ID NO: 167113 - DNA, 959 bp, Homo sapiens
  Payload ID: 12892
  Gene Symbol: PAPOLA
  Gene Name: poly(A) polymerase alpha
  ENST ID: ENST00000556459
  CDS Start-End: 1-542
atgtgcttcagaaaaagaaaaagcattcaacagaaggtgtcaaattgacagctctcaatgacagcagcctcgacttgtctatggacagtgataacagcatgtctgtgccttcacctactagtgctacgaagaccagtccattgaacagttctggcagctctcagggcagaaacagtcctgctccagctgtaacagcagcatctgtgaccaacatacaggctactgaagtttctgtgccacaagtaaattccagtgaaagctcagggggtacatcgagtgaaagcattcctcaaactgccacacaaccagccatttctccaccaccaaagcctacggtctccagagttgtttcttcaacacgtctggtaaacccaccacctagatcttcaggaaatgcagcaacttcaggaaatgcagcaacaaaaatacctactcctatagtaggagtcaagaggacatcctcacctcataaagaagagagtcccaagaaaaccaaaacagaagagaaaacatccagtacagacctttctgatatccctgctctccctgcaaatcctattcctgttatcaagaattcaataaaactgagattgaatcggtaaaaacaacctcaggggtccataaacaatatctgccaactcaacctgttgtcttcaaatgctaaaaaaggagaatggagggtacaagactagacatgactgaaatggatttgggttttttggtgacctcccttactgggctaatcagcacttgatcggaagtccaggttagtatgtgaagccaggagtactattattattgtgttagcaacagttgcattaactatttcaaaaattactgcctttaaaaaaaacaacctcaagctatatttgtattcataattgacatctggattgggtttatgtttgatgcattgtttggaaaatttgcaatacaaactggcataagaattacttatt

SEQ ID NO: 167114 - DNA, 585 bp, Homo sapiens
  Payload ID: 12892
  Gene Symbol: PAPOLA
  Gene Name: poly(A) polymerase alpha
  ENST ID: ENST00000553357
  CDS Start-End: 1-221
agaacgttgctgtggtagcgctcgggcgccatgttaggacgaaggggaaggaggagaagcgcttaaagcggcgggagcggtgcgggagaggggttggacccagggctgaggcaggcccccccctccctcccgcctcagtggatcatgcccagggcggcagcggcggcggttgcgggggggaagtgactgggcggtgccggcgccggagacgatgccgttaatcttccacaatctgtaattgaaaatgttggaggaaaaatttttacatttggatcttacagattaggagtgcatacaaaaggtgctgatattgatgcgttgtgtgttgcaccaagacatgttgatcgaagtgactttttcacctcattctatgataagttgaaattacaggaagaagtaaaagatttaagagctgttgaagaggcattcgtaccagttattaaactctgttttgatgggatagagattgatattttgtttgcaagattagcactgcagacaattcctgaagatttggatctacgagatgacagtctgctaaaaaatttagatataagatgtataagaagtcttaacggttgcagg

SEQ ID NO: 167115 - DNA, 4262 bp, Homo sapiens
  Payload ID: 12893
  Gene Symbol: PAPOLB
  Gene Name: poly(A) polymerase beta (testis specific)
  Uniprot ID: Q9NRJ5
  ENST ID: ENST00000404991
  CDS Start-End: 185-2098
atgttggggctgaggggaaggaggagaagctcctgaagcggcgggcgcgcagcgggagtgggagtggggtcggaccagggcagctagaagccctgcccttccgcctcagcggatcatgacccgggcggcggccgcgaaggtcgcggtggtgggggacgtgccctggcggggcgggcgctgaaagatgatgccgtttccggtgacaacccagggaccaccgcagccggcgccgccgccgaatcgctacggcgtctcctcgcctatcagtctagcggtccccaaggagacggactgcctcctcacccagaggctaatagaaaccctcaggcccttcggggtcttcgaagaggaagaggaactgcagcgcaggattttagttttggaaaaattaaataatctggtaaaggaatggatacgcgaaatcagtgaaagcaagagtcttccccagtctgtaattgaaaacgttggaggaaagatttttacgtttggctcttacagattaggagtacatacgaaaggcgcagatattgacgccttgtgcgttgcaccaagtcatgtggatcgaagcgactttttcacctcattctatgctaaactgaaactacaggaggaagtgaaagatttaagggctgtcgaggaggcatttgtgccagttatcaaactgtgttttgatgggatagagattgatattttatttgcaagattagcactacagactattccagaagatttggacttaagagatgacagtctacttaaaaatttagacattagatgcataagaagccttaatggttgccgggtaaccgatgaaattttacatctagtgccaaacattgacaacttcaggctgactctgagagccatcaaactgtgggccaagtgccacaatatctattccaatatattaggtttcctcggaggtgtttcctgggccatgctagtagcaagaacttgtcagctttatccaaatgcagtagcgtcaactcttgtacggaaattcttcttggtattttcagaatgggaatggccaaacccagtgttactgaaggagcctgaagaacggaatcttaatttgcctgtatgggacccaagagtaaatcccagtgataggtaccatcttatgcctatcatcacaccagcatacccacagcagaactccacatacaacgtgtctatttcaaccaggatggtcatgattgaggagtttaaacaggggcttgctatcacacacgagattttgctaagtaaggcagagtggtccaaactctttgaagctccaagcttctttcaaaagtacaagcattatattgtacttctggcaagtgcatcaacagaaaaacaacatttagaatgggtgggcttggtggaatcaaagatccgaatcctggttgggagcttggagaagaatgaatttattacactggcacatgtgaatccacagtcatttccagcacccaaagaaaatcctgatatggaagaatttcgtacaatgtgggtgattgggttagggctaaaaaagccagataattctgaaattctcagcattgatctcacctatgatatccagtctttcacagatactgtttataggcaagcagtgaatagtaagatgtttgagatgggtatgaaaattactgcaatgcatttaagaagaaaggaacttcaccagctgctgcctcatcatgtgcttcaggacaagaaagcacactcaacagaaggtagaagattgacagatttgaacgacagcagctttgacttgtctgcaggctgtgaaaacagcatgtctgtgccttcatctactagcactatgaagacaggcccattgattagcagttctcagggtagaaacagtcctgccttggctgtaatgacagcatctgtggctaacatacaggctactgaattttccttgcaacaggtgaataccaatgaaagttcaggggttgcattaaacgaaagtattcctcacgctgtctctcagcctgccatttctccatcaccaaaggccatggtcgccagagttgtttcttcaacatgtctcataagccatccagaccttcaggaaactcagcaacaaacatatctaatcctatagttggagtctagaggatattcttgcctcataaagaagaaaggaccaagaaaaccaaaacggaagaggagaaactcaatacaaagacaagtacaactccattagaaaaattcagacagcatcttctctattggcctctcagggaacatcagtatagatctttccggtatccctgttctccctgcaaatccaattcctgttatcaagaattcagtaaaacaggttgaatggttaaaaacaacctcaagggtccatgaacaatatctgccaactgaacctgttgtcttcaaatactaaggaaggagaatgaggggtacgggactagatatgacttgaaatagattgaggctcatttggtaacttcctttactgagccagtcttgatcagaagtccacattagtatgtgacagctagaggtactgttattaatgtatcagcaacagttacattaactatttcaaaggactactgcccttaaaatgaaaaaacctttcagctatgtttgtacccgtgactgacatctggactggatttatgcttgatgcattgttgggaaaatatgcaatacaaactggtatcagaattccttatactgatgaggcactttatattttttattagaaagtagaactaattttagatttttcaaattggtgaattttatttttccctgaagaggtttcttcactattaatcttaaaattggataccattgtgcagcggtgtactgtacttcagagaaagcataaaagtacatctagctcagtccctatgaggtagctgtaaccctttaaaatgaaatgtcaactttaaggtatgtttttgacatcaaccattagtaggtctttggttttgatggcacactatggagaaaggacacactggttttaatctgtagaactgttttagagtaattagcaatcaaacattttctttgagctatcaaagctccatattctcttgtcctcaatcattagtcctaaaacaaaaaagctttttgcctccctctcttctctttgcctgtatgcacacagtatgcttatgtgtcatttcacaagaaaaaaggaataatattctctaaaccatgatgtgaaactgacaatcctgtggccacatggcacaaaacaccaaatattggttatgatgaaacaccacattttagcaaaactttactaaatgtaatgtctatgagatatgtttctgatcttggatgaccatttgatcactgcatatgagaagttttgttcattccacagaatacctccttataggaaagttaatttccaattgcacacataagcaaaaaggcattttcttcaagaattttaaacacttttatttttaaacgatttatcaaaattcatctctaaattttacatgtagaaacataaaaaagtaatttctagcaagcacttgacatcttactggctttctgctcttttagtctacaaaagatcagcaatactttaagttaaaaaaaatctcataattaagcagtagagcatctatgattaggaaatgtgaggggcaacagatgtgaatgaatgaaagttgagtctttcttaatctagacagcaaacttaacaggctttccaattagccttgctttaacccctcccgtccctcctctaactctgcacttttcatgttaaactgcaattacttaaactcttttcctgtcctgcattaattttccaaagttggaatatagtcatgtccttttatgctgtagagacttttctttcaccattactttctgatatctagtacacagtatttctttttctcacatctttgccgtttcaccacaataataaatcgggtgaagtgtgcacaatatctgtattttgaatggctatggcgttaggttgaaatggccaggcacaaatttagtctggtcattttgtttacacattgggaaaaaaattagtttattaaacattacctgtaactgtgtctgttttaccaagctggaaccttgggactttttatttctaatttttattacctgaatgtcagaccattttttcatgtgatgtacctagtgagtggagtttgctttgttttatggtatctgtactcctggtatattcaagcactgttttgaaaacagatgacttatttctccattaaaaatgcaataaaaataaatggcaaacaagcaaa

SEQ ID NO: 167116 - DNA, 4263 bp, Homo sapiens
  Payload ID: 12894
  Gene Symbol: PAPOLG
  Gene Name: poly(A) polymerase gamma
  Uniprot ID: Q9BWT3
  ENST ID: ENST00000238714
  CDS Start-End: 250-2460
ctgagacctgcgagaggcaggctgggaagcggcgccatattggcgtcggccgcgctgtattgtcataaatagagccggttttgtggtgttttcactactcggttggatgcctcagccatagtaagtgggaaagtgagcgagcaagcgagctactagcgaccggaggaaagtgaacagggggagaagggaacagcaagaacaggactccagagcgataaacactcgctggagagggagacgcaggaagcgatgaaagagatgtctgcaaacaccgtgctggacagccagcgtcaacaaaagcattatggaattacctccccaattagtttggcatctcctaaagaaattgatcatatttacacacagaaattaattgacgccatgaaaccatttggagtgtttgaagatgaggaagaattgaaccacaggctggtggttcttggtaaattgaacaatttagtaaaagaatggatttctgatgtcagcgagagtaagaacctcccaccttctgttgtggctactgttggtggtaaaattttcacatttggatcctataggcttggagtacacaccaaaggagctgacattgatgcactttgtgtagctccaagacatgtggaaagatctgatttttttcagtctttttttgaaaaattgaaacatcaagatggcattagaaacttaagagctgtagaagatgcctttgtacctgttataaaatttgaatttgatggtattgaaattgatctagtctttgcaagactggcaatacaaaccatatcagataatttagatctaagagacgactctcgcctgagaagccttgatataaggtgtattcgcagcttaaatggttgtagagttactgatgaaattttgcatttagtgccaaataaagaaacttttagactcaccctaagagctgtcaaattatgggcaaaacgacgtggtatttattccaacatgctaggattccttggtggtgtctcctgggcaatgctagttgcaagaacttgccaattgtatccaaatgcagcagcatctactttagttcataagttctttttagttttttccaagtgggaatggccaaatcctgtgctgctgaagcaaccagaagaaagcaatttgaatttgcctgtctgggatcctcgggtaaatccatcagataggtatcatctcatgcccataatcacccctgcctacccacaacagaattctacgtataatgtgtccacatcaactcgaacagtaatggtagaagaatttaaacaaggtcttgcagtcacagatgaaattcttcaaggaaagtcagattggtccaaactacttgagccaccgaatttctttcaaaagtatagacattatatagtattgactgccagcgcatcaacagaagaaaaccatctagagtgggttggattagtagaatctaaaatccgtgtacttgttggaaacttggaacggaatgaatttattactcttgcccatgtgaatccccagtcattcccagggaataaggaacatcataaagacaacaattacgtatcaatgtggttccttgggataatttttcggagagtagaaaatgcagaaagtgtcaacatagacttgacatatgatatacagtcatttactgatacagtgtacagacaggcaaacaatataaatatgctaaaggagggaatgaaaattgaagcaactcatgtaaagaaaaaacaacttcaccactaccttcctgcagaaattcttcaaaagaagaaaaagcaaagtctctctgatgtcaatcgaagctcgggcggacttcaatccaaaagattgtctctggatagcagttgtctggatagctccagagacactgataatggaacaccttttaattctccagcgtccaagtctgatagcccttctgtaggagaaacagaaaggaatagtgctgagcctgctgctgtaattgtggagaagccactgagtgtaccaccagcccaaggactttccattccagtgattggcgcaaaagttgactctacagtaaaaactgtatcaccccccactgtgtgtaccattcctaccgtagtaggacgaaatgtcattcctagaatcacaacacctcacaaccctgcccagggacaaccgcatctgaatggaatgtcaaatataactaagactgttacacctaagagatcccattccccatccatagatgggactcctaagaggttgaaagacgtagaaaagtttattcgacttgaatcaacatttaaggacccccgcactgctgaagaaagaaaaagaaaatcagtggatgccattggaggagaatctatgcctattccaactattgatacatcacgcaaaaagagactacccagtaaagaactaccagattcatcatctccagttccagcaaacaacatccgtgtcatcaaaaattccattcgactgacccttaatcggtaaaagcagtgcctcctcacttaagtgaacaagcaatcatttagtggcatagatgcagccacttgttttttaaatagaagtggctgtcatacgtgaaataaggtgaaagtgacagccttcagtctaataaccttgaagtggtttttgaactgtcaaactttgacctgtagatgctgtagcattctctcactgattgctacatacacttctctgaggatcacctgctgtcaaattgccatctacagtattacagctttgcatttgggggttttactgccttaactttcaatgcttgttatgggaaccagttcttagccacttggacactgataacaagtcctgaactccttttttgttttgttttttgtgtttttctttttttgtcttatgttgtaatcattgtatagagctaaaaaaattgaaaacaaacaaaaaaattgtcttgtattttccaaatgttaatacatttactttagcattgaagccactttgaaacctgagataaatgaatgtgaggtatcttttctgctttcctcatttgtgtagatgtactgtctgttctgttgatttaaattatttttttccagattggcacatgaaatatttaaacttttttgtgtgcctttctgtccaaatgttgcatagttaccagggaagattagtccagtgattacataagagttgggcaccataaattctctatattttgcctcccatggaggcctttgaaatgcatctttattaaaaatcaaaatataaccaggatactgaaagtcagtatatgaatggtaaaattgttacatatcctatttcatgccattcttgttagttgactggtattttttactgaggagcaactcattccagcatcaacaataagataacctttaagtatggcacacttgtatttttgaggtgtaaaattaacttggcatgataattcctgatcattatttaccccacaacttcaaatagtttcttcacggactaggcatgcagaaataagcagtggattttattgaaacctaaaggcattttgaatgacattgttaccaaccattaattggctcaggacctttgtaatttttatttaactatatgagttgtctttttttacgctgcttttttcaatgcatttcttaatattttttaagtttcatgaatgcatgctcagtttattaaaatccataaccatgtaattcttgtaatatgttgattcagtgttttgtaaatgaagtcgtatgtattttcagagtatttttgtatgtactgtaagataccatcttttcaaagagaaacgtttaaaacctttattgtctctccttagtctaattttttaaatatggattatgcttgaattactatatttaaaatgaaaatgtatagattacacagccaggaatgctagtatctaccaccttctttagatttcactcagcatttagtaggtccagtaggaaaaacccaaaatggtacattgagtagtgtggggaagacacctcgtgtattataggactcacgggatgccatctagcaagtggagaaatagcagtccattttctcttgcaagccctttaccattgagttgaaattcttgaattgccagagagccgtatcctccaggtcccactcctgttcattgccccttaggtctccaaaatgtaaattctaatgtttaccttgtaccatggaaaacatgaaaagagtcttagaagtaaagaacaacaaggaaaaaaatgtttgttctattattccctttttatatagcagcaaaagataagaataaaatcacataaccaagttgaa

SEQ ID NO: 167117 - DNA, 6074 bp, Homo sapiens
  Payload ID: 12894
  Gene Symbol: PAPOLG
  Gene Name: poly(A) polymerase gamma
  ENST ID: ENST00000412217
  CDS Start-End: 1-1149
cgaacagtaatggtagaagaatttaaacaaggtcttgcagtcacagatgaaattcttcaaggaaagtcagattggtccaaactacttgagccaccgaatttctttcaaaagtatagacattatatagtattgactgccagcgcatcaacagaagaaaaccatctagagtgggttggattagtagaatctaaaatccgtgtacttgttggaaacttggaacggaatgaatttattactcttgcccatgtgaatccccagtcattcccagggaataaggaacatcataaagacaacaattacgtatcaatgtggttccttgggataatttttcggagagtagaaaatgcagaaagtgtcaacatagacttgacatatgatatacagtcatttactgatacagtgtacagacaggcaaacaatataaatatgctaaaggagggaatgaaaattgaagcaactcatgtaaagaaaaaacaacttcaccactaccttcctgcagaaattcttcaaaagaagaaaaagcaaagtctctctgatgtcaatcgaagctcgggcggacttcaatccaaaagattgtctctggatagcagttgtctggatagctccagagacactgataatggaacaccttttaattctccagcgtccaagtctgatagcccttctgtaggagaaacagaaaggaatagtgctgagcctgctgctgtaattgtggagaagccactgagtgtaccaccagcccaaggactttccattccagtgattggcgcaaaagttgactctacagtaaaaactgtatcaccccccactgtgtgtaccattcctaccgtagtaggacgaaatgtcattcctagaatcacaacacctcacaaccctgcccagggacaaccgcatctgaatggaatgtcaaatataactaagactgttacacctaagagatcccattccccatccatagatgggactcctaagaggttgaaagacgtagaaaaggatgccattggaggagaatctatgcctattccaactattgatacatcacgcaaaaagagactacccagtaaagaactaccagattcatcatctccagttccagcaaacaacatccgtgtcatcaaaaattccattcgactgacccttaatcggtaaaagcagtgcctcctcacttaagtgaacaagcaatcatttagtggcatagatgcagccacttgttttttaaatagaagtggctgtcatacgtgaaataaggtgaaagtgacagccttcagtctaataaccttgaagtggtttttgaactgtcaaactttgacctgtagatgctgtagcattctctcactgattgctacatacacttctctgaggatcacctgctgtcaaattgccatctacagtattacagctttgcatttgggggttttactgccttaactttcaatgcttgttatgggaaccagttcttagccacttggacactgataacaagtcctgaactccttttttgttttgttttttgtgtttttctttttttgtcttatgttgtaatcattgtatagagctaaaaaaattgaaaacaaacaaaaaaattgtcttgtattttccaaatgttaatacatttactttagcattgaagccactttgaaacctgagataaatgaatgtgaggtatcttttctgctttcctcatttgtgtagatgtactgtctgttctgttgatttaaattatttttttccagattggcacatgaaatatttaaacttttttgtgtgcctttctgtccaaatgttgcatagttaccagggaagattagtccagtgattacataagagttgggcaccataaattctctatattttgcctcccatggaggcctttgaaatgcatctttattaaaaatcaaaatataaccaggatactgaaagtcagtatatgaatggtaaaattgttacatatcctatttcatgccattcttgttagttgactggtattttttactgaggagcaactcattccagcatcaacaataagataacctttaagtatggcacacttgtatttttgaggtgtaaaattaacttggcatgataattcctgatcattatttaccccacaacttcaaatagtttcttcacggactaggcatgcagaaataagcagtggattttattgaaacctaaaggcattttgaatgacattgttaccaaccattaattggctcaggacctttgtaatttttatttaactatatgagttgtctttttttacgctgcttttttcaatgcatttcttaatattttttaagtttcatgaatgcatgctcagtttattaaaatccataaccatgtaattcttgtaatatgttgattcagtgttttgtaaatgaagtcgtatgtattttcagagtatttttgtatgtactgtaagataccatcttttcaaagagaaacgtttaaaacctttattgtctctccttagtctaattttttaaatatggattatgcttgaattactatatttaaaatgaaaatgtatagattacacagccaggaatgctagtatctaccaccttctttagatttcactcagcatttagtaggtccagtaggaaaaacccaaaatggtacattgagtagtgtggggaagacacctcgtgtattataggactcacgggatgccatctagcaagtggagaaatagcagtccattttctcttgcaagccctttaccattgagttgaaattcttgaattgccagagagccgtatcctccaggtcccactcctgttcattgccccttaggtctccaaaatgtaaattctaatgtttaccttgtaccatggaaaacatgaaaagagtcttagaagtaaagaacaacaaggaaaaaaatgtttgttctattattccctttttatatagcagcaaaagataagaataaaatcacataaccaagttgaagcttccttggcaaagctgttgtcttagctgactctttccctttattcagatgttttgggattgttctacaaatagtctatttgagcaaaaatgaatgattatgaaagaaccgaagaattatcacctgacttcaacttttgaaagctttagtaaggaatttgattaaattttatatactggatgtgtatgcatttctgcatttcatatcttttgcttttaaatcagccttcaaagtatctttaggaattccttctgtatccatgtttaccccattatgtaaatagatctttggagtgactagtggagtttttctttaataaggaagcaacaagtctaaccttgtactataggataggcatttattttagattaaggagcccattcaacatgtcaatgagtcaacattagagtcctcaaagatagcattcttcaacctgtttggtaactgaggagttgataaaatacttttgagatggtggggtttgtcagaaataaaatattttctatcctgaccagtaggtagaactttgagtacatttcgttaacttggtgggaagcttccattgtactagttccaagtaaaaaaggagaaagtatgatctgggattttgtgttatgatgagaggcactaagtacatgtgtttgttttgttttgttttgttttgttttgttttgtttgagacagagttttgctcttgttgcccaggctggagtgcagtagcccaatctcggctcactgcaaccttcacctcccgagttcaagctattctcttgcctcagcctcccaagtagctgggattacaggcacccaccacctcgcccagctaatttttgtatttttagtacagacagcgtttcaccatgttggccaggctggtctcgaacttgtgacctcaggtgatccacctgcctcggcgtcccaaagtgctgggattacaggcgtgaaccaccgcacccggccgtgtttgttttcaagtgtgaaaaaatacctagaagtatattttatgaagtcaaataatctgttcttcagtatatagacacatgttcattttcacaagggcattacattttaatttgctcatttttcagtagctctggagaatatgtatgaaaggaaaacaattacctgctagcttaaaccttagggacttaaccaattcaagatagaggtacatggcttaaaactttgtaaaactgggacaggagaattattatttttttattttttatttttttatgaagacaagagtttcactctgtcacccagtctggagcacagtggcatgatctcacctcactgcaacctctgcctcccgggttcaagtgattctcttgcctcagcctcccaagtagctggaattacaggcctgtgccatgcccagctaattttcgtattttcagtagaaatgggatttcaccatgttggccagggtggtcttgaactcctcacctcaagtgatctggctgcttcggccaccctaagtgctgggattacaggcataagctactgtgcccagccaggagaatgaattttaaaaatctatgttagtgtttaaaatgagtgctttgttttaaagcagcaatttagtagcattattaaaatgcttacttcactatagtagcaattaggtaaagatgggcaatatcaaaatgggctaaacttattttccactatgttccacacctttgaaataggaattcctaacttgagaatcatgaacccttagggaatcctttataattgtgtataagaagttctagtttacatgcatttttcttggggaaagtgcatagtttagatcagcttctcgaagtggcaaaagtatgggagttagggttaggaaccaccaggattgaataatcctggaatattatataattttctacttttgattttgctgtggtatatttctgaaaatgtgctgtggctcctaactagtaaaatgggctggtgagggactctggaattctgaatttctaagtttataacctaaaatgaaactgtaaagtcctcggtatttagaaaaatgcttaatctcagatttacagatggcctcatgataacttagattcgttaacagggtcaaactttagttcaacaaatttcaacccaatattatcacagtacaatagcttagaatgatcattagaaatggtagaaaatagaataaatcattaaagatcccaaaatgttgagttctgtagcatgaaaactctcttgctcctccatgtttgtagttcaggccagaacaaactaaacagaccaataaatataaaagtgatagtttagggaaaaaaaaaaactttgtataaataaaattgtatgtgtgttcaaataactacctattaaatcatccaaagcttagaatttaaattggtcatagtagcaaatagtgcagatgatggaagaaaaccagtctcaataatggttttttttttccaattgcataaggtcacgtcatcccccaaattgtctattttttcttttctttttttttaagatggagtctcgctccgtcacccaggctggaatgcagtggcgcaatcttggctcattgcaacctccacctcccaggtgcaagcgattctcctacctcagcctcccaagtagctgggactacaggcgcccgccaccatgtgggcctggctaatttttgtagagatggggtttcaacatgttggccaggctggtctcaaactcctgacctccagtgatgcacccgcctcggcctcccaaagttctgggattacaggcgtgagccaccgtgcccagcccctattttttctgaaataatttttcggatatacttttatatttgaaattagttgaacataagatgatcatcaagcttgctataagttttaagctattgctacatttgaacaaagacccacgtacttatcttagaaagtacttaggatatctttgagattaatggtgctacatcactctacagtactatgtaaaatgaatggagctgctgttcctttctagctagctgtttgtgtagttcatattaatttaccctgccttttatttggattgtctgatttcttagttgtacacatgaacctcattatttgcctggaataagtaatcaaataaaattgctttgataaat

SEQ ID NO: 167118 - DNA, 3511 bp, Homo sapiens
  Payload ID: 12894
  Gene Symbol: PAPOLG
  Gene Name: poly(A) polymerase gamma
  ENST ID: ENST00000414060
  CDS Start-End: 200-904
atattggcgtcggccgcgctgtattgtcataaatagagccggttttgtggtgttttcactactcggttggatgcctcagccataaaacaccgtgctggacagccagcgtcaacaaaagcattatggaattacctccccaattagtttggcatctcctaaagaaattgatcatatttacacacagaaattaattgacgccatgaaaccatttggagtgtttgaagatgaggaagaattgaaccacaggctggtggttcttggtaaattgaacaatttagtaaaagaatggatttctgatgtcagcgagagtaagaacctcccaccttctgttgtggctactgttggtggtaaaattttcacatttggatcctataggcttggagtacacaccaaaggagctgacattgatgcactttgtgtagctccaagacatgtggaaagatctgatttttttcagtctttttttgaaaaattgaaacatcaagatggcattagaaacttaagagctgtagaagatgcctttgtacctgttataaaatttgaatttgatggtattgaaattgatctagtctttgcaagactggcaatacaaaccatatcagataatttagatctaagagacgactctcgcctgagaagccttgatataaggtgtattcgcagcttaaatggttgtagagttactgatgaaattttgcatttagtgccaaataaagaaacttttagactcaccctaagagctgtcaaattatgggcaaaacgacgtggtatttattccaacatgctaggattccttggtggtgtctcctgggcaatgctagttgcaagaacttgccaattgtatccaaatgcagcagcatctactttagttcataagttctttttagttttttccaagtggtaaatccatcagataggtatcatctcatgcccataatcacccctgcctacccacaacagaattctacgtataatgtgtccacatcaactcgaacagtaatggtagaagaatttaaacaaggtcttgcagtcacagatgaaattcttcaaggaaagtcagattggtccaaactacttgagccaccgaatttctttcaaaagtatagacattatatagtattgactgccagcgcatcaacagaagaaaaccatctagagtgggttggattagtagaatctaaaatccgtgtacttgttggaaacttggaacggaatgaatttattactcttgcccatgtgaatccccagtcattcccagggaataaggaacatcataaagacaacaattacgtatcaatgtggttccttgggataatttttcggagagtagaaaatgcagaaagtgtcaacatagacttgacatatgatatacagtcatttactgatacagtgtacagacaggcaaacaatataaatatgctaaaggagggaatgaaaattgaagcaactcatgtaaagaaaaaacaacttcaccactaccttcctgcagaaattcttcaaaagaagaaaaagcaaagtctctctgatgtcaatcgaagctcgggcggacttcaatccaaaagattgtctctggatagcagttgtctggatagctccagagacactgataatggaacaccttttaattctccagcgtccaagtctgatagcccttctgtaggagaaacagaaaggaatagtgctgagcctgctgctgtaattgtggagaagccactgagtgtaccaccagcccaaggactttccattccagtgattggcgcaaaagttgactctacagtaaaaactgtatcaccccccactgtgtgtaccattcctaccgtagtaggacgaaatgtcattcctagaatcacaacacctcacaaccctgcccagggacaaccgcatctgaatggaatgtcaaatataactaagactgttacacctaagagatcccattccccatccatagatgggactcctaagaggttgaaagacgtagaaaagtttattcgacttgaatcaacatttaaggacccccgcactgctgaagaaagaaaaagaaaatcagtggatgccattggaggagaatctatgcctattccaactattgatacatcacgcaaaaagagactacccagtaaagaactaccagattcatcatctccagttccagcaaacaacatccgtgtcatcaaaaattccattcgactgacccttaatcggtaaaagcagtgcctcctcacttaagtgaacaagcaatcatttagtggcatagatgcagccacttgttttttaaatagaagtggctgtcatacgtgaaataaggtgaaagtgacagccttcagtctaataaccttgaagtggtttttgaactgtcaaactttgacctgtagatgctgtagcattctctcactgattgctacatacacttctctgaggatcacctgctgtcaaattgccatctacagtattacagctttgcatttgggggttttactgccttaactttcaatgcttgttatgggaaccagttcttagccacttggacactgataacaagtcctgaactccttttttgttttgttttttgtgtttttctttttttgtcttatgttgtaatcattgtatagagctaaaaaaattgaaaacaaacaaaaaaattgtcttgtattttccaaatgttaatacatttactttagcattgaagccactttgaaacctgagataaatgaatgtgaggtatcttttctgctttcctcatttgtgtagatgtactgtctgttctgttgatttaaattatttttttccagattggcacatgaaatatttaaacttttttgtgtgcctttctgtccaaatgttgcatagttaccagggaagattagtccagtgattacataagagttgggcaccataaattctctatattttgcctcccatggaggcctttgaaatgcatctttattaaaaatcaaaatataaccaggatactgaaagtcagtatatgaatggtaaaattgttacatatcctatttcatgccattcttgttagttgactggtattttttactgaggagcaactcattccagcatcaacaataagataacctttaagtatggcacacttgtatttttgaggtgtaaaattaacttggcatgataattcctgatcattatttaccccacaacttcaaatagtttcttcacggactaggcatgcagaaataagcagtggattttattgaaacctaaaggcattttgaatgacattgttaccaaccattaattggctcaggacctttgtaatttttatttaactatatgagttgtctttttttacgctgcttttttcaatgcatttcttaatattttttaagtttcatgaatgcatgctcagtttattaaaatccataaccatgtaattcttgtaatatgttgattcagtgttttgtaaatgaagtcgtatgtattttcagagtatttttgtatgtactgtaagataccatcttttcaaagagaaacgtttaaaacc

SEQ ID NO: 167119 - DNA, 3324 bp, Homo sapiens
  Payload ID: 12894
  Gene Symbol: PAPOLG
  Gene Name: poly(A) polymerase gamma
  ENST ID: ENST00000453839
  CDS Start-End: 1-507
aacaccgtgctggacagccagcgtcaacaaaagcattatggaattacctccccaattagtttggcatctcctaaagaaattgatcatatttacacacagaaattaattgacgccatgaaaccatttggagtgtttgaagatgaggaagaattgaaccacaggctggtggttcttggtaaattgaacaatttagtaaaagaatggatttctgatgtcagcgagagtaagaacctcccaccttctgttgtggctactgttggtggtaaaattttcacatttggatcctataggcttggagtacacaccaaaggagctgacattgatgcactttgtgtagctccaagacatgtggaaagatctgatttttttcagtctttttttgaaaaattgaaacatcaagatggcattagaaacttaagagctgtagaagatgcctttgtacctgttataaaatttgaatttgatggtattgaagttgtagagttactgatgaaattttgcatttagtgccaaataaagaaacttttagactcaccctaagagctgtcaaattatgggcaaaacgacgtggtatttattccaacatgctaggattccttggtggtgtctcctgggcaatgctagttgcaagaacttgccaattgtatccaaatgcagcagcatctactttagttcataagttctttttagttttttccaagtgggaatggccaaatcctgtgctgctgaagcaaccagaagaaagcaatttgaatttgcctgtctgggatcctcgggtaaatccatcagataggtatcatctcatgcccataatcacccctgcctacccacaacagaattctacgtataatgtgtccacatcaactcgaacagtaatggtagaagaatttaaacaaggtcttgcagtcacagatgaaattcttcaaggaaagtcagattggtccaaactacttgagccaccgaatttctttcaaaagtatagacattatatagtattgactgccagcgcatcaacagaagaaaaccatctagagtgggttggattagtagaatctaaaatccgtgtacttgttggaaacttggaacggaatgaatttattactcttgcccatgtgaatccccagtcattcccagggaataaggaacatcataaagatgtacagacaggcaaacaatataaatatgctaaaggagggaatgaaaattgaagcaactcatgtaaagaaaaaacaacttcaccactaccttcctgcagaaattcttcaaaagaagaaaaagcaaagtctctctgatgtcaatcgaagctcgggcggacttcaatccaaaagattgtctctggatagcagttgtctggatagctccagagacactgataatggaacaccttttaattctccagcgtccaagtctgatagcccttctgtaggagaaacagaaaggaatagtgctgagcctgctgctgtaattgtggagaagccactgagtgtaccaccagcccaaggactttccattccagtgattggcgcaaaagttgactctacagtaaaaactgtatcaccccccactgtgtgtaccattcctaccgtagtaggacgaaatgtcattcctagaatcacaacacctcacaaccctgcccagggacaaccgcatctgaatggaatgtcaaatataactaagactgttacacctaagagatcccattccccatccatagatgggactcctaagaggttgaaagacgtagaaaagtttattcgacttgaatcaacatttaaggacccccgcactgctgaagaaagaaaaagaaaatcagtggatgccattggaggagaatctatgcctattccaactattgatacatcacgcaaaaagaagcagttggatgctcagcacattaatttcttaccaagcacctggagagactacccagtaaagaactaccagattcatcatctccagttccagcaaacaacatccgtgtcatcaaaaattccattcgactgacccttaatcggtaaaagcagtgcctcctcacttaagtgaacaagcaatcatttagtggcatagatgcagccacttgttttttaaatagaagtggctgtcatacgtgaaataaggtgaaagtgacagccttcagtctaataaccttgaagtggtttttgaactgtcaaactttgacctgtagatgctgtagcattctctcactgattgctacatacacttctctgaggatcacctgctgtcaaattgccatctacagtattacagctttgcatttgggggttttactgccttaactttcaatgcttgttatgggaaccagttcttagccacttggacactgataacaagtcctgaactccttttttgttttgttttttgtgtttttctttttttgtcttatgttgtaatcattgtatagagctaaaaaaattgaaaacaaacaaaaaaattgtcttgtattttccaaatgttaatacatttactttagcattgaagccactttgaaacctgagataaatgaatgtgaggtatcttttctgctttcctcatttgtgtagatgtactgtctgttctgttgatttaaattatttttttccagattggcacatgaaatatttaaacttttttgtgtgcctttctgtccaaatgttgcatagttaccagggaagattagtccagtgattacataagagttgggcaccataaattctctatattttgcctcccatggaggcctttgaaatgcatctttattaaaaatcaaaatataaccaggatactgaaagtcagtatatgaatggtaaaattgttacatatcctatttcatgccattcttgttagttgactggtattttttactgaggagcaactcattccagcatcaacaataagataacctttaagtatggcacacttgtatttttgaggtgtaaaattaacttggcatgataattcctgatcattatttaccccacaacttcaaatagtttcttcacggactaggcatgcagaaataagcagtggattttattgaaacctaaaggcattttgaatgacattgttaccaaccattaattggctcaggacctttgtaatttttatttaactatatgagttgtctttttttacgctgcttttttcaatgcatttcttaatattttttaagtttcatgaatgcatgctcagtttattaaaatccataaccatgtaattcttgtaatatgttgattcagtgttttgtaaatgaagtcgtatgtattttcagagtatttttgtatgtactgtaagataccatcttttcaaagagaaacgtttaaaacc

SEQ ID NO: 167120 - DNA, 2100 bp, Homo sapiens
  Payload ID: 12895
  Gene Symbol: PARN
  Gene Name: poly(A)-specific ribonuclease
  Uniprot ID: O95453
  ENST ID: ENST00000341484
  CDS Start-End: 252-1988
gcagcaggcgcgcgctgtttccggaagtcgcggccggcgtcaccgctgcggctgcctcagctactgccgcagtcgccgcggaattcgattttaagagtaatcttcacaaagtgtaccaggccatagaggaggccgacttcttcgccatcgatggggagttttcaggaatcagtgatggaccttcagtctctgcattaacaaatggttttgacactccagaagagaggtatcagaagcttaaaaagcattccatggactttttgctatttcagtttggcctttgcacttttaagtatgactacacagattcaaagtatataacgaagtcatttaacttctatgttttcccgaaacccttcaatagatcctcaccagatgtcaaatttgtttgtcagagctccagcattgactttctagcaagccagggatttgattttaataaagtttttcgaaatggaattccatatttaaatcaggaagaagaaagacagttaagagagcagtatgatgaaaaacgttcacaggcgaatggtgcaggagctctgtcctatgtatctcctaacacttcaaaatgtcctgtcacgattcctgaggatcaaaagaagtttattgaccaagtggtagagaaaatagaggatttattacaaagtgaagaaaacaagaacttggatttagagccatgtaccgggttccaaagaaaactaatttatcagactttgagctggaagtatccgaaaggcattcatgttgagactttagaaactgaaaagaaggagcgatatatagttatcagcaaagtagatgaagaagaacgcaaaagaagagagcagcagaaacatgccaaagaacaggaggagctgaatgatgctgtgggattttctagagtcattcacgccattgctaattcgggaaaacttgttattggacacaatatgctcttggacgtcatgcacacagttcatcagttctactgccctctgcctgcggacttaagtgagtttaaagagatgacaacatgtgttttccccagactcttggatactaaattgatggccagcacacaaccttttaaggatatcattaacaacacatcccttgcggaattggaaaagcggttaaaagagacacctttcaaccctcctaaagttgaaagtgccgaaggttttccaagttatgacacagcctctgaacaactccacgaggcaggctacgatgcctacatcacagggctgtgcttcatctccatggccaattacctaggttcttttctcagccctccaaaaattcatgtgtctgccagatcaaaactcattgaacctttttttaacaagttatttcttatgagggtcatggatatcccctatctaaacttggaaggaccagacttgcagcctaaacgtgatcatgttctccatgtgacattccccaaagaatggaaaaccagcgacctttaccagcttttcagtgcctttggtaacattcagatatcctggattgatgacacatcagcatttgtttcccttagccagcccgagcaagtaaagattgctgtcaataccagcaaatatgcagaaagctatcggatccaaacctatgctgaatatatggggagaaaacaggaagagaagcagatcaaaagaaagtggactgaagatagctggaaggaggctgacagcaaacggttaaacccccagtgcataccctacaccctgcagaatcactattaccgcaacaatagttttacagctcccagcacagtaggaaagagaaatttgagtcctagtcaagaggaagctggcctggaggacggagtgtcaggggagatttccgacactgagcttgagcagaccgattcctgtgcagagcccctctcagagggaaggaaaaaggccaagaaattaaaaagaatgaagaaggagctttctccagcaggaagcatctcgaagaacagccctgccacactctttgaagttcctgacacatggtaaccaagacctgagggcagcaaaccgctggtgctgtcgctgtgagcaagagccggctggcacatttggaagccgcactgtatttaacttaatcaaatgtggtatgggaggggtt

SEQ ID NO: 167121 - DNA, 3078 bp, Homo sapiens
  Payload ID: 12895
  Gene Symbol: PARN
  Gene Name: poly(A)-specific ribonuclease
  Uniprot ID: O95453
  ENST ID: ENST00000437198
  CDS Start-End: 143-2062
gcgcgctgtttccggaagtcgcggccggcgtcaccgctgcggctgcctcagctactgccgcagtcgccgcggaattcggcgagtagaaccgctgaggcgggcgcgggcccgggtggggccaaggttccggccactctgcagaatggagataatcaggagcaattttaagagtaatcttcacaaagtgtaccaggccatagaggaggccgacttcttcgccatcgatggggagttttcaggaatcagtgatggaccttcagtctctgcattaacaaatggttttgacactccagaagagaggtatcagaagcttaaaaagcattccatggactttttgctatttcagtttggcctttgcacttttaagtatgactacacagattcaaagtatataacgaagtcatttaacttctatgttttcccgaaacccttcaatagatcctcaccagatgtcaaatttgtttgtcagagctccagcattgactttctagcaagccagggatttgattttaataaagtttttcgaaatggaattccatatttaaatcaggaagaagaaagacagttaagagagcagtatgatgaaaaacgttcacaggcgaatggtgcaggagctctgtcctatgtatctcctaacacttcaaaatgtcctgtcacgattcctgaggatcaaaagaagtttattgaccaagtggtagagaaaatagaggatttattacaaagtgaagaaaacaagaacttggatttagagccatgtaccgggttccaaagaaaactaatttatcagactttgagctggaagtatccgaaaggcattcatgttgagactttagaaactgaaaagaaggagcgatatatagttatcagcaaagtagatgaagaagaacgcaaaagaagagagcagcagaaacatgccaaagaacaggaggagctgaatgatgctgtgggattttctagagtcattcacgccattgctaattcgggaaaacttgttattggacacaatatgctcttggacgtcatgcacacagttcatcagttctactgccctctgcctgcggacttaagtgagtttaaagagatgacaacatgtgttttccccagactcttggatactaaattgatggccagcacacaaccttttaaggatatcattaacaacacatcccttgcggaattggaaaagcggttaaaagagacacctttcaaccctcctaaagttgaaagtgccgaaggttttccaagttatgacacagcctctgaacaactccacgaggcaggctacgatgcctacatcacagggctgtgcttcatctccatggccaattacctaggttcttttctcagccctccaaaaattcatgtgtctgccagatcaaaactcattgaacctttttttaacaagttatttcttatgagggtcatggatatcccctatctaaacttggaaggaccagacttgcagcctaaacgtgatcatgttctccatgtgacattccccaaagaatggaaaaccagcgacctttaccagcttttcagtgcctttggtaacattcagatatcctggattgatgacacatcagcatttgtttcccttagccagcccgagcaagtaaagattgctgtcaataccagcaaatatgcagaaagctatcggatccaaacctatgctgaatatatggggagaaaacaggaagagaagcagatcaaaagaaagtggactgaagatagctggaaggaggctgacagcaaacggttaaacccccagtgcataccctacaccctgcagaatcactattaccgcaacaatagttttacagctcccagcacagtaggaaagagaaatttgagtcctagtcaagaggaagctggcctggaggacggagtgtcaggggagatttccgacactgagcttgagcagaccgattcctgtgcagagcccctctcagagggaaggaaaaaggccaagaaattaaaaagaatgaagaaggagctttctccagcaggaagcatctcgaagaacagccctgccacactctttgaagttcctgacacatggtaaccaagacctgagggcagcaaaccgctggtgctgtcgctgtgagcaagagccggctggcacatttggaagccgcactgtatttaacttaatcaaatgtggtatgggaggggttggaaaccaagttgtctcctgggggggagaaaacaggttttatttttgtggctgtggttttttcccctttttaatctaactgcctgttgacattgacactcatcacggttgtaggctgtcatgaatgtgtacgtgcttaaccagtgaattccgtgttgctcttgtgaggcctttcctgtcatgacccagtgtgcttaagaacctgcctgatggggagtgtcggctgtgaaatctgcaaaaagagctgacattccagctgctgtgatcatgaatttgggggtgtactgtcctgcctgtgcatcttctcgcactgagattttgaggcagttgcagccctcggttagtctcccagtggaaaaatcggttgtgcctccctgcttcccaccatagctgcctgaaaacatgacgctctcaagcttgtccttccttcaggaagatgtccactcatgcccacccatgagagggcttgccgtatgccctggcctttgggcatatttatgtagagttcctttctcctaagacgtgagtttctcatgggggatgtacgagtaaaaaggttaacttctgttcttatgcgtggcgctgtgttcactttccagagtctctgttcgtttgtttggatggcggtctcggggtacggcagcgtgtgtgcgtacgtgtctgtgtgtgtgtgtgtgtgtgtgtgtgtgtgtgtgtgtgtgtgtgtgtgaaatcgtgcaaatctacaacatgtcccagcccattctccgttgaaacagatcacagcaacgacaaacgctcatggcgctgctttgctccacccgcttcagatagatcattgttagatatttcacatttttgtatggtggaaataaaaatgaaaaatgtatttccaaaagatgaaaattaaaaacattttcatagga

SEQ ID NO: 167122 - DNA, 2360 bp, Homo sapiens
  Payload ID: 12895
  Gene Symbol: PARN
  Gene Name: poly(A)-specific ribonuclease
  Uniprot ID: O95453
  ENST ID: ENST00000420015
  CDS Start-End: 135-1916
tttccggaagtcgcggccggcgtcaccgctgcggctgcctcagctactgccgcagtcgccgcggaattcggcgagtagaaccgctgaggcgggcgcgggcccgggtggggccaaggttccggccactctgcagaatggagataatcaggagcaattttaagagtaatcttcacaaagtgtaccaggccatagaggaggccgacttcttcgccatcgatggggagttttcaggaatcagtgatggaccttcagtctctgcattaacaaatggttttgacactccagaagagagatcctcaccagatgtcaaatttgtttgtcagagctccagcattgactttctagcaagccagggatttgattttaataaagtttttcgaaatggaattccatatttaaatcaggaagaagaaagacagttaagagagcagtatgatgaaaaacgttcacaggcgaatggtgcaggagctctgtcctatgtatctcctaacacttcaaaatgtcctgtcacgattcctgaggatcaaaagaagtttattgaccaagtggtagagaaaatagaggatttattacaaagtgaagaaaacaagaacttggatttagagccatgtaccgggttccaaagaaaactaatttatcagactttgagctggaagtatccgaaaggcattcatgttgagactttagaaactgaaaagaaggagcgatatatagttatcagcaaagtagatgaagaagaacgcaaaagaagagagcagcagaaacatgccaaagaacaggaggagctgaatgatgctgtgggattttctagagtcattcacgccattgctaattcgggaaaacttgttattggacacaatatgctcttggacgtcatgcacacagttcatcagttctactgccctctgcctgcggacttaagtgagtttaaagagatgacaacatgtgttttccccagactcttggatactaaattgatggccagcacacaaccttttaaggatatcattaacaacacatcccttgcggaattggaaaagcggttaaaagagacacctttcaaccctcctaaagttgaaagtgccgaaggttttccaagttatgacacagcctctgaacaactccacgaggcaggctacgatgcctacatcacagggctgtgcttcatctccatggccaattacctaggttcttttctcagccctccaaaaattcatgtgtctgccagatcaaaactcattgaacctttttttaacaagttatttcttatgagggtcatggatatcccctatctaaacttggaaggaccagacttgcagcctaaacgtgatcatgttctccatgtgacattccccaaagaatggaaaaccagcgacctttaccagcttttcagtgcctttggtaacattcagatatcctggattgatgacacatcagcatttgtttcccttagccagcccgagcaagtaaagattgctgtcaataccagcaaatatgcagaaagctatcggatccaaacctatgctgaatatatggggagaaaacaggaagagaagcagatcaaaagaaagtggactgaagatagctggaaggaggctgacagcaaacggttaaacccccagtgcataccctacaccctgcagaatcactattaccgcaacaatagttttacagctcccagcacagtaggaaagagaaatttgagtcctagtcaagaggaagctggcctggaggacggagtgtcaggggagatttccgacactgagcttgagcagaccgattcctgtgcagagcccctctcagagggaaggaaaaaggccaagaaattaaaaagaatgaagaaggagctttctccagcaggaagcatctcgaagaacagccctgccacactctttgaagttcctgacacatggtaaccaagacctgagggcagcaaaccgctggtgctgtcgctgtgagcaagagccggctggcacatttggaagccgcactgtatttaacttaatcaaatgtggtatgggaggggttggaaaccaagttgtctcctgggggggagaaaacaggttttatttttgtggctgtggttttttcccctttttaatctaactgcctgttgacattgacactcatcacggttgtaggctgtcatgaatgtgtacgtgcttaaccagtgaattccgtgttgctcttgtgaggcctttcctgtcatgacccagtgtgcttaagaacctgcctgatggggagtgtcggctgtgaaatctgcaaaaagagctgacattccagctgctgtgatcatgaatttgggggtgtactgtcctgcctgtgcatcttctcgcactgagattttgaggcagttgcag

SEQ ID NO: 167123 - DNA, 1557 bp, Homo sapiens
  Payload ID: 12895
  Gene Symbol: PARN
  Gene Name: poly(A)-specific ribonuclease
  Uniprot ID: O95453
  ENST ID: ENST00000539279
  CDS Start-End: 114-1508
gtcaccgctgcggctgcctcagctactgccgcagtcgccgcggaattcggcgagtagaaccgctgaggcgggcgcgggcccgggtggggccaaggttccggccactctgcagaatggagataatcaggagcaattttaagagtaatcttcacaaagtgtaccaggccatagaggaggccgacttcttcgccatcgatggggagttttcaggaatcagtgatggaccttcagtctctgcattaacaaatggttttgacactccagaagagaggtatcagaagcttaaaaagaaggagcgatatatagttatcagcaaagtagatgaagaagaacgcaaaagaagagagcagcagaaacatgccaaagaacaggaggagctgaatgatgctgtgggattttctagagtcattcacgccattgctaattcgggaaaacttgttattggacacaatatgctcttggacgtcatgcacacagttcatcagttctactgccctctgcctgcggacttaagtgagtttaaagagatgacaacatgtgttttccccagactcttggatactaaattgatggccagcacacaaccttttaaggatatcattaacaacacatcccttgcggaattggaaaagcggttaaaagagacacctttcaaccctcctaaagttgaaagtgccgaaggttttccaagttatgacacagcctctgaacaactccacgaggcaggctacgatgcctacatcacagggctgtgcttcatctccatggccaattacctaggttcttttctcagccctccaaaaattcatgtgtctgccagatcaaaactcattgaacctttttttaacaagttatttcttatgagggtcatggatatcccctatctaaacttggaaggaccagacttgcagcctaaacgtgatcatgttctccatgtgacattccccaaagaatggaaaaccagcgacctttaccagcttttcagtgcctttggtaacattcagatatcctggattgatgacacatcagcatttgtttcccttagccagcccgagcaagtaaagattgctgtcaataccagcaaatatgcagaaagctatcggatccaaacctatgctgaatatatggggagaaaacaggaagagaagcagatcaaaagaaagtggactgaagatagctggaaggaggctgacagcaaacggttaaacccccagtgcataccctacaccctgcagaatcactattaccgcaacaatagttttacagctcccagcacagtaggaaagagaaatttgagtcctagtcaagaggaagctggcctggaggacggagtgtcaggggagatttccgacactgagcttgagcagaccgattcctgtgcagagcccctctcagagggaaggaaaaaggccaagaaattaaaaagaatgaagaaggagctttctccagcaggaagcatctcgaagaacagccctgccacactctttgaagttcctgacacatggtaaccaagacctgagggcagcaaaccgctggtgctgtcgctgtgagcaagag

SEQ ID NO: 167124 - DNA, 808 bp, Homo sapiens
  Payload ID: 12895
  Gene Symbol: PARN
  Gene Name: poly(A)-specific ribonuclease
  ENST ID: ENST00000538472
  CDS Start-End: 94-717
agctactgccgcagtcgccgcggaattcggcgagtagaaccgctgaggcgggcgcgggcccgggtggggccaaggttccggccactctgcagaatggagataatcaggagcaattttaagagtaatcttcacaaagtgtaccaggccatagaggaggccgacttcttcgccatcgatggggagttttcaggaatcagtgatggaccttcagtctctgcattaacaaatggttttgacactccagaagagaggtatcagaagcttaaaaagcattccatggactttttgctatttcagtttggcctttgcacttttaagtatgactacacagattcaaaatcctcaccagatgtcaaatttgtttgtcagagctccagcattgactttctagcaagccagggatttgattttaataaagtttttcgaaatggaattccatatttaaatcaggaagaagaaagacagttaagagagcagtatgatgaaaaacgttcacaggcgaatggtgcaggagctctgtcctatgtatctcctaacacttcaaaatgtcctgtcacgattcctgaggatcaaaagaagtttattgaccaagtggtagagaaaatagaggatttattacaaagtgaagaaaacaagaacttggatttagagccatgtaccgggttccaaagaaaactaatttatcagactttgagctggaaaaggagcgatatatagttatcagcaaagtagatgaagaagaacgcaaaagaagagagcagcagaaacatgccaaagaacaggaggagctgaatgatgctgtgggatt

SEQ ID NO: 167125 - DNA, 783 bp, Homo sapiens
  Payload ID: 12895
  Gene Symbol: PARN
  Gene Name: poly(A)-specific ribonuclease
  ENST ID: ENST00000569444
  CDS Start-End: 1-783
aggcgaatggtgcaggagctctgtcctatgtatctcctaacacttcaaaatgtcctgtcacgattcctgaggatcaaaagaagtttattgaccaagtggtagagaaaatagaggatttattacaaagtgaagaaaacaagaacttggatttagagccatgtaccgggttccaaagaaaactaatttatcagactttgagctggaagtatccgaaaggcattcatgttgagactttagaaactgaaaaggaggagctgaatgatgctgtgggattttctagagtcattcacgccattgctaattcgggaaaacttgttattggacacaatatgctcttggacgtcatgcacacagttcatcagttctactgccctctgcctgcggacttaagtgagtttaaagagatgacaacatgtgttttccccagactcttggatactaaattgatggccagcacacaaccttttaaggatatcattaacaacacatcccttgcggaattggaaaagcggttaaaagagacacctttcaaccctcctaaagttgaaagtgccgaaggttttccaagttatgacacagcctctgaacaactccacgaggcaggctacgatgcctacatcacagggctgtgcttcatctccatggccaattacctaggttcttttctcagccctccaaaaattcatgtgtctgccagatcaaaactcattgaacctttttttaacaagttatttcttatgagggtcatggatatcccctatctaaacttggaaggaccagact

SEQ ID NO: 167126 - DNA, 577 bp, Homo sapiens
  Payload ID: 12895
  Gene Symbol: PARN
  Gene Name: poly(A)-specific ribonuclease
  ENST ID: ENST00000562896
  CDS Start-End: 249-577
agtcacagcccaaggggtgacgggtgtgtgtcagtttccgctcctcctgggcggctgttcttgtatccggaggatacaagctttgcctagaaattaaaatattacaaggccgcaccgtactctctacagttattttttgccttcacattttatgtagaaaatcacaggactatacgttcaatttacggtgttaagaatcggaattaaatgacttttatttctattaaaatattttttttttcgtagagatggggtctcgctgcgttttccaggctgatcttgaacatatggcgtcaagggatcctcctgcctcagccttacaaagtgctgcgattacagattttaagagtaatcttcacaaagtgtaccaggccatagaggaggccgacttcttcgccatcgatggggagttttcaggaatcagtgatggaccttcagtctctgcattaacaaatggttttgacactccagaagagaggtatcagaagcttaaaaagcattccatggactttttgctatttcagtttggcctttgcacttttaagtatgactacacagattcaaagtatataacgaa

SEQ ID NO: 167127 - DNA, 1029 bp, Homo sapiens
  Payload ID: 12895
  Gene Symbol: PARN
  Gene Name: poly(A)-specific ribonuclease
  ENST ID: ENST00000563641
  CDS Start-End: 136-333
gtttccggaagtcgcggccggcgtcaccgctgcggctgcctcagctactgccgcagtcgccgcggaattcggcgagtagaaccgctgaggcgggcgcgggcccgggtggggccaaggttccggccactctgcagaatggagataatcaggagcaattttaagagtaatcttcacaaagtgtaccaggccatagaggaggccgacttcttcgccatcgatggggagttttcaggaatcagtgatggaccttcagtctctgcattaacaaatggttttgacactccagaagagaggtatcagaagcttaaaaaggtatataacgaagtcatttaacttctatgttttcccgaaacccttcaatagatcctcaccagatgtcaaatttgtttgtcagagctccagcattgactttctagcaagccagggatttgattttaataaagtttttcgaaatggaattccatatttaaatcaggaagaagaaagacagttaagagagcagtatgatgaaaaacgttcacaggcgaatggtgcaggagctctgtcctatgtatctcctaacacttcaaaatgtcctgtcacgattcctgaggatcaaaagaagtttattgaccaagtggtagagaaaatagaggatttattacaaagtgaagaaaacaagaacttggatttagagccatgtaccgggttccaaagaaaactaatttatcagactttgagctggaagtatccgaaaggcattcatgttgagactttagaaactgaaaagaaggagcgatatatagttatcagcaaagtagatgaagaagaacgcaaaagaagagagcagcagaaacatgccaaagaacaggaggagctgaatgatgctgtgggattttctagagtcattcacgccattgctaattcgggaaaacttgttattggacacaatatgctcttggacgtcatgcacacagttcatcagttctactgccctctgcctgcggacttaagtgagtttaaagagatgacaacatgtgttttccccag

SEQ ID NO: 167128 - DNA, 3078 bp, Homo sapiens; identical to SEQ ID NO: 167121
  Payload ID: 12895
  Gene Symbol: PARN
  Gene Name: poly(A)-specific ribonuclease
  Uniprot ID: O95453
  ENST ID: ENST00000615183
  CDS Start-End: 143-2062

SEQ ID NO: 167129 - DNA, 2360 bp, Homo sapiens; identical to SEQ ID NO: 167122
  Payload ID: 12895
  Gene Symbol: PARN
  Gene Name: poly(A)-specific ribonuclease
  Uniprot ID: O95453
  ENST ID: ENST00000618929
  CDS Start-End: 135-1916

SEQ ID NO: 167130 - DNA, 2100 bp, Homo sapiens; identical to SEQ ID NO: 167120
  Payload ID: 12895
  Gene Symbol: PARN
  Gene Name: poly(A)-specific ribonuclease
  Uniprot ID: O95453
  ENST ID: ENST00000634004
  CDS Start-End: 252-1988

SEQ ID NO: 167131 - DNA, 808 bp, Homo sapiens; identical to SEQ ID NO: 167124
  Payload ID: 12895
  Gene Symbol: PARN
  Gene Name: poly(A)-specific ribonuclease
  ENST ID: ENST00000634095
  CDS Start-End: 94-717

SEQ ID NO: 167132 - DNA, 783 bp, Homo sapiens; identical to SEQ ID NO: 167125
  Payload ID: 12895
  Gene Symbol: PARN
  Gene Name: poly(A)-specific ribonuclease
  ENST ID: ENST00000632860
  CDS Start-End: 1-783

SEQ ID NO: 167133 - DNA, 1029 bp, Homo sapiens; identical to SEQ ID NO: 167127
  Payload ID: 12895
  Gene Symbol: PARN
  Gene Name: poly(A)-specific ribonuclease
  ENST ID: ENST00000632226
  CDS Start-End: 136-333

SEQ ID NO: 167134 - DNA, 577 bp, Homo sapiens; identical to SEQ ID NO: 167126
  Payload ID: 12895
  Gene Symbol: PARN
  Gene Name: poly(A)-specific ribonuclease
  ENST ID: ENST00000633129
  CDS Start-End: 249-577

SEQ ID NO: 167135 - DNA, 1557 bp, Homo sapiens; identical to SEQ ID NO: 167123
  Payload ID: 12895
  Gene Symbol: PARN
  Gene Name: poly(A)-specific ribonuclease
  Uniprot ID: O95453
  ENST ID: ENST00000631868
  CDS Start-End: 114-1508

SEQ ID NO: 167136 - DNA, 1921 bp, Homo sapiens
  Payload ID: 12896
  Gene Symbol: PNLDC1
  Gene Name: poly(A)-specific ribonuclease (PARN)-like domain containing 1
  ENST ID: ENST00000275275
  CDS Start-End: 40-159
acgtgatagcgctgggcgactccgcggagctgcacggccatggacgtgggcgccgacgagttcgaggagagcctccctctgctgcaggagctcgtccaggaggccgacttcgtggaggtgagcgcgggtgccttggccgcctgcagatctacagtgtgaggagtgctggcgatgttctgcacccgaggactgctattttttgccttcctggcaggtctggacatagagttcacgggccttcgttctaacctgtctgggccccagcagatcagtctttttgatttgccatcggagtggtatctaaagacccgtcagagtgttcagcaatttacagtctgtcagattggattgtctgtgttttccgctattgaaggagaggcaaacaagtatatagcccattcttgtaacttctatctcttccctacaacgtttgggattttggactcagaattctccttccaggcttccagtgttcagtttttgaatcagtatggcttcaactataacaagtttctcaaaaacggaatcccatatatgaatgaagaacaggagaagaaaattagacacgatatcctgactgggaactggagagttcgcagctctccggataaagaccaaatcaaggtggtgattgacgaagtgacgcggtggctggagctggccaaggaaggcgactggatgactcttcctgggatcactggcttccaggcctttgaggtccaactggtgctgaggcaggccctccccaacatctggacggtgctgaaagatgagggggtggtagtgaagaaagtgagtaaacaacatcgttggtatcttcagaacacctcttgtgaccgagagagctgttggaaggaaaatattcttctctcagcaaggggtttttctgtctttttccaaatgctggtgaaagcccagaagcccttagtgggacataatatgatgatggacctgctgcacctccatgagaagttcttcagacccctcccagaaagctacgatcaatttaagcagaatatccacagcctatttcctgttctcattgataccaagagtgtaacaaaggatatctggaaggagatgaatttcccgagggtgtcgaatctttcggaagtctatgaagtcctgaacagtgacttgaatcccaccaagaattctggaccagagattgttcacgcgagcaggtgtgagaaatatgttgagacaaagtgcccccacgaagccgcgtatgatgccttcctctgtgggtcagttcttttgaaagtggcacacttgcttctacagaagatataccacatcgaccccgtgcccgagtcatcctttcctcagtaccttgacgtgctggctccttacgtgaaccaagtgaacctcatccgagcgggggtcccaaagatcaatttttctggtccagattatcccagtatccgacctcccatcctcatcctcagcgtcaaaaggtggcctggggtcagcgagcagcaagtctaccataagtttcagaatctctgcaagtttgatgtcaggcgactcacaagaagccagttcttactcctgaccaataagtttaaggatgcgcggaacatcctgaaggagtaccgggaccacccgaccctgtgcatctccctgtaccgctactggaggcactccccaaacgtcaactgcctgctccaagtctgtggcatagtgactgcctgggcccttctcgcgttcatccttggaagatctggtacctgagtgcagcgaggcctcctgcggccaccctcgggtccccatgctctctgggaggtgtgctgggtgtgttcgtgtaaatcagattctgtttgcagatggatctgtttggtcttttctagaaattctgttatgtcctgaacgtgaaattctgtcaacactctcaatgataaatcagtccttagatatcgta

SEQ ID NO: 167137 - DNA, 1816 bp, Homo sapiens
  Payload ID: 12896
  Gene Symbol: PNLDC1
  Gene Name: poly(A)-specific ribonuclease (PARN)-like domain containing 1
  Uniprot ID: Q8NA58
  ENST ID: ENST00000392167
  CDS Start-End: 35-1630
atagcgctgggcgactccgcggagctgcacggccatggacgtgggcgccgacgagttcgaggagagcctccctctgctgcaggagctcgtccaggaggccgacttcgtgggtctggacatagagttcacgggccttcgttctaacctgtctgggccccagcagatcagtctttttgatttgccatcggagtggtatctaaagacccgtcagagtgttcagcaatttacagtctgtcagattggattgtctgtgttttccgctattgaaggagaggcaaacaagtatatagcccattcttgtaacttctatctcttccctacaacgtttgggattttggactcagaattctccttccaggcttccagtgttcagtttttgaatcagtatggcttcaactataacaagtttctcaaaaacggaatcccatatatgaatgaagaacaggagaagaaaattagacacgatatcctgactgggaactggagagttcgcagctctccggataaagaccaaatcaaggtggtgattgacgaagtgacgcggtggctggagctggccaaggaaggcgactggatgactcttcctgggatcactggcttccaggcctttgaggtccaactggtgctgaggcaggccctccccaacatctggacggtgctgaaagatgagggggtggtagtgaagaaagtgagtaaacaacatcgttggtatcttcagaacacctcttgtgaccgagagagctgttggaaggaaaatattcttctctcagcaaggggtttttctgtctttttccaaatgctggtgaaagcccagaagcccttagtgggacataatatgatgatggacctgctgcacctccatgagaagttcttcagacccctcccagaaagctacgatcaatttaagcagaatatccacagcctatttcctgttctcattgataccaagagtgtaacaaaggatatctggaaggagatgaatttcccgagggtgtcgaatctttcggaagtctatgaagtcctgaacagtgacttgaatcccaccaagaattctggaccagagattgttcacgcgagcaggtgtgagaaatatgttgagacaaagtgcccccacgaagccgcgtatgatgccttcctctgtgggtcagttcttttgaaagtggcacacttgcttctacagaagatataccacatcgaccccgtgcccgagtcatcctttcctcagtaccttgacgtgctggctccttacgtgaaccaagtgaacctcatccgagcgggggtcccaaagatcaatttttctggtccagattatcccagtatccgacctcccatcctcatcctcagcgtcaaaaggtggcctggggtcagcgagcagcaagtctaccataagtttcagaatctctgcaagtttgatgtcaggcgactcacaagaagccagttcttactcctgaccaataagtttaaggatgcgcggaacatcctgaaggagtaccgggaccacccgaccctgtgcatctccctgtaccgctactggaggcactccccaaacgtcaactgcctgctccaagtctgtggcatagtgactgcctgggcccttctcgcgttcatccttggaagatctggtacctgagtgcagcgaggcctcctgcggccaccctcgggtccccatgctctctgggaggtgtgctgggtgtgttcgtgtaaatcagattctgtttgcagatggatctgtttggtcttttctagaaattctgttatgtcctgaacgtgaaattctgtcaacactctcaatgataaatcagtccttagatatcgt

SEQ ID NO: 167138 - DNA, 1940 bp, Homo sapiens
  Payload ID: 12896
  Gene Symbol: PNLDC1
  Gene Name: poly(A)-specific ribonuclease (PARN)-like domain containing 1
  Uniprot ID: Q8NA58
  ENST ID: ENST00000610273
  CDS Start-End: 192-1754
gtgggcagcacgtgggcagcacgtgatagcgctgggcgactccgcggagctgcacggccatggacgtgggcgccgacgagttcgaggagagcctccctctgctgcaggagctcgtccaggaggccgacttcgtggaggtgagcgcgggtgccttggccgcctgcagatctacagtgtgaggagtgctggcgatgttctgcacccgaggactgctattttttgccttcctggcaggtctggacatagagttcacgggccttcgttctaacctgtctgggccccagcagatcagtctttttgatttgccatcggagtggtatctaaagacccgtcagagtgttcagcaatttacagtctgtcagattggattgtctgtgttttccgctattgaaggagaggcaaacaagtatatagcccattcttgtaacttctatctcttccctacaacgtttgggattttggactcagaattctccttccaggcttccagtgttcagtttttgaatcagtatggcttcaactataacaagtttctcaaaaacggaatcccatatatgaatgaagaacaggagaagaaaattagacacgatatcctgactgggaactggagagttcgcagctctccggataaagaccaaatcaaggtggtgattgacgaagtgacgcggtggctggagctggccaaggaaggcgactggatgactcttcctgggatcactggcttccaggcctttgaggtccaactggtgctgaggcaggccctccccaacatctggacggtgctgaaagatgagggggtggtagtgaagaaagtgagtaaacaacatcgttggtatcttcagaacacctcttgtgaccgagagagctgttggaaggaaaatattcttctctcagcaaggggtttttctgtctttttccaaatgctggtgaaagcccagaagcccttagtgggacataatatgatgatggacctgctgcacctccatgagaagttcttcagacccctcccagaaagctacgatcaatttaagcagaatatccacagcctatttcctgttctcattgataccaagagtgtaacaaaggatatctggaaggagatgaatttcccgagggtgtcgaatctttcggaagtctatgaagtcctgaacagtgacttgaatcccaccaagaattctggaccagagattgttcacgcgagcaggtgtgagaaatatgttgagacaaagtgcccccacgaagccgcgtatgatgccttcctctgtgggtcagttcttttgaaagtggcacacttgcttctacagaagatataccacatcgaccccgtgcccgagtcatcctttcctcagtaccttgacgtgctggctccttacgtgaaccaagtgaacctcatccgagcgggggtcccaaagatcaatttttctggtccagattatcccagtatccgacctcccatcctcatcctcagcgtcaaaaggtggcctggggtcagcgagcagcaagtctaccataagtttcagaatctctgcaagtttgatgtcaggcgactcacaagaagccagttcttactcctgaccaataagtttaaggatgcgcggaacatcctgaaggagtaccgggaccacccgaccctgtgcatctccctgtaccgctactggaggcactccccaaacgtcaactgcctgctccaagtctgtggcatagtgactgcctgggcccttctcgcgttcatccttggaagatctggtacctgagtgcagcgaggcctcctgcggccaccctcgggtccccatgctctctgggaggtgtgctgggtgtgttcgtgtaaatcagattctgtttgcagatggatctgtttggtcttttctagaaattctgttatgtcctgaacgtgaaattctgtcaacactctcaatgataaatcagtccttagatatcgt

SEQ ID NO: 167139 - DNA, 578 bp, Homo sapiens
  Payload ID: 12896
  Gene Symbol: PNLDC1
  Gene Name: poly(A)-specific ribonuclease (PARN)-like domain containing 1
  ENST ID: ENST00000610048
  CDS Start-End: 38-157
gtgatagcgctgggcgactccgcggagctgcacggccatggacgtgggcgccgacgagttcgaggagagcctccctctgctgcaggagctcgtccaggaggccgacttcgtggaggtgagcgcgggtgccttggccgcctgcagatctacagtgtgaggagtgctggcgatgttctgcacccgaggactgctattttttgccttcctggcaggtctggacatagagttcacgggccttcgttctaacctgtctgggccccagcagatcaggattgtctgtgttttccgctattgaaggagaggcaaacaagtatatagcccattcttgtaacttctatctcttccctacaacgtttgggattttggactcagaattctccttccaggcttccagtgttcagtttttgaatcagtatggcttcaactataacaagtttctcaaaaacggaatcccatatatgaatgaagaacaggagaagaaaattagacacgatatcctgactgggaactggagagttcgcagctctccggataaagaccaaatcaaggtggtgattgacgaagtgacgcggtggctg

SEQ ID NO: 167140 - DNA, 965 bp, Homo sapiens
  Payload ID: 12896
  Gene Symbol: PNLDC1
  Gene Name: poly(A)-specific ribonuclease (PARN)-like domain containing 1
  ENST ID: ENST00000610041
  CDS Start-End: 43-162
agcacgtgatagcgctgggcgactccgcggagctgcacggccatggacgtgggcgccgacgagttcgaggagagcctccctctgctgcaggagctcgtccaggaggccgacttcgtggaggtgagcgcgggtgccttggccgcctgcagatctacagtgtgaggagtgctggcgatgttctgcacccgaggactgctattttttgccttcctggcaggtctggacatagagttcacgggccttcgttctaacctgtctgggccccagcagatcagtctttttgatttgccatcggagtggtatctaaagacccgtcagagtgttcagcaatttacagtctgtcagattggattgtctgtgttttccgctattgaaggagaggcaaacaagtatgtatcaagagcttctgcaaacataggtgcttcccacctatgttccacagctgccaccttcaaattctgcctcaggtatatagcccattcttgtaacttctatctcttccctacaacgtttgggattttggactcagaattctccttccaggcttccagtgttcagtttttgaatcagtatggcttcaactataacaagtttctcaaaaacggaatcccatatatgaatgaagaacaggagaagaaaattagacacgatatcctgactgggaactggagagttcgcagctctccggataaagaccaaatcaaggtggtgattgacgaagtgacgcggtggctggagctggccaaggaaggcgactggatgactcttcctgggatcactggcttccaggcctttgaggtccaactggtgctgaggcaggccctccccaacatctggacggtgctgaaagatgagggggtggtagtgaagaaagtgagtaaacaacatcgttggtatcttcagaacacctcttgtgaccgagagagctgttggaaggaaaatattcttctctcagcaaggggttt

SEQ ID NO: 167141 - DNA, 1750 bp, Homo sapiens
  Payload ID: 12897
  Gene Symbol: PCBP1
  Gene Name: poly(rC) binding protein 1
  Uniprot ID: Q15365
  ENST ID: ENST00000303577
  CDS Start-End: 291-1361
aaagcgggcttcccgccccgcccagaccgccgaggctgccgccggagtcgccaccgccgcgccctcgcccacccgcccgcccgccgctcccggccccgctcgccccctccgccgccgccgcccgcccctgcgactacgctgcggcctcccgcccgctcccgctcgctcccgcggccctcgctcgcctcgcgccggcagttttgggcctacacctcccctccccccgccagccgccaaagacttgaccacgtaacgagcccaactcccccgaacgccgcccgccgctcgccatggatgccggtgtgactgaaagtggactaaatgtgactctcaccattcggcttcttatgcacggaaaggaagtaggaagcatcattgggaagaaaggggagtcggttaagaggatccgcgaggagagtggcgcgcggatcaacatctcggaggggaattgtccggagagaatcatcactctgaccggccccaccaatgccatctttaaggctttcgctatgatcatcgacaagctggaggaagatatcaacagctccatgaccaacagtaccgcggccagcaggcccccggtcaccctgaggctggtggtgccggccacccagtgcggctccctgattgggaaaggcgggtgtaagatcaaagagatccgcgagagtacgggggcgcaggtccaggtggcgggggatatgctgcccaactccaccgagcgggccatcaccatcgctggcgtgccgcagtctgtcaccgagtgtgtcaagcagatttgcctggtcatgctggagacgctctcccagtctccgcaagggagagtcatgaccattccgtaccagcccatgccggccagctccccagtcatctgcgcgggcggccaagatcggtgcagcgacgctgcgggctacccccatgccacccatgacctggagggaccacctctagatgcctactcgattcaaggacaacacaccatttctccgctcgatctggccaagctgaaccaggtggcaagacaacagtctcactttgccatgatgcacggcgggaccggattcgccggaattgactccagctctccagaggtgaaaggctattgggcaagtttggatgcatctactcaaaccacccatgaactcaccattccaaataacttaattggctgcataatcgggcgccaaggcgccaacattaatgagatccgccagatgtccggggcccagatcaaaattgccaacccagtggaaggctcctctggtaggcaggttactatcactggctctgctgccagtattagtctggcccagtatctaatcaatgccaggctttcctctgagaagggcatggggtgcagctagaacagtgtaggttccctcaataacccctttctgctgttctcccatgatccaactgtgtaatttctggtcagtgattccaggttttaaataatttgtaagtgttcagtttctacacaactttatcatccgctaagaatttaaaaatcacattctctgttcagctgttaatgctgggatccatatttagttttataagcttttccctgtttttagttttgttttgggttttttggctcatgaattttatttctgtttgtcgataagaaatgtaagagtggaatgttaataaatttcagtttagttctgtaatgtcaagaatttaagaattaaaaaacggattggttaaaaaatgcttcatatttgaaaaagctgggaattgctgtcttaaa

SEQ ID NO: 167142 - DNA, 1730 bp, Homo sapiens
  Payload ID: 12898
  Gene Symbol: PCBP2
  Gene Name: poly(rC) binding protein 2
  Uniprot ID: Q15366
  ENST ID: ENST00000359282
  CDS Start-End: 351-1346
cccagaccagcagaggcagcagccggagcagccgcagcctgcgccctctcccgcccgcccgccctccgcccgcccgcccgccctccgccgccctccacccgccccggggtctctttcccccttcctcctcctcctcctccacccccccttcctcctccgcccgcccgcggggcccccctcgccttcccgcccgcccctattgttccgcccccggcctcccgcccttccccttcccgcccgctccccttttcccctcagtcgcctcgcgcctgcagtttttggctttcacccccaaccagtgaccaaagacttgaccactcaaagtccagctccccagaacactgctcgacatggacaccggtgtgattgaaggtggattaaatgtcactctcaccatccggctacttatgcatggaaaggaagttggcagtatcatcggaaagaaaggagaatcagttaagaagatgcgcgaggagagtggtgcacgtatcaacatctcagaagggaattgtcctgagagaattatcactttggctggacccactaatgccatcttcaaagcctttgctatgatcattgacaaactggaagaggacataagcagctctatgaccaatagcacagctgccagtagacccccggtcaccctgaggctggtggtccctgctagtcagtgtggctctctcattggaaaaggtggatgcaagatcaaggaaatacgagagagtacaggggctcaggtccaggtggcaggggatatgctacccaactcaactgagcgggccatcactattgctggcattccacaatccatcattgagtgtgtcaaacagatctgcgtggtcatgttggagtcccccccgaagggcgtgaccatcccgtaccggcccaagccgtccagctctccggtcatctttgcaggtggtcaggcctataccattcaaggacagtatgccattccacagccagatttgaccaagctgcaccagttggcaatgcaacagtctcattttcccatgacgcatggcaacaccggattcagtggcattgaatccagctctccagaggtgaaaggctattgggcaggtttggatgcatctgctcagactacttctcatgaactcaccattccaaacgatttgattggctgcataatcgggcgtcaaggcgccaaaatcaatgagatccgtcagatgtctggggcgcagatcaaaattgcgaacccagtggaaggatctactgataggcaggttaccatcactggatctgctgccagcattagcctggctcaatatctaatcaatgtcaggctttcctcggagacgggtggcatggggagcagctagaacaatgcagattcatccataatccctttctgctgttcaccaccacccatgatccatctgtgtagtttctgaacagtcagcgattccaggttttaaatagtttgtaaattttcagtttctacacactttatcatccactcgtgattttttaattaaagcgttttaattcctttctctgttcagctgttgatgctgagatccatatttagttttataagcttctccctggttttttttttttggctcatgaatttttctgtttgtcatggaaatgtaagagtggaatattaatacatttcagtttagttctgtaatgtcaggaatttttcaaaaaaattaaaagatggactggagctttttctttgtgaatagaaactggatgcc

SEQ ID NO: 167143 - DNA, 1814 bp, Homo sapiens
  Payload ID: 12898
  Gene Symbol: PCBP2
  Gene Name: poly(rC) binding protein 2
  Uniprot ID: Q15366
  ENST ID: ENST00000359462
  CDS Start-End: 324-1424
gcagccgcagcctgcgccctctcccgcccgcccgccctccgcccgcccgcccgccctccgccgccctccacccgccccggggtctctttcccccttcctcctcctcctcctccacccccccttcctcctccgcccgcccgcggggcccccctcgccttcccgcccgcccctattgttccgcccccggcctcccgcccttccccttcccgcccgctccccttttcccctcagtcgcctcgcgcctgcagtttttggctttcacccccaaccagtgaccaaagacttgaccactcaaagtccagctccccagaacactgctcgacatggacaccggtgtgattgaaggtggattaaatgtcactctcaccatccggctacttatgcatggaaaggaagttggcagtatcatcggaaagaaaggagaatcagttaagaagatgcgcgaggagagtggtgcacgtatcaacatctcagaagggaattgtcctgagagaattatcactttggctggacccactaatgccatcttcaaagcctttgctatgatcattgacaaactggaagaggacataagcagctctatgaccaatagcacagctgccagtagacccccggtcaccctgaggctggtggtccctgctagtcagtgtggctctctcattggaaaaggtggatgcaagatcaaggaaatacgagagagtacaggggctcaggtccaggtggcaggggatatgctacccaactcaactgagcgggccatcactattgctggcattccacaatccatcattgagtgtgtcaaacagatctgcgtggtcatgttggagactctctcccagtcccccccgaagggcgtgaccatcccgtaccggcccaagccgtccagctctccggtcatctttgcaggtggtcaggacaggtacagcacaggcagcgacagtgcgagctttccccacaccaccccgtccatgtgcctcaaccctgacctggagggaccacctctagaggcctataccattcaaggacagtatgccattccacagccagatttgaccaagctgcaccagttggcaatgcaacagtctcattttcccatgacgcatggcaacaccggattcagtggcattgaatccagctctccagaggtgaaaggctattgggcaggtttggatgcatctgctcagactacttctcatgaactcaccattccaaacgatttgattggctgcataatcgggcgtcaaggcgccaaaatcaatgagatccgtcagatgtctggggcgcagatcaaaattgcgaacccagtggaaggatctactgataggcaggttaccatcactggatctgctgccagcattagcctggctcaatatctaatcaatgtcaggctttcctcggagacgggtggcatggggagcagctagaacaatgcagattcatccataatccctttctgctgttcaccaccacccatgatccatctgtgtagtttctgaacagtcagcgattccaggttttaaatagtttgtaaattttcagtttctacacactttatcatccactcgtgattttttaattaaagcgttttaattcctttctctgttcagctgttgatgctgagatccatatttagttttataagcttctccctggttttttttttttggctcatgaatttttctgtttgtcatggaaatgtaagagtggaatattaatacatttcagtttagttctgtaatgtcaggaatttttcaaaaaaattaaaagatggactggagctttttctttgtgaatagaaactggatgccacagtg

SEQ ID NO: 167144 - DNA, 2741 bp, Homo sapiens
  Payload ID: 12898
  Gene Symbol: PCBP2
  Gene Name: poly(rC) binding protein 2
  Uniprot ID: Q15366
  ENST ID: ENST00000455667
  CDS Start-End: 65-1021
cacccccaaccagtgaccaaagacttgaccactcaaagtccagctccccagaacactgctcgacatggacaccggtgtgattgaaggtggattaaatgtcactctcaccatccggctacttatgcatggaaaggaagttggcagtatcatcggaaagaaaggagaatcagttaagaagatgcgcgaggagagtggtgcacgtatcaacatctcagaagggaattgtcctgagagaattatcactttggctggacccactaatgccatcttcaaagcctttgctatgatcattgacaaactggaagaggacataagcagctctatgaccaatagcacagctgccagtagacccccggtcaccctgaggctggtggtccctgctagtcagtgtggctctctcattggaaaaggtggatgcaagatcaaggaaatacgagagagtacaggggctcaggtccaggtggcaggggatatgctacccaactcaactgagcgggccatcactattgctggcattccacaatccatcattgagtgtgtcaaacagatctgcgtggtcatgttggagtcccccccgaagggcgtgaccatcccgtaccggcccaagccgtccagctctccggtcatctttgcaggtggtcaggcctataccattcaaggacagtatgccattccacagccagatttgaccaagctgcaccagttggcaatgcaacagtctcattttcccatgacgcatggcaacaccggattcagtgcaggtttggatgcatctgctcagactacttctcatgaactcaccattccaaacgatttgattggctgcataatcgggcgtcaaggcgccaaaatcaatgagatccgtcagatgtctggggcgcagatcaaaattgcgaacccagtggaaggatctactgataggcaggttaccatcactggatctgctgccagcattagcctggctcaatatctaatcaatgtcaggctttcctcggagacgggtggcatggggagcagctagaacaatgcagattcatccataatccctttctgctgttcaccaccacccatgatccatctgtgtagtttctgaacagtcagcgattccaggttttaaatagtttgtaaattttcagtttctacacactttatcatccactcgtgattttttaattaaagcgttttaattcctttctctgttcagctgttgatgctgagatccatatttagttttataagcttctccctggttttttttttttggctcatgaatttttctgtttgtcatggaaatgtaagagtggaatattaatacatttcagtttagttctgtaatgtcaggaatttttcaaaaaaattaaaagatggactggagctttttctttgtgaatagaaactggatgccacagtgattcatgtgggttttattcctcttgtcttgctgttatttttgtaccttttatccctcaaaggacccttcttgggttttgaatggaagcctttattccggttaagatgttttcttctattttaccacttccatctttttttgtggccctcgatcctatttttccctgactccatgcttggttggcccttataaaacttgtgcccaaaagattgaggattagactttccgaggacttacctgtcctaggggagtaggcaagcacttccactagggagggggtgggggaaaggaatgacacatgacatacatggcatacacattaagcagttgatcatatgtctgactgggttccagtttcttgggaatgttggtccccttgttcaggcttgcatattttaaactaaaaatttcagtctattgtttttagtaacttcatttatagtcctccataacaagttagaaggatgtatctgctaccatttattcctataattttagaaagttggggcttgacattatactcatttagtgagagtagatgcaaaaaagtggaggggcaggagaacttctccagacacctcagataaagtccggagcccaaggctttatcttaaccatgtatggtaccccattcattcatcaagaaaaccctcaacagctgggcctgcatggagtgttatatttcaaggtttttcacaggggttacagtaggacagtccccaccccaatcaggcaccaggataaaagcagggacttaaacagcaccccggttcttcagcctgagccatcacatgctatcagtctcctaacctccccctgggccttaagacagggcttgggcagagaagataaatggtgggacaaaaaaatgagttacattgccacctgagaaacctcagaggggaggacccagccttagcctccctcctcccaagtgcaaaatgtgtaaacagagtaaacggaacagaaaagtgcagtctaagtggttttctctcctgcccctcccaccgcccctccccccaccccctattatttggggataaagaatataaagacaaccctggcttttctattgccttgttgcttgctgaatataaggaatggggtggggcaggaaggggcttgcccttagccacagctctacggctgtgcctcattcatttccacagctgccagtgtccctagagtttatcaggtgaattggtcaggggatcagtctccctcgagcctgacttacggctgggacagccccatctttctgttgattatgtggcgcatatatatatatatatgtatatatatataatttatataaatatttctctatgta

SEQ ID NO: 167145 - DNA, 3026 bp, Homo sapiens
  Payload ID: 12898
  Gene Symbol: PCBP2
  Gene Name: poly(rC) binding protein 2
  Uniprot ID: Q15366
  ENST ID: ENST00000437231
  CDS Start-End: 351-1307
cccagaccagcagaggcagcagccggagcagccgcagcctgcgccctctcccgcccgcccgccctccgcccgcccgcccgccctccgccgccctccacccgccccggggtctctttcccccttcctcctcctcctcctccacccccccttcctcctccgcccgcccgcggggcccccctcgccttcccgcccgcccctattgttccgcccccggcctcccgcccttccccttcccgcccgctccccttttcccctcagtcgcctcgcgcctgcagtttttggctttcacccccaaccagtgaccaaagacttgaccactcaaagtccagctccccagaacactgctcgacatggacaccggtgtgattgaaggtggattaaatgtcactctcaccatccggctacttatgcatggaaaggaagttggcagtatcatcggaaagaaaggagaatcagttaagaagatgcgcgaggagagtggtgcacgtatcaacatctcagaagggaattgtcctgagagaattatcactttggctggacccactaatgccatcttcaaagcctttgctatgatcattgacaaactggaagaggacataagcagctctatgaccaatagcacagctgccagtagacccccggtcaccctgaggctggtggtccctgctagtcagtgtggctctctcattggaaaaggtggatgcaagatcaaggaaatacgagagagtacaggggctcaggtccaggtggcaggggatatgctacccaactcaactgagcgggccatcactattgctggcattccacaatccatcattgagtgtgtcaaacagatctgcgtggtcatgttggagtcccccccgaagggcgtgaccatcccgtaccggcccaagccgtccagctctccggtcatctttgcaggtggtcaggcctataccattcaaggacagtatgccattccacagccagatttgaccaagctgcaccagttggcaatgcaacagtctcattttcccatgacgcatggcaacaccggattcagtgcaggtttggatgcatctgctcagactacttctcatgaactcaccattccaaacgatttgattggctgcataatcgggcgtcaaggcgccaaaatcaatgagatccgtcagatgtctggggcgcagatcaaaattgcgaacccagtggaaggatctactgataggcaggttaccatcactggatctgctgccagcattagcctggctcaatatctaatcaatgtcaggctttcctcggagacgggtggcatggggagcagctagaacaatgcagattcatccataatccctttctgctgttcaccaccacccatgatccatctgtgtagtttctgaacagtcagcgattccaggttttaaatagtttgtaaattttcagtttctacacactttatcatccactcgtgattttttaattaaagcgttttaattcctttctctgttcagctgttgatgctgagatccatatttagttttataagcttctccctggttttttttttttggctcatgaatttttctgtttgtcatggaaatgtaagagtggaatattaatacatttcagtttagttctgtaatgtcaggaatttttcaaaaaaattaaaagatggactggagctttttctttgtgaatagaaactggatgccacagtgattcatgtgggttttattcctcttgtcttgctgttatttttgtaccttttatccctcaaaggacccttcttgggttttgaatggaagcctttattccggttaagatgttttcttctattttaccacttccatctttttttgtggccctcgatcctatttttccctgactccatgcttggttggcccttataaaacttgtgcccaaaagattgaggattagactttccgaggacttacctgtcctaggggagtaggcaagcacttccactagggagggggtgggggaaaggaatgacacatgacatacatggcatacacattaagcagttgatcatatgtctgactgggttccagtttcttgggaatgttggtccccttgttcaggcttgcatattttaaactaaaaatttcagtctattgtttttagtaacttcatttatagtcctccataacaagttagaaggatgtatctgctaccatttattcctataattttagaaagttggggcttgacattatactcatttagtgagagtagatgcaaaaaagtggaggggcaggagaacttctccagacacctcagataaagtccggagcccaaggctttatcttaaccatgtatggtaccccattcattcatcaagaaaaccctcaacagctgggcctgcatggagtgttatatttcaaggtttttcacaggggttacagtaggacagtccccaccccaatcaggcaccaggataaaagcagggacttaaacagcaccccggttcttcagcctgagccatcacatgctatcagtctcctaacctccccctgggccttaagacagggcttgggcagagaagataaatggtgggacaaaaaaatgagttacattgccacctgagaaacctcagaggggaggacccagccttagcctccctcctcccaagtgcaaaatgtgtaaacagagtaaacggaacagaaaagtgcagtctaagtggttttctctcctgcccctcccaccgcccctccccccaccccctattatttggggataaagaatataaagacaaccctggcttttctattgccttgttgcttgctgaatataaggaatggggtggggcaggaaggggcttgcccttagccacagctctacggctgtgcctcattcatttccacagctgccagtgtccctagagtttatcaggtgaattggtcaggggatcagtctccctcgagcctgacttacggctgggacagccccatctttctgttgattatgtggcgcatatatatatatatatgtatatatatataatttatataaatatttctctatgt

SEQ ID NO: 167146 - DNA, 3077 bp, Homo sapiens
  Payload ID: 12898
  Gene Symbol: PCBP2
  Gene Name: poly(rC) binding protein 2
  Uniprot ID: Q15366
  ENST ID: ENST00000447282
  CDS Start-End: 351-1358
cccagaccagcagaggcagcagccggagcagccgcagcctgcgccctctcccgcccgcccgccctccgcccgcccgcccgccctccgccgccctccacccgccccggggtctctttcccccttcctcctcctcctcctccacccccccttcctcctccgcccgcccgcggggcccccctcgccttcccgcccgcccctattgttccgcccccggcctcccgcccttccccttcccgcccgctccccttttcccctcagtcgcctcgcgcctgcagtttttggctttcacccccaaccagtgaccaaagacttgaccactcaaagtccagctccccagaacactgctcgacatggacaccggtgtgattgaaggtggattaaatgtcactctcaccatccggctacttatgcatggaaaggaagttggcagtatcatcggaaagaaaggagaatcagttaagaagatgcgcgaggagagtggtgcacgtatcaacatctcagaagggaattgtcctgagagaattatcactttggctggacccactaatgccatcttcaaagcctttgctatgatcattgacaaactggaagaggacataagcagctctatgaccaatagcacagctgccagtagacccccggtcaccctgaggctggtggtccctgctagtcagtgtggctctctcattggaaaaggtggatgcaagatcaaggaaatacgagagagtacaggggctcaggtccaggtggcaggggatatgctacccaactcaactgagcgggccatcactattgctggcattccacaatccatcattgagtgtgtcaaacagatctgcgtggtcatgttggagactctctcccagtcccccccgaagggcgtgaccatcccgtaccggcccaagccgtccagctctccggtcatctttgcaggtggtcaggcctataccattcaaggacagtatgccattccacagccagatttgaccaagctgcaccagttggcaatgcaacagtctcattttcccatgacgcatggcaacaccggattcagtggcattgaatccagctctccagaggtgaaaggctattgggcaggtttggatgcatctgctcagactacttctcatgaactcaccattccaaacgatttgattggctgcataatcgggcgtcaaggcgccaaaatcaatgagatccgtcagatgtctggggcgcagatcaaaattgcgaacccagtggaaggatctactgataggcaggttaccatcactggatctgctgccagcattagcctggctcaatatctaatcaatgtcaggctttcctcggagacgggtggcatggggagcagctagaacaatgcagattcatccataatccctttctgctgttcaccaccacccatgatccatctgtgtagtttctgaacagtcagcgattccaggttttaaatagtttgtaaattttcagtttctacacactttatcatccactcgtgattttttaattaaagcgttttaattcctttctctgttcagctgttgatgctgagatccatatttagttttataagcttctccctggttttttttttttggctcatgaatttttctgtttgtcatggaaatgtaagagtggaatattaatacatttcagtttagttctgtaatgtcaggaatttttcaaaaaaattaaaagatggactggagctttttctttgtgaatagaaactggatgccacagtgattcatgtgggttttattcctcttgtcttgctgttatttttgtaccttttatccctcaaaggacccttcttgggttttgaatggaagcctttattccggttaagatgttttcttctattttaccacttccatctttttttgtggccctcgatcctatttttccctgactccatgcttggttggcccttataaaacttgtgcccaaaagattgaggattagactttccgaggacttacctgtcctaggggagtaggcaagcacttccactagggagggggtgggggaaaggaatgacacatgacatacatggcatacacattaagcagttgatcatatgtctgactgggttccagtttcttgggaatgttggtccccttgttcaggcttgcatattttaaactaaaaatttcagtctattgtttttagtaacttcatttatagtcctccataacaagttagaaggatgtatctgctaccatttattcctataattttagaaagttggggcttgacattatactcatttagtgagagtagatgcaaaaaagtggaggggcaggagaacttctccagacacctcagataaagtccggagcccaaggctttatcttaaccatgtatggtaccccattcattcatcaagaaaaccctcaacagctgggcctgcatggagtgttatatttcaaggtttttcacaggggttacagtaggacagtccccaccccaatcaggcaccaggataaaagcagggacttaaacagcaccccggttcttcagcctgagccatcacatgctatcagtctcctaacctccccctgggccttaagacagggcttgggcagagaagataaatggtgggacaaaaaaatgagttacattgccacctgagaaacctcagaggggaggacccagccttagcctccctcctcccaagtgcaaaatgtgtaaacagagtaaacggaacagaaaagtgcagtctaagtggttttctctcctgcccctcccaccgcccctccccccaccccctattatttggggataaagaatataaagacaaccctggcttttctattgccttgttgcttgctgaatataaggaatggggtggggcaggaaggggcttgcccttagccacagctctacggctgtgcctcattcatttccacagctgccagtgtccctagagtttatcaggtgaattggtcaggggatcagtctccctcgagcctgacttacggctgggacagccccatctttctgttgattatgtggcgcatatatatatatatatgtatatatatataatttatataaatatttctctatgt

SEQ ID NO: 167147 - DNA, 1296 bp, Homo sapiens
  Payload ID: 12898
  Gene Symbol: PCBP2
  Gene Name: poly(rC) binding protein 2
  Uniprot ID: Q15366
  ENST ID: ENST00000439930
  CDS Start-End: 23-1120
gctccccagaacactgctcgacatggacaccggtgtgattgaaggtggattaaatgtcactctcaccatccggctacttatgcatggaaaggaagttggcagtatcatcggaaagaaaggagaatcagttaagaagatgcgcgaggagagtggtgcacgtatcaacatctcagaagggaattgtcctgagagaattatcactttggctggacccactaatgccatcttcaaagcctttgctatgatcattgacaaactggaagaggacataagcagctctatgaccaatagcacagctgccagtagacccccggtcaccctgaggctggtggtccctgctagtcagtgtggctctctcattggaaaaggtggatgcaagatcaaggaaatacgagagagtacaggggctcaggtccaggtggcaggggatatgctacccaactcaactgagcgggccatcactattgctggcattccacaatccatcattgagtgtgtcaaacagatctgcgtggtcatgttggagactctctcccagtcccccccgaagggcgtgaccatcccgtaccggcccaagccgtccagctctccggtcatctttgcaggtggtcaggacaggtacagcacaggcagcgacagtgcgagctttccccacaccaccccgtccatgtgcctcaaccctgacctggagggaccacctctagaggcctataccattcaaggacagtatgccattccacagccagatttgaccaagctgcaccagttggcaatgcaacagtctcattttcccatgacgcatggcaacaccggattcagtggcattgaatccagctctccagaggtgaaaggctattggggtttggatgcatctgctcagactacttctcatgaactcaccattccaaacgatttgattggctgcataatcgggcgtcaaggcgccaaaatcaatgagatccgtcagatgtctggggcgcagatcaaaattgcgaacccagtggaaggatctactgataggcaggttaccatcactggatctgctgccagcattagcctggctcaatatctaatcaatgtcaggctttcctcggagacgggtggcatggggagcagctagaacaatgcagattcatccataatccctttctgctgttcaccaccacccatgatccatctgtgtagtttctgaacagtcagcgattccaggttttaaatagtttgtaaattttcagtttctacacactttatcatccactcgtgattttttaattaaagcgttttaattcctttctc

SEQ ID NO: 167148 - DNA, 681 bp, Homo sapiens
  Payload ID: 12898
  Gene Symbol: PCBP2
  Gene Name: poly(rC) binding protein 2
  ENST ID: ENST00000551104
  CDS Start-End: 208-681
ctagtcgagggaagggggggctttttttcttaagtggaaaatgcttggataaccgaggggagagggggctgcggagttaaagaaagggtagacgggctcccagttgccgagttaatcaggacgtttctcgggtttttggctttcacccccaaccagtgaccaaagacttgaccactcaaagtccagctccccagaacactgctcgacatggacaccggtgtgattgaaggtggattaaatgtcactctcaccatccggctacttatgcatggaaaggaagttggcagtatcatcggaaagaaaggagaatcagttaagaagatgcgcgaggagagtggtgcacgtatcaacatctcagaagggaattgtcctgagagaattatcactttggctggacccactaatgccatcttcaaagcctttgctatgatcattgacaaactggaagaggacataagcagctctatgaccaatagcacagctgccagtagacccccggtcaccctgaggctggtggtccctgctagtcagtgtggctctctcattggaaaaggtggatgcaagatcaaggaaatacgagagagtacaggggctcaggtccaggtggcaggggatatgctacccaactcaactgagcgggccatcactattgctggcattccacaatccatcattgagtgt

SEQ ID NO: 167149 - DNA, 823 bp, Homo sapiens
  Payload ID: 12898
  Gene Symbol: PCBP2
  Gene Name: poly(rC) binding protein 2
  ENST ID: ENST00000546652
  CDS Start-End: 1-609
ggtgtgattgaaggtggattaaatgtcactctcaccatccggctacttatgcatggaaaggaagttggcagtatcatcggaaagaaaggagaatcagttaagaagatgcgcgaggagagtggtgcacgtatcaacatctcagaagggaattgtcctgagagaattatcactttggctggacccactaatgccatcttcaaagcctttgctatgatcattgacaaactggaagaggacataagcagctctatgaccaatagcacagctgccagtagacccccggtcaccctgaggctggtggtccctgctagtcagtgtggctctctcattggaaaaggtggatgcaagatcaaggaaatacgagagagacgagtctcactgttttgctcaggctggtctccaactcctgagcttccgatgattcgactgccttggtctcccaaagtgctcggattacagatagtacaggggctcaggtccaggtggcaggggatatgctacccaactcaactgagcgggccatcactattgctggcattccacaatccatcattgagtgtgtcaaacagatctgcgtggtcatgttggagtcccccccgaagggcgtgaccatcccgtaccggcccaagccgtccagctctccggtcatctttgcaggtggtcaggacaggtacagcacaggcagcgacagtgcgagctttccccacaccaccccgtccatgtgcctcaaccctgacctggagggaccacctctagagttgaccaagctgcaccagttggcaatgcaacagtctcattttcccatgacgcatggcaacaccgg

SEQ ID NO: 167150 - DNA, 1619 bp, Homo sapiens
  Payload ID: 12898
  Gene Symbol: PCBP2
  Gene Name: poly(rC) binding protein 2
  ENST ID: ENST00000549863
  CDS Start-End: 327-1292
ggagcagccgcagcctgcgccctctcccgcccgcccgccctccgcccgcccgcccgccctccgccgccctccacccgccccggggtctctttcccccttcctcctcctcctcctccacccccccttcctcctccgcccgcccgcggggcccccctcgccttcccgcccgcccctattgttccgcccccggcctcccgcccttccccttcccgcccgctccccttttcccctcagtcgcctcgcgcctgcagtttttggctttcacccccaaccagtgaccaaagacttgaccactcaaagtccagctccccagaacactgctcgacatggacaccggtgtgattgaaggtggattaaatgtcactctcaccatccggctacttatgcatggaaaggaagttggcagtatcatcggaaagaaaggagaatcagttaagaagatgcgcgaggagagtggtgcacgtatcaacatctcagaagggaattgtcctgagagaattatcactttggctggacccactaatgccatcttcaaagcctttgctatgatcattgacaaactggaagaggacataagcagctctatgaccaatagcacagctgccagtagacccccggtcaccctgaggctggtggtccctgctagtcagtgtggctctctcattggaaaaggtggatgcaagatcaaggaaatacgagagagtacaggggctcaggtccaggtggcaggggatatgctacccaactcaactgagcgggccatcactattgctggcattccacaatccatcattgagtgtgtcaaacagatctgcgtggtcatgttggagactctctcccagtcccccccgaagggcgtgaccatcccgtaccggcccaagccgtccagctctccggtcatctttgcaggtggtcagttgaccaagctgcaccagttggcaatgcaacagtctcattttcccatgacgcatggcaacaccggattcagtggcattgaatccagctctccagaggtgaaaggctattgggcaggtttggatgcatctgctcagactacttctcatgaactcaccattccaaacgatttgattggctgcataatcgggcgtcaaggcgccaaaatcaatgagatccgtcagatgtctggggcgcagatcaaaattgcgaacccagtggaaggatctactgataggcaggttaccatcactggatctgctgccagcattagcctggctcaatatctaatcaatgtcaggctttcctcggagacgggtggcatggggagcagctagaacaatgcagattcatccataatccctttctgctgttcaccaccacccatgatccatctgtgtagtttctgaacagtcagcgattccaggttttaaatagtttgtaaattttcagtttctacacactttatcatccactcgtgattttttaattaaagcgttttaattcctttctctgttcagctgttgatgctgagatccatatttagttttataagcttctccctggttttttttttttggctcatgaatttttctgtttgtcatggaaatgtaagagtggaatattaatacatttcagtttagttctgtaatgtcaggaatttt

SEQ ID NO: 167151 - DNA, 734 bp, Homo sapiens
  Payload ID: 12898
  Gene Symbol: PCBP2
  Gene Name: poly(rC) binding protein 2
  ENST ID: ENST00000550192
  CDS Start-End: 543-734
gaaccgtttattttttcccccctctttctagtcgagggaagggggggctttttttcttaagtggaaaatgcttggataaccgaggggagagggggctgcggagttaaagaaagggtagacgggctcccagttgccgagttaatcaggacgtttctcggggtaacgaatttttaaattacaaaatgcctgccgatgtaatcccagaccgagctatttatggaaggggtattggacagcagtgttagcagctggattgctggaatggggtacctttatcttgacctagtcaggagggaaattcgacaaatttcttggattacttggtttggagttagaaatgcatctttgtactttacctcaagaaatggcttcaaataggtttcctgttttgttttttttttttttgccttttcgaagttgcgttattgtgatatttgtaaagggcttcctattacatctgcaagaggtttttggctttcacccccaaccagtgaccaaagacttgaccactcaaagtccagctccccagaacactgctcgacatggacaccggtgtgattgaaggtggattaaatgtcactctcaccatccggctacttatgcatggaaaggaagttggcagtatcatcggaaagaaaggagaatcagttaagaagatgcgcgaggagagtggtgcacgtatcaacatctcagaagggaattgtcctgagagaattatcactttggctggaccc

SEQ ID NO: 167152 - DNA, 1786 bp, Homo sapiens
  Payload ID: 12898
  Gene Symbol: PCBP2
  Gene Name: poly(rC) binding protein 2
  ENST ID: ENST00000553064
  CDS Start-End: 1-933
agtacaggggctcaggtccaggtggcaggggatatgctacccaactcaactgagcgggccatcactattgctggcattccacaatccatcattgagtgtgtcaaacagatctgcgtggtcatgttggagtcccccccgaagggcgtgaccatcccgtaccggcccaagccgtccagctctccggtcatctttgcaggtggtcaggcctataccattcaaggacagtatgccattccacagccagatttgaccaagctgcaccagttggcaatgcaacagtctcattttcccatgacgcatggcaacaccggattcagtggcattgaatccagctctccagaggtgaaaggctattgggcaggtttggatgcatctgctcagactacttctcatgaactcaccattccaaacgatttgattggctgcataatcgggcgtcaaggcgccaaaatcaatgagatccgtcagatgtctggggcgcagatcaaaattgcgaacccagtggaaggatctactgataggcaggttaccatcactggatctgctgccagcattagcctggctcaatatctaatcaatgtcagtttagaaaacgctaaaccctcctcccaggcagcctccgtcacgatccctgatcacctcagcatcaacctctctcaaccctccaccccttcttcttcttcctcctccaccaccaccccctcgctcgccacagcggggacctccgacgcaccctccagcctccccaaccctcttccgaccgccccttgtgtctccagtctgcttggcatgaaacccatccctctcctggctctaaatgttgtgtctgctgctaagggtaccggggcttcagctaccaccaccaccacctctgccgtgccatgtgtaactaacaaactgaaaggcgagaaacagagattctctccctactgattgcataccttgaggcacctcctccagtattattttgttcattttgttttcctttgttaacattggtgagaatgaaactattgtgagcttgttaccgtttcctttttactactttgggggataactgggtgggggtgggggagtggtaacccttgtttaggtttaggccatttcagctgagtgcctgtttcagggtctgacttgaattctttatctagagccacagttttctcttctttcttgtttgttacttttctttgtagctttattctgccttgcaatataacaatgtgttaggctctgtgttaatgaataaaagctgcttcgttaacttttttttttttttttaagaattatttaatggttaagctatcagcaggccttcttggccatatttgtgtttctagctgtaataaagttggcgcagtaagaaccttagtacactgtgtgctgtgaagggtaaagggttgggggcttgtgacttgtggctattcagctaggaagcctgtataactgacatgggctttttgaatcccaagtgaattttatagtcgtttgtcaatatttccacaaagagataacgagtctgtggcagtttagatcctgaaggtcctctgtaattggcaacaagcttcactagtgaggaagtttatctgacttctcagatggccttaccttgccagcagcagctaacaaggtgttcatcccaggattcctctggtgaatggttaccatgaggatctcttccaagtcatacattcaaagaacatacttctttacccagaatgaaggggaggggcaaagtgggataagtctaataaaattaggcagcttctgtctgcattcctctgaa

SEQ ID NO: 167153 - DNA, 1457 bp, Homo sapiens
  Payload ID: 12898
  Gene Symbol: PCBP2
  Gene Name: poly(rC) binding protein 2
  Uniprot ID: Q15366
  ENST ID: ENST00000546463
  CDS Start-End: 128-1216
cttccccttcccgcccgctccccttttcccctcagtcgcctcgcgcctgcagtttttggctttcacccccaaccagtgaccaaagacttgaccactcaaagtccagctccccagaacactgctcgacatggacaccggtgtgattgaaggtggattaaatgtcactctcaccatccggctacttatgcatggaaaggaagttggcagtatcatcggaaagaaaggagaatcagttaagaagatgcgcgaggagagtggtgcacgtatcaacatctcagaagggaattgtcctgagagaattatcactttggctggacccactaatgccatcttcaaagcctttgctatgatcattgacaaactggaagaggacataagcagctctatgaccaatagcacagctgccagtagacccccggtcaccctgaggctggtggtccctgctagtcagtgtggctctctcattggaaaaggtggatgcaagatcaaggaaatacgagagagtacaggggctcaggtccaggtggcaggggatatgctacccaactcaactgagcgggccatcactattgctggcattccacaatccatcattgagtgtgtcaaacagatctgcgtggtcatgttggagtcccccccgaagggcgtgaccatcccgtaccggcccaagccgtccagctctccggtcatctttgcaggtggtcaggacaggtacagcacaggcagcgacagtgcgagctttccccacaccaccccgtccatgtgcctcaaccctgacctggagggaccacctctagaggcctataccattcaaggacagtatgccattccacagccagatttgaccaagctgcaccagttggcaatgcaacagtctcattttcccatgacgcatggcaacaccggattcagtggcattgaatccagctctccagaggtgaaaggctattgggcaggtttggatgcatctgctcagactacttctcatgaactcaccattccaaacgatttgattggctgcataatcgggcgtcaaggcgccaaaatcaatgagatccgtcagatgtctggggcgcagatcaaaattgcgaacccagtggaaggatctactgataggcaggttaccatcactggatctgctgccagcattagcctggctcaatatctaatcaatgtcaggctttcctcggagacgggtggcatggggagcagctagaacaatgcagattcatccataatccctttctgctgttcaccaccacccatgatccatctgtgtagtttctgaacagtcagcgattccaggttttaaatagtttgtaaattttcagtttctacacactttatcatccactcgtgattttttaattaaagcgttttaattcctttctctgttcagctgttgatgctgagatccatatttagttttataagcttctccctggtttttttttttt

SEQ ID NO: 167154 - DNA, 753 bp, Homo sapiens
  Payload ID: 12898
  Gene Symbol: PCBP2
  Gene Name: poly(rC) binding protein 2
  ENST ID: ENST00000550520
  CDS Start-End: 274-753
ccgccctccgccgccctccacccgccccggggtctctttcccccttcctcctcctcctcctccacccccccttcctcctccgcccgcccgcggggcccccctcgccttcccgcccgcccctattgttccgcccccggcctcccgcccttccccttcccgcccgctccccttttcccctcagtcgcctcgcgcctgcagtttttggctttcacccccaaccagtgaccaaagacttgaccactcaaagtccagctccccagaacactgctcgacatggacaccggtgtgattgaaggtggattaaatgtcactctcaccatccggctacttatgcatggaaagaaaggagaatcagttaagaagatgcgcgaggagagtggtgcacgtatcaacatctcagaagggaattgtcctgagagaattatcactttggctggacccactaatgccatcttcaaagcctttgctatgatcattgacaaactggaagaggacataagcagctctatgaccaatagcacagctgccagtagacccccggtcaccctgaggctggtggtccctgctagtcagtgtggctctctcattggaaaaggtggatgcaagatcaaggaaatacgagagagtacaggggctcaggtccaggtggcaggggatatgctacccaactcaactgagcgggccatcactattgctggcattccacaatccatcattgagtgtgtcaaacagatctgcgtggtcatgttggag

SEQ ID NO: 167155 - DNA, 1342 bp, Homo sapiens
  Payload ID: 12898
  Gene Symbol: PCBP2
  Gene Name: poly(rC) binding protein 2
  Uniprot ID: Q15366
  ENST ID: ENST00000552296
  CDS Start-End: 85-1170
cgcctgcagtttttggctttcacccccaaccagtgaccaaagacttgaccactcaaagtccagctccccagaacactgctcgacatggacaccggtgtgattgaaggtggattaaatgtcactctcaccatccggctacttatgcatggaaaggaagttggcagtatcatcggaaagaaaggagaatcagttaagaagatgcgcgaggagagtggtgcacgtatcaacatctcagaagggaattgtcctgagagaattatcactttggctggacccactaatgccatcttcaaagcctttgctatgatcattgacaaactggaagaggacataagcagctctatgaccaatagcacagctgccagtagacccccggtcaccctgaggctggtggtccctgctagtcagtgtggctctctcattggaaaaggtggatgcaagatcaaggaaatacgagagagtacaggggctcaggtccaggtggcaggggatatgctacccaactcaactgagcgggccatcactattgctggcattccacaatccatcattgagtgtgtcaaacagatctgcgtggtcatgttggagtcccccccgaagggcgtgaccatcccgtaccggcccaagccgtccagctctccggtcatctttgcaggtggtcaggacaggtacagcacaggcagcgacagtgcgagctttccccacaccaccccgtccatgtgcctcaaccctgacctggagggaccacctctagaggcctataccattcaaggacagtatgccattccacagccagatttgaccaagctgcaccagttggcaatgcaacagtctcattttcccatgacgcatggcaacaccggattcagtggcattgaatccagctctccagaggtgaaaggctattggggtttggatgcatctgctcagactacttctcatgaactcaccattccaaacgatttgattggctgcataatcgggcgtcaaggcgccaaaatcaatgagatccgtcagatgtctggggcgcagatcaaaattgcgaacccagtggaaggatctactgataggcaggttaccatcactggatctgctgccagcattagcctggctcaatatctaatcaatgtcaggctttcctcggagacgggtggcatggggagcagctagaacaatgcagattcatccataatccctttctgctgttcaccaccacccatgatccatctgtgtagtttctgaacagtcagcgattccaggttttaaatagtttgtaaattttcagtttctacacactttatcatccactcgtgattttttaattaaagcgttttaattcctt

SEQ ID NO: 167156 - DNA, 1202 bp, Homo sapiens
  Payload ID: 12898
  Gene Symbol: PCBP2
  Gene Name: poly(rC) binding protein 2
  Uniprot ID: Q15366
  ENST ID: ENST00000548933
  CDS Start-End: 17-1024
cagaacactgctcgacatggacaccggtgtgattgaaggtggattaaatgtcactctcaccatccggctacttatgcatggaaaggaagttggcagtatcatcggaaagaaaggagaatcagttaagaagatgcgcgaggagagtggtgcacgtatcaacatctcagaagggaattgtcctgagagaattatcactttggctggacccactaatgccatcttcaaagcctttgctatgatcattgacaaactggaagaggacataagcagctctatgaccaatagcacagctgccagtagacccccggtcaccctgaggctggtggtccctgctagtcagtgtggctctctcattggaaaaggtggatgcaagatcaaggaaatacgagagagtacaggggctcaggtccaggtggcaggggatatgctacccaactcaactgagcgggccatcactattgctggcattccacaatccatcattgagtgtgtcaaacagatctgcgtggtcatgttggagactctctcccagtcccccccgaagggcgtgaccatcccgtaccggcccaagccgtccagctctccggtcatctttgcaggtggtcaggcctataccattcaaggacagtatgccattccacagccagatttgaccaagctgcaccagttggcaatgcaacagtctcattttcccatgacgcatggcaacaccggattcagtggcattgaatccagctctccagaggtgaaaggctattgggcaggtttggatgcatctgctcagactacttctcatgaactcaccattccaaacgatttgattggctgcataatcgggcgtcaaggcgccaaaatcaatgagatccgtcagatgtctggggcgcagatcaaaattgcgaacccagtggaaggatctactgataggcaggttaccatcactggatctgctgccagcattagcctggctcaatatctaatcaatgtcaggctttcctcggagacgggtggcatggggagcagctagaacaatgcagattcatccataatccctttctgctgttcaccaccacccatgatccatctgtgtagtttctgaacagtcagcgattccaggttttaaatagtttgtaaattttcagtttctacacactttatcatccactcgtgattttttaattaaagcgttttaattcctttctctg

SEQ ID NO: 167157 - DNA, 1418 bp, Homo sapiens
  Payload ID: 12898
  Gene Symbol: PCBP2
  Gene Name: poly(rC) binding protein 2
  Uniprot ID: Q15366
  ENST ID: ENST00000552819
  CDS Start-End: 68-1036
tttcacccccaaccagtgaccaaagacttgaccactcaaagtccagctccccagaacactgctcgacatggacaccggtgtgattgaaggtggattaaatgtcactctcaccatccggctacttatgcatggaaaggaagttggcagtatcatcggaaagaaaggagaatcagttaagaagatgcgcgaggagagtggtgcacgtatcaacatctcagaagggaattgtcctgagagaattatcactttggctggacccactaatgccatcttcaaagcctttgctatgatcattgacaaactggaagaggacataagcagctctatgaccaatagcacagctgccagtagacccccggtcaccctgaggctggtggtccctgctagtcagtgtggctctctcattggaaaaggtggatgcaagatcaaggaaatacgagagagtacaggggctcaggtccaggtggcaggggatatgctacccaactcaactgagcgggccatcactattgctggcattccacaatccatcattgagtgtgtcaaacagatctgcgtggtcatgttggagactctctcccagtcccccccgaagggcgtgaccatcccgtaccggcccaagccgtccagctctccggtcatctttgcaggtggtcaggcctataccattcaaggacagtatgccattccacagccagatttgaccaagctgcaccagttggcaatgcaacagtctcattttcccatgacgcatggcaacaccggattcagtgcaggtttggatgcatctgctcagactacttctcatgaactcaccattccaaacgatttgattggctgcataatcgggcgtcaaggcgccaaaatcaatgagatccgtcagatgtctggggcgcagatcaaaattgcgaacccagtggaaggatctactgataggcaggttaccatcactggatctgctgccagcattagcctggctcaatatctaatcaatgtcaggctttcctcggagacgggtggcatggggagcagctagaacaatgcagattcatccataatccctttctgctgttcaccaccacccatgatccatctgtgtagtttctgaacagtcagcgattccaggttttaaatagtttgtaaattttcagtttctacacactttatcatccactcgtgattttttaattaaagcgttttaattcctttctctgttcagctgttgatgctgagatccatatttagttttataagcttctccctggttttttttttttggctcatgaatttttctgtttgtcatggaaatgtaagagtggaatattaatacatttcagtttagttctgtaatgtcaggaatttttcaaaaaaattaaaagatggactggagctttttctttgtgaatagaaactggatg

SEQ ID NO: 167158 - DNA, 2543 bp, Homo sapiens
  Payload ID: 12898
  Gene Symbol: PCBP2
  Gene Name: poly(rC) binding protein 2
  ENST ID: ENST00000550585
  CDS Start-End: 1-338
tggctggacccactaatgccatcttcaaagcctttgctatgatcattgacaaactggaagaggacataagcagctctatgaccaatagcacagctgccagtagacccccggtcaccctgaggctggtggtccctgctagtcagtgtggctctctcattggaaaaggtggatgcaagatcaaggaaatacgagaggctggagtgcagtggcgcagtcatggctcactgcagcaaaacatcgaccttcccagcctcaggcgatcctctcatctcagcctcccaaggagccgggactgcaggctcccaccaccacacccaaatttttgtatttttttgtaaaaatggtgttttgccatgtggcccaggctggtttcgaactcctgagctcaagcaatccacccacctcaggctcccagtgttattactacaggcttgagccagcacacttgcttgcctgcagcgtcatttttcttgaccagacttataaacaacaaggagaaaaataggaagatgtattgggaaatagatgtaattctacatctttttttttttttttgagacagggtctcactcaggctgaagtgcagggcataatcgtgatcatggcttactgcaacctcgacttctgggctcatgtaaccctcctacctcaagcctcctgagtacctggtaccataggcgcgctccacaatgcccggctaatttttcttctttctgttgttgtagagacgagtctcactgttttgctcaggctggtctccaactcctgagcttccgatgattcgactgccttggtctcccaaagtgctcggattacagatgtgagccactgtgcctggcccctacttcctgtttaactatggaagttacgttgaattatggaagattttaattgtatctagatgttactgaatttggtgttggaatgaaactcgaatggctgcttgagtttttgggagcgtatcgtacatggcacgacagagatcttaattttgttaattgctatattcgaagcacttctcatggtacctggcacatagaatggccttgatgtaaatattttttcagtaacataatgaaaggtgggtgatacttgtggggcttttgcttcgcccagagaactatcattagttgaaaggcaactatttagaaggaccttttgcttgagagtaggttaaatttaggctgttattcacgcttattcttgtctttcagtggctaatttatttttaactctaattcactaaacagtcctatctggaataagggaagagtgggacaaagaacaaaaagggaagattggaaatggataaatatctactagagttttaggctctgaaattgctgctggaggaattggaagagcatgaactgtttttctctgattttgaatttctttttactccaaagagtacaggggctcaggtccaggtggcaggggatatgctacccaactcaactgagcgggccatcactattgctggcattccacaatccatcattgagtgtgtcaaacagatctgcgtggtcatgttggagactctctcccagtcccccccgaagggcgtgaccatcccgtaccggcccaagccgtccagctctccggtcatctttgcaggtggtcaggacaggtacagcacaggcagcgacagtgcgagctttccccacaccaccccgtccatgtgcctcaaccctgacctggagggaccacctctagaggcctataccattcaaggacagtatgccattccacagccagatttgaccaagctgcaccagttggcaatgcaacagtctcattttcccatgacgcatggcaacaccggattcagtggcattgaatccagctctccagaggtgaaaggctattgggcaggtttggatgcatctgctcagactacttctcatgaactcaccattccaaacgatttgattggctgcataatcgggcgtcaaggcgccaaaatcaatgagatccgtcagatgtctggggcgcagatcaaaattgcgaacccagtggaaggatctactgataggcaggttaccatcactggatctgctgccagcattagcctggctcaatatctaatcaatgtcaggctttcctcggagacgggtggcatggggagcagctagaacaatgcagattcatccataatccctttctgctgttcaccaccacccatgatccatctgtgtagtttctgaacagtcagcgattccaggttttaaatagtttgtaaattttcagtttctacacactttatcatccactcgtgattttttaattaaagcgttttaattcctttctctgttcagctgttgatgctgagatccatatttagttttataagcttctccctggttttttttttttggctcatgaatttttctgtttgtcatggaaatgtaagagtggaatattaatacatttcagtttagttctgtaatgtcaggaatttttcaaaaaaattaaaagatggactggagctttttctttgtgaatagaaactggatgccacagtgattcatgtgggttttatt

SEQ ID NO: 167159 - DNA, 1145 bp, Homo sapiens
  Payload ID: 12898
  Gene Symbol: PCBP2
  Gene Name: poly(rC) binding protein 2
  ENST ID: ENST00000562264
  CDS Start-End: 1-904
gcatggaaaggaagttggcagtatcatcggaaagaaaggagaatcagttaagaagatgcgcgaggagagtggtgcacgtatcaacatctcagaagggaattgtcctgagagaattatcactttggctggacccactaatgccatcttcaaagcctttgctatgatcattgacaaactggaagaggacataagcagctctatgaccaatagcacagctgccagtagacccccggtcaccctgaggctggtggtccctgctagtcagtgtggctctctcattggaaaaggtggatgcaagatcaaggaaatacgagagagtacaggggctcaggtccaggtggcaggggatatgctacccaactcaactgagcgggccatcactattgctggcattccacaatccatcattgagtgtgtcaaacagatctgcgtggtcatgttggagactctctcccagtcccccccgaagggcgtgaccatcccgtaccggcccaagccgtccagctctccggtcatctttgcaggtggtcagttgaccaagctgcaccagttggcaatgcaacagtctcattttcccatgacgcatggcaacaccggattcagtggcattgaatccagctctccagaggtgaaaggctattggggtttggatgcatctgctcagactacttctcatgaactcaccattccaaacgatttgattggctgcataatcgggcgtcaaggcgccaaaatcaatgagatccgtcagatgtctggggcgcagatcaaaattgcgaacccagtggaaggatctactgataggcaggttaccatcactggatctgctgccagcattagcctggctcaatatctaatcaatgtcaggctttcctcggagacgggtggcatggggagcagctagaacaatgcagattcatccataatccctttctgctgttcaccaccacccatgatccatctgtgtagtttctgaacagtcagcgattccaggttttaaatagtttgtaaattttcagtttctacacactttatcatccactcgtgattttttaattaaagcgttttaattcctttctctgttcagctgttgatgctgagatccatatttagttttataagcttctccctggtttttttttttt

SEQ ID NO: 167160 - DNA, 527 bp, Homo sapiens
  Payload ID: 12898
  Gene Symbol: PCBP2
  Gene Name: poly(rC) binding protein 2
  ENST ID: ENST00000552980
  CDS Start-End: 418-527
aggtgtttctgaattctttgaagctttttctgctgaaggacaagtggtgcacgttcagcagtttccttagaaccattgccaattgaaagaaccttgttcatcctgagagtcagcggaaaccctgtcattaatgagaggaactggaaagttgccttctatactgtgtaacagaacctgagctgtatattttgtcatgcagttgtgcttggtgtgtatataagtctgacatactgtcatttaaggaaaagtgtaaagtagaaaatattgataaggtgaaaataacttgggaaataataaccttgttgttttcctcctctgattttggtcatgtttgcattttagtttttggctttcacccccaaccagtgaccaaagacttgaccactcaaagtccagctccccagaacactgctcgacatggacaccggtgtgattgaaggtggattaaatgtcactctcaccatccggctacttatgcatggaaaggaagttggcagtatcatcggaaagaaaggagaatcagttaa

SEQ ID NO: 167161 - DNA, 1919 bp, Homo sapiens
  Payload ID: 12898
  Gene Symbol: PCBP2
  Gene Name: poly(rC) binding protein 2
  ENST ID: ENST00000547859
  CDS Start-End: 1-554
tgttggagtcccccccgaagggcgtgaccatcccgtaccggcccaagccgtccagctctccggtcatctttgcaggtggtcaggacaggtacagcacaggcagcgacagtgcgagctttccccacaccaccccgtccatgtgcctcaaccctgacctggagggaccacctctagaggcctataccattcaaggacagtatgccattccacagccagatttgaccaagctgcaccagttggcaatgcaacagtctcattttcccatgacgcatggcaacaccggattcagtgcaggtttggatgcatctgctcagactacttctcatgaactcaccattccaaacgatttgattggctgcataatcgggcgtcaaggcgccaaaatcaatgagatccgtcagatgtctggggcgcagatcaaaattgcgaacccagtggaaggatctactgataggcaggttaccatcactggatctgctgccagcattagcctggctcaatatctaatcaatgtcaggctttcctcggagacgggtggcatggggagcagctagaacaatgcagattcatccataatccctttctgctgttcaccaccacccatgatccatctgtgtagtttctgaacagtcagcgattccaggttttaaatagtttgtaaattttcagtttctacacactttatcatccactcgtgattttttaattaaagcgttttaattcctttctctgttcagctgttgatgctgagatccatatttagttttataagcttctccctggttttttttttttggctcatgaatttttctgtttgtcatggaaatgtaagagtggaatattaatacatttcagtttagttctgtaatgtcaggaatttttcaaaaaaattaaaagatggactggagctttttctttgtgaatagaaactggatgccacagtgattcatgtgggttttattcctcttgtcttgctgttatttttgtaccttttatccctcaaaggacccttcttgggttttgaatggaagcctttattccggttaagatgttttcttctattttaccacttccatctttttttgtggccctcgatcctatttttccctgactccatgcttggttggcccttataaaacttgtgcccaaaagattgaggattagactttccgaggacttacctgtcctaggggagtaggcaagcacttccactagggagggggtgggggaaaggaatgacacatgacatacatggcatacacattaagcagttgatcatatgtctgactgggttccagtttcttgggaatgttggtccccttgttcaggcttgcatattttaaactaaaaatttcagtctattgtttttagtaacttcatttatagtcctccataacaagttagaaggatgtatctgctaccatttattcctataattttagaaagttggggcttgacattatactcatttagtgagagtagatgcaaaaaagtggaggggcaggagaacttctccagacacctcagataaagtccggagcccaaggctttatcttaaccatgtatggtaccccattcattcatcaagaaaaccctcaacagctgggcctgcatggagtgttatatttcaaggtttttcacaggggttacagtaggacagtccccaccccaatcaggcaccaggataaaagcagggacttaaacagcaccccggttcttcagcctgagccatcacatgctatcagtctcctaacctccccctgggccttaagacagggcttgggcagagaagataaatggtgggacaaaaaaatgagttacattgccacctgagaaacctcagaggggaggacccagccttagcctccctcctcccaagtgcaaaatgtgtaaacagagtaaacggaacagaaaagtgc

SEQ ID NO: 167162 - DNA, 1086 bp, Homo sapiens
  Payload ID: 12899
  Gene Symbol: PCBP3
  Gene Name: poly(rC) binding protein 3
  ENST ID: ENST00000400304
  CDS Start-End: 1-1086
atggagtccaaggtctcagaaggtggcctgaatgtgaccctcaccatccgcctgctgatgcatggaaaggaagttggaagcatcatcgggaagaaaggagaaactgtgaagaagatgcgtgaggagagtggtgcaaggatcaacatctcagagggaaactgcccagagaggattgtgaccatcacaggccccacagacgccatcttcaaggcctttgccatgatcgcatacaagtttgaggaggatatcatcaactccatgagcaacagccctgccaccagcaagcccccagtgacgctgaggctggtggtgcctgccagccagtgtgggtccctgatcggcaaaggaggctccaagatcaaggagatcagggagtccacaggtgcccaggtgcaggtggctggggacatgctgcccaactccacggagcgagcggtgaccatctcggggaccccagatgccatcatccagtgcgtcaagcagatctgtgtggtcatgctggagtccccaccgaaaggtgccaccattccctaccgcccaaagcccgcctccacccctgtcatttttgcaggtggtcaggtaagagccgatccgctcgcggcctccactgccaacctcagccttttactgcagcacccgccgctgcccgcctacacaatccagggacagtatgccatccctcacccggatttgaccaagctccaccagttggccatgcagcaaaccccctttcctcccctcggacagaccaaccccgctttccccggagaaaagctgcctttacactcctccgaagaagctcaaaatctgatgggccagtcatcaggtctggacgccagcccaccggccagcactcatgagctcaccattcccaatgatctaataggctgcataattggacgccaagggaccaaaatcaatgaaattcgacagatgtctggagctcagatcaaaatcgccaacgccacggaagggtcctcagagcgtcagatcaccatcacggggaccccggccaacatcagccttgcccagtatctcatcaacgccaggctgacgtccgaggtcaccgggatgggcacgctgtaa

SEQ ID NO: 167163 - DNA, 1717 bp, Homo sapiens
  Payload ID: 12899
  Gene Symbol: PCBP3
  Gene Name: poly(rC) binding protein 3
  ENST ID: ENST00000400305
  CDS Start-End: 1-969
cctcagccacaatttggcagaaggatggagtccaaggtctcagaaggtggcctgaatgtgaccctcaccatccgcctgctgatgcatggaaaggaagttggaagcatcatcgggaagaaaggagaaactgtgaagaagatgcgtgaggagagtggtgcaaggatcaacatctcagagggaaactgcccagagaggattgtgaccatcacaggccccacagacgccatcttcaaggcctttgccatgatcgcatacaagtttgaggaggatatcatcaactccatgagcaacagccctgccaccagcaagcccccagtgacgctgaggctggtggtgcctgccagccagtgtgggtccctgatcggcaaaggaggctccaagatcaaggagatcagggagtccacaggtgcccaggtgcaggtggctggggacatgctgcccaactccacggagcgagcggtgaccatctcggggaccccagatgccatcatccagtgcgtcaagcagatctgtgtggtcatgctggaggcctacacaatccagggacagtatgccatccctcacccggatcagttgaccaagctccaccagttggccatgcagcaaaccccctttcctcccctcggacagaccaaccccgctttccccggagaaaagctgcctttacactcctccgaagaagctcaaaatctgatgggccagtcatcaggtctggacgccagcccaccggccagcactcatgagctcaccattcccaatgatctaataggctgcataattggacgccaagggaccaaaatcaatgaaattcgacagatgtctggagctcagatcaaaatcgccaacgccacggaagggtcctcagagcgtcagatcaccatcacggggaccccggccaacatcagccttgcccagtatctcatcaacgccaggctgacgtccgaggtcaccgggatgggcacgctgtaatcctacccagcacccttcccccgcgtcacccacctgccagagcctaaggcccccggctctcgcactctgtacagcccaccttccctgcctcacagataccaatagagaggttttcttaattaacaaaaggacgtatgccatggagaaacacacccgcgcacacagctgctctctacagaggctgcaggctccgccgagtcccccctcagtgttattttatttatgacttacgctcccgtctgcccatgcaccggcatgcagtggtaattattttagaaatattgttccttggtgtcagcgtagctgtctgtcttaggagctgggtcggcgttccgacagcacttcctgtccgcccttctcctctgccatccagaaccgtccagaactgttgcctgagacccctcctctctcacacagccctgccatgctgactcggtttcccctcagagccattgttgtctgggctcgagtttctgccccaggttgtgtgctggaatcggggggtggctctcctgccacccatggggagcgccaggagaggagggtcatggaggatgttggggctctgaccccaggagtggggtggagggcggagcctgctgggggccctgccttcacagagatgccgcgtgctgggaaggctcttggggtcccctgagcgtcttccagggtggctggagagcacagacgcgccagggagccccctctgtgctcctcagagttcaataaatgtcgtggcccctcctca

SEQ ID NO: 167164 - DNA, 1911 bp, Homo sapiens
  Payload ID: 12899
  Gene Symbol: PCBP3
  Gene Name: poly(rC) binding protein 3
  Uniprot ID: P57721
  ENST ID: ENST00000400308
  CDS Start-End: 126-1163
gtcggtaggctccacgacaaaagtcaacccttctgtaaatcacctgctgtggttatgatgctctgagttcaatacgtctgaacctttgctgtctatggatctgctctaaaccttatagcctgcttatgggggaaggtgacgccttctgggccccatctgtccttcctcacagcaccctcagcaccttaagccaccaccctcagccacaatttggcagaaggatggagtccaaggtctcagaaggtggcctgaatgtgaccctcaccatccgcctgctgatgcatggaaaggaagttggaagcatcatcgggaagaaaggagaaactgtgaagaagatgcgtgaggagagtggtgcaaggatcaacatctcagagggaaactgcccagagaggattgtgaccatcacaggccccacagacgccatcttcaaggcctttgccatgatcgcatacaagtttgaggaggatatcatcaactccatgagcaacagccctgccaccagcaagcccccagtgacgctgaggctggtggtgcctgccagccagtgtgggtccctgatcggcaaaggaggctccaagatcaaggagatcagggagtccacaggtgcccaggtgcaggtggctggggacatgctgcccaactccacggagcgagcggtgaccatctcggggaccccagatgccatcatccagtgcgtcaagcagatctgtgtggtcatgctggaggcctacacaatccagggacagtatgccatccctcacccggatttgaccaagctccaccagttggccatgcagcaaaccccctttcctcccctcggacagaccaaccccgctttccccggagaaaagctgcctttacactcctccgaagaagctcaaaatctgatgggccagtcatcaggtctggacgccagcccaccggccagcactcatgagctcaccattcccaatgatctaataggctgcataattggacgccaagggaccaaaatcaatgaaattcgacagatgtctggagctcagatcaaaatcgccaacgccacggaagggtcctcagagcgtcagatcaccatcacggggaccccggccaacatcagccttgcccagtatctcatcaacgccaggctgacgtccgaggtcaccgggatgggcacgctgtaatcctacccagcacccttcccccgcgtcacccacctgccagagcctaaggcccccggctctcgcactctgtacagcccaccttccctgcctcacagataccaatagagaggttttcttaattaacaaaaggacgtatgccatggagaaacacacccgcgcacacagctgctctctacagaggctgcaggctccgccgagtcccccctcagtgttattttatttatgacttacgctcccgtctgcccatgcaccggcatgcagtggtaattattttagaaatattgttccttggtgtcagcgtagctgtctgtcttaggagctgggtcggcgttccgacagcacttcctgtccgcccttctcctctgccatccagaaccgtccagaactgttgcctgagacccctcctctctcacacagccctgccatgctgactcggtttcccctcagagccattgttgtctgggctcgagtttctgccccaggttgtgtgctggaatcggggggtggctctcctgccacccatggggagcgccaggagaggagggtcatggaggatgttggggctctgaccccaggagtggggtggagggcggagcctgctgggggccctgccttcacagagatgccgcgtgctgggaaggctcttggggtcccctgagcgtcttccagggtggctggagagcacagacgcgccagggagccccctctgtgctcctcagagttcaataaatgtcgtggcccctcctca

SEQ ID NO: 167165 - DNA, 1986 bp, Homo sapiens
  Payload ID: 12899
  Gene Symbol: PCBP3
  Gene Name: poly(rC) binding protein 3
  Uniprot ID: P57721
  ENST ID: ENST00000400309
  CDS Start-End: 126-1238
gtcggtaggctccacgacaaaagtcaacccttctgtaaatcacctgctgtggttatgatgctctgagttcaatacgtctgaacctttgctgtctatggatctgctctaaaccttatagcctgcttatgggggaaggtgacgccttctgggccccatctgtccttcctcacagcaccctcagcaccttaagccaccaccctcagccacaatttggcagaaggatggagtccaaggtctcagaaggtggcctgaatgtgaccctcaccatccgcctgctgatgcatggaaaggaagttggaagcatcatcgggaagaaaggagaaactgtgaagaagatgcgtgaggagagtggtgcaaggatcaacatctcagagggaaactgcccagagaggattgtgaccatcacaggccccacagacgccatcttcaaggcctttgccatgatcgcatacaagtttgaggaggatatcatcaactccatgagcaacagccctgccaccagcaagcccccagtgacgctgaggctggtggtgcctgccagccagtgtgggtccctgatcggcaaaggaggctccaagatcaaggagatcagggagtccacaggtgcccaggtgcaggtggctggggacatgctgcccaactccacggagcgagcggtgaccatctcggggaccccagatgccatcatccagtgcgtcaagcagatctgtgtggtcatgctggagtccccaccgaaaggtgccaccattccctaccgcccaaagcccgcctccacccctgtcatttttgcaggtggtcaggcctacacaatccagggacagtatgccatccctcacccggatttgaccaagctccaccagttggccatgcagcaaaccccctttcctcccctcggacagaccaaccccgctttccccggagaaaagctgcctttacactcctccgaagaagctcaaaatctgatgggccagtcatcaggtctggacgccagcccaccggccagcactcatgagctcaccattcccaatgatctaataggctgcataattggacgccaagggaccaaaatcaatgaaattcgacagatgtctggagctcagatcaaaatcgccaacgccacggaagggtcctcagagcgtcagatcaccatcacggggaccccggccaacatcagccttgcccagtatctcatcaacgccaggctgacgtccgaggtcaccgggatgggcacgctgtaatcctacccagcacccttcccccgcgtcacccacctgccagagcctaaggcccccggctctcgcactctgtacagcccaccttccctgcctcacagataccaatagagaggttttcttaattaacaaaaggacgtatgccatggagaaacacacccgcgcacacagctgctctctacagaggctgcaggctccgccgagtcccccctcagtgttattttatttatgacttacgctcccgtctgcccatgcaccggcatgcagtggtaattattttagaaatattgttccttggtgtcagcgtagctgtctgtcttaggagctgggtcggcgttccgacagcacttcctgtccgcccttctcctctgccatccagaaccgtccagaactgttgcctgagacccctcctctctcacacagccctgccatgctgactcggtttcccctcagagccattgttgtctgggctcgagtttctgccccaggttgtgtgctggaatcggggggtggctctcctgccacccatggggagcgccaggagaggagggtcatggaggatgttggggctctgaccccaggagtggggtggagggcggagcctgctgggggccctgccttcacagagatgccgcgtgctgggaaggctcttggggtcccctgagcgtcttccagggtggctggagagcacagacgcgccagggagccccctctgtgctcctcagagttcaataaatgtcgtggcccctcctca

SEQ ID NO: 167166 - DNA, 2168 bp, Homo sapiens
  Payload ID: 12899
  Gene Symbol: PCBP3
  Gene Name: poly(rC) binding protein 3
  Uniprot ID: P57721
  ENST ID: ENST00000400310
  CDS Start-End: 365-1420
gtacacgccatggtgtgggagcagcctgaccatcgggactcaggagcttacagaattttctggggtttcgatactctagaggtttcccctggttacttggcgaatattctatgaaaatgaagagaatgaagtgaagtcagagtcatttactcagaatgcaccctactgtaaatggagaggatgctacttggagtgtgtggtctgtataaatggagaggatgcatatgaagttacaaagggtcggtaggctccacgacaaaagtcaacccttctgtaaatcacctgctgtggttatgatgctctgagttcaatacgtctgaacctttgctgtctatggatctgctctaaaccttatagcctgcttatgggggaaggtgacgccttctgggccccatctgtccttcctcacagcaccctcagcaccttaagccaccaccctcagccacaatttggcagaaggatggagtccaaggtctcagaaggtggcctgaatgtgaccctcaccatccgcctgctgatgcatggaaaggaagttggaagcatcatcgggaagaaaggagaaactgtgaagaagatgcgtgaggagagtggtgcaaggatcaacatctcagagggaaactgcccagagaggattgtgaccatcacaggccccacagacgccatcttcaaggcctttgccatgatcgcatacaagtttgaggaggatatcatcaactccatgagcaacagccctgccaccagcaagcccccagtgacgctgaggctggtggtgcctgccagccagtgtgggtccctgatcggcaaaggaggctccaagatcaaggagatcagggagtccacaggtgcccaggtgcaggtggctggggacatgctgcccaactccacggagcgagcggtgaccatctcggggaccccagatgccatcatccagtgcgtcaagcagatctgtgtggtcatgctggagtccccaccgaaaggtgccaccattccctaccgcccaaagcccgcctccacccctgtcatttttgcaggtggtcaggcctacacaatccagggacagtatgccatccctcacccggatcagttgaccaagctccaccagttggccatgcagcaaaccccctttcctcccctcggacagaccaaccccgctttccccggtctggacgccagcccaccggccagcactcatgagctcaccattcccaatgatctaataggctgcataattggacgccaagggaccaaaatcaatgaaattcgacagatgtctggagctcagatcaaaatcgccaacgccacggaagggtcctcagagcgtcagatcaccatcacggggaccccggccaacatcagccttgcccagtatctcatcaacgccaggctgacgtccgaggtcaccgggatgggcacgctgtaatcctacccagcacccttcccccgcgtcacccacctgccagagcctaaggcccccggctctcgcactctgtacagcccaccttccctgcctcacagataccaatagagaggttttcttaattaacaaaaggacgtatgccatggagaaacacacccgcgcacacagctgctctctacagaggctgcaggctccgccgagtcccccctcagtgttattttatttatgacttacgctcccgtctgcccatgcaccggcatgcagtggtaattattttagaaatattgttccttggtgtcagcgtagctgtctgtcttaggagctgggtcggcgttccgacagcacttcctgtccgcccttctcctctgccatccagaaccgtccagaactgttgcctgagacccctcctctctcacacagccctgccatgctgactcggtttcccctcagagccattgttgtctgggctcgagtttctgccccaggttgtgtgctggaatcggggggtggctctcctgccacccatggggagcgccaggagaggagggtcatggaggatgttggggctctgaccccaggagtggggtggagggcggagcctgctgggggccctgccttcacagagatgccgcgtgctgggaaggctcttggggtcccctgagcgtcttccagggtggctggagagcacagacgcgccagggagccccctctgtgctcctcagagttcaataaatgtcgtggcccctcctca

SEQ ID NO: 167167 - DNA, 2202 bp, Homo sapiens
  Payload ID: 12899
  Gene Symbol: PCBP3
  Gene Name: poly(rC) binding protein 3
  Uniprot ID: P57721
  ENST ID: ENST00000400314
  CDS Start-End: 339-1454
tcgggctggagcgcctgaagccgcgaccgccgcctcagccgcctcagccgcggtcgccgccgcttcggctgacttaggctccgccgccgcctcctcacccgcctcgccccgaccccgcccgggcctcccggcctctccccgccggcccgcgggctcgccgtccggcgcagggcaggactgtctacaagagagaagctccccacgtggttccgtgtcggtaggctccacgacaaaagtcaacccttctgtaaatcacctgctgtggttatgatgctctgagttcaatacgtctgaacctttgctgtctatggatctgctctaaaccttatagcctgcttatgggggaaggtgacgccttctgggccccatctgtccttcctcacagcaccctcagcaccttaagccaccaccctcagccacaatttggcagaaggatggagtccaaggtctcagaaggtggcctgaatgtgaccctcaccatccgcctgctgatgcatggaaaggaagttggaagcatcatcgggaagaaaggagaaactgtgaagaagatgcgtgaggagagtggtgcaaggatcaacatctcagagggaaactgcccagagaggattgtgaccatcacaggccccacagacgccatcttcaaggcctttgccatgatcgcatacaagtttgaggaggatatcatcaactccatgagcaacagccctgccaccagcaagcccccagtgacgctgaggctggtggtgcctgccagccagtgtgggtccctgatcggcaaaggaggctccaagatcaaggagatcagggagtccacaggtgcccaggtgcaggtggctggggacatgctgcccaactccacggagcgagcggtgaccatctcggggaccccagatgccatcatccagtgcgtcaagcagatctgtgtggtcatgctggagtccccaccgaaaggtgccaccattccctaccgcccaaagcccgcctccacccctgtcatttttgcaggtggtcaggcctacacaatccagggacagtatgccatccctcacccggatcagttgaccaagctccaccagttggccatgcagcaaaccccctttcctcccctcggacagaccaaccccgctttccccggagaaaagctgcctttacactcctccgaagaagctcaaaatctgatgggccagtcatcaggtctggacgccagcccaccggccagcactcatgagctcaccattcccaatgatctaataggctgcataattggacgccaagggaccaaaatcaatgaaattcgacagatgtctggagctcagatcaaaatcgccaacgccacggaagggtcctcagagcgtcagatcaccatcacggggaccccggccaacatcagccttgcccagtatctcatcaacgccaggctgacgtccgaggtcaccgggatgggcacgctgtaatcctacccagcacccttcccccgcgtcacccacctgccagagcctaaggcccccggctctcgcactctgtacagcccaccttccctgcctcacagataccaatagagaggttttcttaattaacaaaaggacgtatgccatggagaaacacacccgcgcacacagctgctctctacagaggctgcaggctccgccgagtcccccctcagtgttattttatttatgacttacgctcccgtctgcccatgcaccggcatgcagtggtaattattttagaaatattgttccttggtgtcagcgtagctgtctgtcttaggagctgggtcggcgttccgacagcacttcctgtccgcccttctcctctgccatccagaaccgtccagaactgttgcctgagacccctcctctctcacacagccctgccatgctgactcggtttcccctcagagccattgttgtctgggctcgagtttctgccccaggttgtgtgctggaatcggggggtggctctcctgccacccatggggagcgccaggagaggagggtcatggaggatgttggggctctgaccccaggagtggggtggagggcggagcctgctgggggccctgccttcacagagatgccgcgtgctgggaaggctcttggggtcccctgagcgtcttccagggtggctggagagcacagacgcgccagggagccccctctgtgctcctcagagttcaataaatgtcgtggcccctcctca

SEQ ID NO: 167168 - DNA, 1278 bp, Homo sapiens
  Payload ID: 12899
  Gene Symbol: PCBP3
  Gene Name: poly(rC) binding protein 3
  ENST ID: ENST00000449640
  CDS Start-End: 193-1278
cttctgtaaatcacctgctgtggttatgatgctctgagttcaatacgtctgaacctttgctgtctatggatctgctctaaaccttatagcctgcttatgggggaaggtgacgccttctgggccccatctgtccttcctcacagcaccctcagcaccttaagccaccaccctcagccacaatttggcagaaggatggagtccaaggtctcagaaggtggcctgaatgtgaccctcaccatccgcctgctgatgcatggaaaggaagttggaagcatcatcgggaagaaaggagaaactgtgaagaagatgcgtgaggagagtggtgcaaggatcaacatctcagagggaaactgcccagagaggattgtgaccatcacaggccccacagacgccatcttcaaggcctttgccatgatcgcatacaagtttgaggaggatatcatcaactccatgagcaacagccctgccaccagcaagcccccagtgacgctgaggctggtggtgcctgccagccagtgtgggtccctgatcggcaaaggaggctccaagatcaaggagatcagggagtccacaggtgcccaggtgcaggtggctggggacatgctgcccaactccacggagcgagcggtgaccatctcggggaccccagatgccatcatccagtgcgtcaagcagatctgtgtggtcatgctggagtccccaccgaaaggtgccaccattccctaccgcccaaagcccgcctccacccctgtcatttttgcaggtggtcaggtaagagccgatccgctcgcggcctccactgccaacctcagccttttactgcagcacccgccgctgcccgcctacacaatccagggacagtatgccatccctcacccggatttgaccaagctccaccagttggccatgcagcaaaccccctttcctcccctcggacagaccaaccccgctttccccggagaaaagctgcctttacactcctccgaagaagctcaaaatctgatgggccagtcatcaggtctggacgccagcccaccggccagcactcatgagctcaccattcccaatgatctaataggctgcataattggacgccaagggaccaaaatcaatgaaattcgacagatgtctggagctcagatcaaaatcgccaacgccacggaagggtcctcagagcgtcagatcaccatcacggggaccccggccaacatcagccttgcccagtatctcatcaacgccaggctgacgtccgaggtcaccgggatgggcacgctgtaa

SEQ ID NO: 167169 - DNA, 243 bp, Homo sapiens
  Payload ID: 12899
  Gene Symbol: PCBP3
  Gene Name: poly(rC) binding protein 3
  ENST ID: ENST00000549265
  CDS Start-End: 228-243
ctctacttcagcccttcatttcctggtagccactgagctgccccatggacactgggcagatggccagtgttagctgggaaggacagcagcagccgcagaggtggcagcaaggccagggcactttgcagacggcatggacgggtgacgccttctgggccccatctgtccttcctcacagcaccctcagcaccttaagccaccaccctcagccacaatttggcagaaggatggagtccaaggtct

SEQ ID NO: 167170 - DNA, 1964 bp, Homo sapiens
  Payload ID: 12900
  Gene Symbol: PCBP4
  Gene Name: poly(rC) binding protein 4
  Uniprot ID: P57723
  ENST ID: ENST00000322099
  CDS Start-End: 148-1359
cctctggagtccctgtggcagaactcaaatggaaggaggagcagctgcacccaggggagcagggtgtcacctccgttggatagagccggccaggttgcagcgcggacacactcgcaggtcgctgtggccccagcctcgcctgacagaatgagcggctcggacgggggactggaggaggagccagagctcagcatcaccctcacgctgcggatgctgatgcacgggaaggaagtgggcagcatcatcgggaagaagggcgagactgtaaagcgaatccgggagcagagcagtgcccggatcaccatctccgagggctcctgccctgaacgcatcaccaccatcaccgggtctacagcagctgtcttccatgcagtctccatgattgctttcaaactggatgaggacctttgtgctgctcctgcaaatggtggaaatgtctccaggcctccagtgaccctgcgccttgtcatccctgccagtcagtgtggctcactgattgggaaggctggcaccaagatcaaggagatccgagagactacgggtgcccaggtacaggtggcaggggacctgctccccaactccacagagcgagctgttacggtatctggggtgcctgatgccatcatcctgtgtgtgcgccagatctgcgctgttatcctggagtccccacccaaaggagccactatcccctaccatccgagcctctccctaggtactgttcttctctctgccaaccagggcttctctgtccagggtcagtatggggctgtgaccccagctgaggtcaccaagctccagcagctctcaagccatgcggtcccctttgccacacccagcgtggtgccaggactggatcccggcacacagaccagctcacaggagttcttggttcccaacgatttgattggctgtgtgatcgggcgccagggcagcaagatcagcgagatccggcagatgtcaggggcacatatcaagatcgggaaccaagcagagggcgctggggagcggcatgtcaccatcactggctctccggtctccatcgccctggcccagtacctcatcactgcctgtctagagacggccaagtctacctctggggggacgcccagctcggcccccgcagacctgcctgcccccttctcgccacccctgacggccctgcccacagctccccctggcctgctgggcacaccctatgccatctccctctccaacttcatcggcctcaagcccatgcccttcttggctttaccacctgcttccccagggccgccgccgggcttggcggcctacactgccaagatggcagcagctaatgggagcaagaaggctgagcggcagaaattctccccctactgaggccagctgaggtacaggcaggggcaggcaggaccaccagcagggggctgcctctgcaccctacccgcccaaggagactccaccctggggtcccaaacgccgctaacgcccagacgcatggatgcaccccctaccctgcctccatctatgggagttctttctctcagagtgggggcagtttctggcccaggggtctgagctgcggcagccccagggcagggggccctacctcctcagctctgtgcttggatacagggagcagccaggagactccctagtgcccccaccatggcgggtgtcactcacgcactccccatcccttagggcttcctggcctactgcatccttgtgggagtcagggaggagggcccgttgggtagctggggccaggcttctctccccaccacctgcagatttcttgctgcttccactgatacccttttgactggaatgaactggctgggcttgtcagggggcaccccaaagagggggcactgccaggtagctgggggagtggcatggggcaggggcccagttctcagcagcagacactctgtacagttttttcaatccctgtttttgaataaatattctcagcgaccagg

SEQ ID NO: 167171 - DNA, 2015 bp, Homo sapiens
  Payload ID: 12900
  Gene Symbol: PCBP4
  Gene Name: poly(rC) binding protein 4
  Uniprot ID: P57723
  ENST ID: ENST00000355852
  CDS Start-End: 197-1408
gtcaaacccctcattgttcgcagctgatgtcactcgcagttgtgagcggccgcctctcccggggacaatgtgggactgagcggcccagccgccgtgccgccgccgccgccgccgcaggacagccccagcgagagccggccaggttgcagcgcggacacactcgcaggtcgctgtggccccagcctcgcctgacagaatgagcggctcggacgggggactggaggaggagccagagctcagcatcaccctcacgctgcggatgctgatgcacgggaaggaagtgggcagcatcatcgggaagaagggcgagactgtaaagcgaatccgggagcagagcagtgcccggatcaccatctccgagggctcctgccctgaacgcatcaccaccatcaccgggtctacagcagctgtcttccatgcagtctccatgattgctttcaaactggatgaggacctttgtgctgctcctgcaaatggtggaaatgtctccaggcctccagtgaccctgcgccttgtcatccctgccagtcagtgtggctcactgattgggaaggctggcaccaagatcaaggagatccgagagactacgggtgcccaggtacaggtggcaggggacctgctccccaactccacagagcgagctgttacggtatctggggtgcctgatgccatcatcctgtgtgtgcgccagatctgcgctgttatcctggagtccccacccaaaggagccactatcccctaccatccgagcctctccctaggtactgttcttctctctgccaaccagggcttctctgtccagggtcagtatggggctgtgaccccagctgaggtcaccaagctccagcagctctcaagccatgcggtcccctttgccacacccagcgtggtgccaggactggatcccggcacacagaccagctcacaggagttcttggttcccaacgatttgattggctgtgtgatcgggcgccagggcagcaagatcagcgagatccggcagatgtcaggggcacatatcaagatcgggaaccaagcagagggcgctggggagcggcatgtcaccatcactggctctccggtctccatcgccctggcccagtacctcatcactgcctgtctagagacggccaagtctacctctggggggacgcccagctcggcccccgcagacctgcctgcccccttctcgccacccctgacggccctgcccacagctccccctggcctgctgggcacaccctatgccatctccctctccaacttcatcggcctcaagcccatgcccttcttggctttaccacctgcttccccagggccgccgccgggcttggcggcctacactgccaagatggcagcagctaatgggagcaagaaggctgagcggcagaaattctccccctactgaggccagctgaggtacaggcaggggcaggcaggaccaccagcagggggctgcctctgcaccctacccgcccaaggagactccaccctggggtcccaaacgccgctaacgcccagacgcatggatgcaccccctaccctgcctccatctatgggagttctttctctcagagtgggggcagtttctggcccaggggtctgagctgcggcagccccagggcagggggccctacctcctcagctctgtgcttggatacagggagcagccaggagactccctagtgcccccaccatggcgggtgtcactcacgcactccccatcccttagggcttcctggcctactgcatccttgtgggagtcagggaggagggcccgttgggtagctggggccaggcttctctccccaccacctgcagatttcttgctgcttccactgatacccttttgactggaatgaactggctgggcttgtcagggggcaccccaaagagggggcactgccaggtagctgggggagtggcatggggcaggggcccagttctcagcagcagacactctgtacagttttttcaatccctgtttttgaataaatattctcagcgaccaggaa

SEQ ID NO: 167172 - DNA, 1281 bp, Homo sapiens
  Payload ID: 12900
  Gene Symbol: PCBP4
  Gene Name: poly(rC) binding protein 4
  ENST ID: ENST00000395014
  CDS Start-End: 148-1281
cctctggagtccctgtggcagaactcaaatggaaggaggagcagctgcacccaggggagcagggtgtcacctccgttggatagagccggccaggttgcagcgcggacacactcgcaggtcgctgtggccccagcctcgcctgacagaatgagcggctcggacgggggactggaggaggagccagagctcagcatcaccctcacgctgcggatgctgatgcacgggaaggaagtgggcagcatcatcgggaagaagggcgagactgtaaagcgaatccgggagcagagcagtgcccggatcaccatctccgagggctcctgccctgaacgcatcaccaccatcaccgggtctacagcagctgtcttccatgcagtctccatgattgctttcaaactggatgaggacctttgtgctgctcctgcaaatggtggaaatgtctccaggcctccagtgaccctgcgccttgtcatccctgccagtcagtgtggctcactgattgggaaggctggcaccaagatcaaggagatccgagagactacgggtgcccaggtacaggtggcaggggacctgctccccaactccacagagcgagctgttacggtatctggggtgcctgatgccatcatcctgtgtgtgcgccagatctgcgctgttatcctggagtccccacccaaaggagccactatcccctaccatccgagcctctccctaggtactgttcttctctctgccaaccagggcttctctgtccagggtcagtatggggctgtgaccccagctgaggtcaccaagctccagcagctctcaagccatgcggtcccctttgccacacccagcgtggtgccaggactggatcccggcacacagaccagctcacaggagttcttggttcccaacgatttgattggctgtgtgatcgggcgccagggcagcaagatcagcgagatccggcagatgtcaggggcacatatcaagatcgggaaccaagcagagggcgctggggagcggcatgtcaccatcactggctctccggtctccatcgccctggcccagtacctcatcactgcctgtctagagacggccaagtctacctctggggggacgcccagctcggcccccgcagacctgcctgcccccttctcgccacccctgacggccctgccacagctccccctggcctgctgggcacaccctatgccatctccctctccaacttcatcggcccaagcccatgcccttcttggctttaccacctgcttccccagggccgccgccgggctt

SEQ ID NO: 167173 - DNA, 1835 bp, Homo sapiens
  Payload ID: 12900
  Gene Symbol: PCBP4
  Gene Name: poly(rC) binding protein 4
  Uniprot ID: P57723
  ENST ID: ENST00000428823
  CDS Start-End: 148-1230
cctctggagtccctgtggcagaactcaaatggaaggaggagcagctgcacccaggggagcagggtgtcacctccgttggatagagccggccaggttgcagcgcggacacactcgcaggtcgctgtggccccagcctcgcctgacagaatgagcggctcggacgggggactggaggaggagccagagctcagcatcaccctcacgctgcggatgctgatgcacgggaaggaagtgggcagcatcatcgggaagaagggcgagactgtaaagcgaatccgggagcagagcagtgcccggatcaccatctccgagggctcctgccctgaacgcatcaccaccatcaccgggtctacagcagctgtcttccatgcagtctccatgattgctttcaaactggatgaggacctttgtgctgctcctgcaaatggtggaaatgtctccaggcctccagtgaccctgcgccttgtcatccctgccagtcagtgtggctcactgattgggaaggctggcaccaagatcaaggagatccgagagtccccacccaaaggagccactatcccctaccatccgagcctctccctaggtactgttcttctctctgccaaccagggcttctctgtccagggtcagtatggggctgtgaccccagctgaggtcaccaagctccagcagctctcaagccatgcggtcccctttgccacacccagcgtggtgccaggactggatcccggcacacagaccagctcacaggagttcttggttcccaacgatttgattggctgtgtgatcgggcgccagggcagcaagatcagcgagatccggcagatgtcaggggcacatatcaagatcgggaaccaagcagagggcgctggggagcggcatgtcaccatcactggctctccggtctccatcgccctggcccagtacctcatcactgcctgtctagagacggccaagtctacctctggggggacgcccagctcggcccccgcagacctgcctgcccccttctcgccacccctgacggccctgcccacagctccccctggcctgctgggcacaccctatgccatctccctctccaacttcatcggcctcaagcccatgcccttcttggctttaccacctgcttccccagggccgccgccgggcttggcggcctacactgccaagatggcagcagctaatgggagcaagaaggctgagcggcagaaattctccccctactgaggccagctgaggtacaggcaggggcaggcaggaccaccagcagggggctgcctctgcaccctacccgcccaaggagactccaccctggggtcccaaacgccgctaacgcccagacgcatggatgcaccccctaccctgcctccatctatgggagttctttctctcagagtgggggcagtttctggcccaggggtctgagctgcggcagccccagggcagggggccctacctcctcagctctgtgcttggatacagggagcagccaggagactccctagtgcccccaccatggcgggtgtcactcacgcactccccatcccttagggcttcctggcctactgcatccttgtgggagtcagggaggagggcccgttgggtagctggggccaggcttctctccccaccacctgcagatttcttgctgcttccactgatacccttttgactggaatgaactggctgggcttgtcagggggcaccccaaagagggggcactgccaggtagctgggggagtggcatggggcaggggcccagttctcagcagcagacactctgtacagttttttcaatccctgtttttgaataaatattctcagcgaccagg

SEQ ID NO: 167174 - DNA, 2009 bp, Homo sapiens
  Payload ID: 12900
  Gene Symbol: PCBP4
  Gene Name: poly(rC) binding protein 4
  Uniprot ID: P57723
  ENST ID: ENST00000484633
  CDS Start-End: 324-1406
ctttgtccaccaggccagatggagaggaagggagattggattcccctccccacccacacatacccagctgatgtcactcgcagttgtgagcggccgcctctcccggggacaatgtgggactgagcggcccagccgccgtgccgccgccgccgccgccgcaggacagccccagcgagcctctggagtccctgtggcagaactcaaatggaaggaggagcagctgcacccaggggagcagggtgtcacctccgttggatagagccggccaggttgcagcgcggacacactcgcaggtcgctgtggccccagcctcgcctgacagaatgagcggctcggacgggggactggaggaggagccagagctcagcatcaccctcacgctgcggatgctgatgcacgggaaggaagtgggcagcatcatcgggaagaagggcgagactgtaaagcgaatccgggagcagagcagtgcccggatcaccatctccgagggctcctgccctgaacgcatcaccaccatcaccgggtctacagcagctgtcttccatgcagtctccatgattgctttcaaactggatgaggacctttgtgctgctcctgcaaatggtggaaatgtctccaggcctccagtgaccctgcgccttgtcatccctgccagtcagtgtggctcactgattgggaaggctggcaccaagatcaaggagatccgagagtccccacccaaaggagccactatcccctaccatccgagcctctccctaggtactgttcttctctctgccaaccagggcttctctgtccagggtcagtatggggctgtgaccccagctgaggtcaccaagctccagcagctctcaagccatgcggtcccctttgccacacccagcgtggtgccaggactggatcccggcacacagaccagctcacaggagttcttggttcccaacgatttgattggctgtgtgatcgggcgccagggcagcaagatcagcgagatccggcagatgtcaggggcacatatcaagatcgggaaccaagcagagggcgctggggagcggcatgtcaccatcactggctctccggtctccatcgccctggcccagtacctcatcactgcctgtctagagacggccaagtctacctctggggggacgcccagctcggcccccgcagacctgcctgcccccttctcgccacccctgacggccctgcccacagctccccctggcctgctgggcacaccctatgccatctccctctccaacttcatcggcctcaagcccatgcccttcttggctttaccacctgcttccccagggccgccgccgggcttggcggcctacactgccaagatggcagcagctaatgggagcaagaaggctgagcggcagaaattctccccctactgaggccagctgaggtacaggcaggggcaggcaggaccaccagcagggggctgcctctgcaccctacccgcccaaggagactccaccctggggtcccaaacgccgctaacgcccagacgcatggatgcaccccctaccctgcctccatctatgggagttctttctctcagagtgggggcagtttctggcccaggggtctgagctgcggcagccccagggcagggggccctacctcctcagctctgtgcttggatacagggagcagccaggagactccctagtgcccccaccatggcgggtgtcactcacgcactccccatcccttagggcttcctggcctactgcatccttgtgggagtcagggaggagggcccgttgggtagctggggccaggcttctctccccaccacctgcagatttcttgctgcttccactgatacccttttgactggaatgaactggctgggcttgtcagggggcaccccaaagagggggcactgccaggtagctgggggagtggcatggggcaggggcccagttctcagcagcagacactctgtacagttttttcaatccctgtttttgaataaatattctcagcgacca

SEQ ID NO: 167175 - DNA, 2147 bp, Homo sapiens
  Payload ID: 12900
  Gene Symbol: PCBP4
  Gene Name: poly(rC) binding protein 4
  Uniprot ID: P57723
  ENST ID: ENST00000461554
  CDS Start-End: 333-1544
attgttcgcagctgatgtcactcgcagttgtgagcggccgcctctcccggggacaatgtgggactgagcggcccagccgccgtgccgccgccgccgccgccgcaggacagccccagcgaggccatttccagcacatagaagagagattggaaaccaacgtgcagaactgccagtcccctgacacgctgtgccccacccactgcagcccagtgctgaatgaaccctgcccagaggtgtctgtagtgagcttctgccctagtgacttttgagccggccaggttgcagcgcggacacactcgcaggtcgctgtggccccagcctcgcctgacagaatgagcggctcggacgggggactggaggaggagccagagctcagcatcaccctcacgctgcggatgctgatgcacgggaaggaagtgggcagcatcatcgggaagaagggcgagactgtaaagcgaatccgggagcagagcagtgcccggatcaccatctccgagggctcctgccctgaacgcatcaccaccatcaccgggtctacagcagctgtcttccatgcagtctccatgattgctttcaaactggatgaggacctttgtgctgctcctgcaaatggtggaaatgtctccaggcctccagtgaccctgcgccttgtcatccctgccagtcagtgtggctcactgattgggaaggctggcaccaagatcaaggagatccgagagactacgggtgcccaggtacaggtggcaggggacctgctccccaactccacagagcgagctgttacggtatctggggtgcctgatgccatcatcctgtgtgtgcgccagatctgcgctgttatcctggagtccccacccaaaggagccactatcccctaccatccgagcctctccctaggtactgttcttctctctgccaaccagggcttctctgtccagggtcagtatggggctgtgaccccagctgaggtcaccaagctccagcagctctcaagccatgcggtcccctttgccacacccagcgtggtgccaggactggatcccggcacacagaccagctcacaggagttcttggttcccaacgatttgattggctgtgtgatcgggcgccagggcagcaagatcagcgagatccggcagatgtcaggggcacatatcaagatcgggaaccaagcagagggcgctggggagcggcatgtcaccatcactggctctccggtctccatcgccctggcccagtacctcatcactgcctgtctagagacggccaagtctacctctggggggacgcccagctcggcccccgcagacctgcctgcccccttctcgccacccctgacggccctgcccacagctccccctggcctgctgggcacaccctatgccatctccctctccaacttcatcggcctcaagcccatgcccttcttggctttaccacctgcttccccagggccgccgccgggcttggcggcctacactgccaagatggcagcagctaatgggagcaagaaggctgagcggcagaaattctccccctactgaggccagctgaggtacaggcaggggcaggcaggaccaccagcagggggctgcctctgcaccctacccgcccaaggagactccaccctggggtcccaaacgccgctaacgcccagacgcatggatgcaccccctaccctgcctccatctatgggagttctttctctcagagtgggggcagtttctggcccaggggtctgagctgcggcagccccagggcagggggccctacctcctcagctctgtgcttggatacagggagcagccaggagactccctagtgcccccaccatggcgggtgtcactcacgcactccccatcccttagggcttcctggcctactgcatccttgtgggagtcagggaggagggcccgttgggtagctggggccaggcttctctccccaccacctgcagatttcttgctgcttccactgatacccttttgactggaatgaactggctgggcttgtcagggggcaccccaaagagggggcactgccaggtagctgggggagtggcatggggcaggggcccagttctcagcagcagacactctgtacagttttttcaatccctgtttttgaataaatattctcagcgacca

SEQ ID NO: 167176 - DNA, 559 bp, Homo sapiens
  Payload ID: 12900
  Gene Symbol: PCBP4
  Gene Name: poly(rC) binding protein 4
  ENST ID: ENST00000497653
  CDS Start-End: 240-559
tttgtccaccaggccagatggagaggaagggagattggattcccctccccacccacacatacccagctgatgtcactcgcagttgtgagcggccgcctctcccggggacaatgtgggactgagcggcccagccgccgtgccgccgccgccgccgccgcaggacagccccagcgagagccggccaggttgcagcgcggacacactcgcaggtcgctgtggccccagcctcgcctgacagaatgagcggctcggacgggggactggaggaggagccagagctcagcatcaccctcacgctgcggatgctgatgcacgggaaggaagtgggcagcatcatcgggaagaagggcgagactgtaaagcgaatccgggagcagagcagtgcccggatcaccatctccgagggctcctgccctgaacgcatcaccaccatcaccgggtctacagcagctgtcttccatgcagtctccatgattgctttcaaactggatgaggacctttgtgctgctcctgcaaatggtggaaatgtctccaggcctccagtgaccctgcgccttgt

SEQ ID NO: 167177 - DNA, 510 bp, Homo sapiens
  Payload ID: 12900
  Gene Symbol: PCBP4
  Gene Name: poly(rC) binding protein 4
  ENST ID: ENST00000490063
  CDS Start-End: 252-510
gaggaagggagattggattcccctccccacccacacatacccaggtgccaagagactcagctgtggggggaggtggagctgatgtcactcgcagttgtgagcggccgcctctcccggggacaatgtgggactgagcggcccagccgccgtgccgccgccgccgccgccgcaggacagccccagcgagagccggccaggttgcagcgcggacacactcgcaggtcgctgtggccccagcctcgcctgacagaatgagcggctcggacgggggactggaggaggagccagagctcagcatcaccctcacgctgcggatgctgatgcacgggaaggaagtgggcagcatcatcgggaagaagggcgagactgtaaagcgaatccgggagcagagcagtgcccggatcaccatctccgagggctcctgccctgaacgcatcaccaccatcaccgggtctacagcagctgtcttccatgcagtctccatgattgctttcaaactggatgaggtcc

SEQ ID NO: 167178 - DNA, 2087 bp, Homo sapiens
  Payload ID: 12900
  Gene Symbol: PCBP4
  Gene Name: poly(rC) binding protein 4
  ENST ID: ENST00000471308
  CDS Start-End: 528-701
ctcattgttcgcagctgatgtcactcgcagttgtgagcggccgcctctcccggggacaatgtgggactgagcggcccagccgccgtgccgccgccgccgccgccgcaggacagccccagcgaggccatttccagcacatagaagagagattggaaaccaacgtgcagaactgccagtcccctgacacgctgtgccccacccactgcagcccagtgctgaatgaaccctgcccagaggtgtctgtagtgagcttctgccctagtgacttttggtaggtgggagtgtgcctcaattcccccctcaacccctgcctcaagcctttaccaggcagtggcaagacctgaccacacccgaggcctccctgccttcaaggcttcccatggctgctccagcttcctccccagctgctcttctgtgctccatccaccatctggctgctggacgaaagtgcctctcatatggaagccggccaggttgcagcgcggacacactcgcaggtcgctgtggccccagcctcgcctgacagaatgagcggctcggacgggggactggaggaggagccagagctcagcatcaccctcacgctgcggatgctgatgcacgggaaggaagtgggcagcatcatcgggaagaagggcgagactgtaaagcgaatccgggagcagtgcccggatcaccatctccgagggctcctgccctgaacgcatcaccaccatcaccgggtctacagcagctgtcttccatgcagtctccatgattgctttcaaactggatgaggacctttgtgctgctcctgcaaatggtggaaatgtctccaggcctccagtgaccctgcgccttgtcatccctgccagtcagtgtggctcactgattgggaaggctggcaccaagatcaaggagatccgagaggtcaccaagctccagcagctctcaagccatgcggtcccctttgccacacccagcgtggtgccaggactggatcccggcacacagaccagctcacaggagttcttggttcccaacgatttgattggctgtgtgatcgggcgccagggcagcaagatcagcgagatccggcagatgtcaggggcacatatcaagatcgggaaccaagcagagggcgctggggagcggcatgtcaccatcactggctctccggtctccatcgccctggcccagtacctcatcactgcctgtctagagacggccaagtctacctctggggggacgcccagctcggcccccgcagacctgcctgcccccttctcgccacccctgacggccctgcccacagctccccctggcctgctgggcacaccctatgccatctccctctccaacttcatcggcctcaagcccatgcccttcttggctttaccacctgcttccccagggccgccgccgggcttggcggcctacactgccaagatggcagcagctaatgggagcaagaaggctgagcggcagaaattctccccctactgaggccagctgaggtacaggcaggggcaggcaggaccaccagcagggggctgcctctgcaccctacccgcccaaggagactccaccctggggtcccaaacgccgctaacgcccagacgcatggatgcaccccctaccctgcctccatctatgggagttctttctctcagagtgggggcagtttctggcccaggggtctgagctgcggcagccccagggcagggggccctacctcctcagctctgtgcttggatacagggagcagccaggagactccctagtgcccccaccatggcgggtgtcactcacgcactccccatcccttagggcttcctggcctactgcatccttgtgggagtcagggaggagggcccgttgggtagctggggccaggcttctctccccaccacctgcagatttcttgctgcttccactgatacccttttgactggaatgaactggctgggcttgtcagggggcaccccaaagagggggcactgccaggtagctgggggagtggcatggggcaggggcccagttctcagcagcagacactctgtacagttttttcaatccctgtttttgaataaatattctcagcgacc

SEQ ID NO: 167179 - DNA, 1784 bp, Homo sapiens
  Payload ID: 12900
  Gene Symbol: PCBP4
  Gene Name: poly(rC) binding protein 4
  ENST ID: ENST00000471622
  CDS Start-End: 204-1175
agcacatagaagagagattggaaaccaacgtgcagaactgccagtcccctgacacgctgtgccccacccactgcagcccagtgctgaatgaaccctgcccagaggtgtctgtagtgagcttctgccctagtgacttttgagccggccaggttgcagcgcggacacactcgcaggtcgctgtggccccagcctcgcctgacagaatgagcggctcggacgggggactggaggaggagccagagctcagcatcaccctcacgctgcggatgctgatgcacgggaaggaagtgggcagcatcatcgggaagaagggcgagactgtaaagcgaatccgggagcagagcagtgcccggatcaccatctccgagggctcctgccctgaacgcatcaccaccatcaccgggtctacagcagctgtcttccatgcagtctccatgattgctttcaaactggatgaggacctttgtgctgctcctgcaaatggtggaaatgtctccaggcctccagtgaccctgcgccttgtcatccctgccagtcagtgtggctcactgattgggaaggctggcaccaagatcaaggagatccgagagactacgggtgcccaggtacaggtggcaggggacctgctccccaactccacagagcgagctgttacggtatctggggtgcctgatgccatcatcctgtgtgtgcgccagatctgcgctgttatcctggagtccccacccaaaggagccactatcccctaccatccgagcctctccctaggtactgttcttctctctgccaaccagggcttctctgtccagggtcagtatggggctgtgaccccagctgaggtcaccaagctccagcagctctcaagccatgcggtcccctttgccacacccagcgtggtgccaggactggatcccggcacacagaccagctcacaggagttcttggttcccaacgatttgattggctgtgtgatcgggcgccagggcagcaagatcagcgagatccggcagatgtcaggggcacatatcaagatcgggaaccaagcagagggcgctggggagcggcatgtcaccatcactggctctccggtctccatcgccctggcccagtacctcatcactgcctgggccgccgccgggcttggcggcctacactgccaagatggcagcagctaatgggagcaagaaggctgagcggcagaaattctccccctactgaggccagctgaggtacaggcaggggcaggcaggaccaccagcagggggctgcctctgcaccctacccgcccaaggagactccaccctggggtcccaaacgccgctaacgcccagacgcatggatgcaccccctaccctgcctccatctatgggagttctttctctcagagtgggggcagtttctggcccaggggtctgagctgcggcagccccagggcagggggccctacctcctcagctctgtgcttggatacagggagcagccaggagactccctagtgcccccaccatggcgggtgtcactcacgcactccccatcccttagggcttcctggcctactgcatccttgtgggagtcagggaggagggcccgttgggtagctggggccaggcttctctccccaccacctgcagatttcttgctgcttccactgatacccttttgactggaatgaactggctgggcttgtcagggggcaccccaaagagggggcactgccaggtagctgggggagtggcatggggcaggggcccagttctcagcagcagacactctgtacagttttt

SEQ ID NO: 167180 - DNA, 563 bp, Homo sapiens
  Payload ID: 12900
  Gene Symbol: PCBP4
  Gene Name: poly(rC) binding protein 4
  ENST ID: ENST00000483411
  CDS Start-End: 340-563
aaacccctcattgttcgcagctgatgtcactcgcagttgtgagcggccgcctctcccggggacaatgtgggactgagcggcccagccgccgtgccgccgccgccgccgccgcaggacagccccagcgagcctttaccaggcagtggcaagacctgaccacacccgaggcctccctgccttcaaggcttcccatggctgctccagcttcctccccagctgctcttctgtgctccatccaccatctggctgctggacgaaagtgcctctcatatggaagccggccaggttgcagcgcggacacactcgcaggtcgctgtggccccagcctcgcctgacagaatgagcggctcggacgggggactggaggaggagccagagctcagcatcaccctcacgctgcggatgctgatgcacgggaaggaagtgggcagcatcatcgggaagaagggcgagactgtaaagcgaatccgggagcagagcagtgcccggatcaccatctccgagggctcctgccctgaacgcatcaccaccatcaccgggtctacagcagctgtcttccatgc

SEQ ID NO: 167181 - DNA, 837 bp, Homo sapiens
  Payload ID: 12900
  Gene Symbol: PCBP4
  Gene Name: poly(rC) binding protein 4
  ENST ID: ENST00000466412
  CDS Start-End: 464-837
agtaaaagactcaacggagcccgttccttgcgaccctatccccaaaaggaattccggggctgatgtcactcgcagttgtgagcggccgcctctcccggggacaatgtgggactgagcggcccagccgccgtgccgccgccgccgccgccgcaggacagccccagcgagcctctggagtccctgtggcagaactcaaatggaaggaggagcagctgcacccaggggagcagggtgtcacctccgttggataggccatttccagcacatagaagagagattggaaaccaacgtgcagaactgccagtcccctgacacgctgtgccccacccactgcagcccagtgctgaatgaaccctgcccagaggtgtctgtagtgagcttctgccctagtgacttttgagccggccaggttgcagcgcggacacactcgcaggtcgctgtggccccagcctcgcctgacagaatgagcggctcggacgggggactggaggaggagccagagctcagcatcaccctcacgctgcggatgctgatgcacgggaaggaagtgggcagcatcatcgggaagaagggcgagactgtaaagcgaatccgggagcagagcagtgcccggatcaccatctccgagggctcctgccctgaacgcatcaccaccatcaccgggtctacagcagctgtcttccatgcagtctccatgattgctttcaaactggatgaggacctttgtgctgctcctgcaaatggtggaaatgtctccaggcctccagtgaccctgcgccttgtcatccctgccagtcagtgtggctcactgattgggaaggctggcaccaagatcaa

SEQ ID NO: 167182 - DNA, 562 bp, Homo sapiens
  Payload ID: 12900
  Gene Symbol: PCBP4
  Gene Name: poly(rC) binding protein 4
  ENST ID: ENST00000461544
  CDS Start-End: 425-562
aaacccctcattgttcgcagctgatgtcactcgcagttgtgagcggccgcctctcccggggacaatgtgggactgagcggcccagccgccgtgccgccgccgccgccgccgcaggacagccccagcgagcctctggagtccctgtggcagaactcaaatggaaggaggagcagctgcacccaggggagcagggtgtcacctccgttggataggccatttccagcacatagaagagagattggaaaccaacgtgcagaactgccagtcccctgacacgctgtgccccacccactgcagcccagtgctgaatgaaccctgcccagaggtgtctgtagtgagcttctgccctagtgacttttgagccggccaggttgcagcgcggacacactcgcaggtcgctgtggccccagcctcgcctgacagaatgagcggctcggacgggggactggaggaggagccagagctcagcatcaccctcacgctgcggatgctgatgcacgggaaggaagtgggcagcatcatcgggaagaagggcgagactgtaaagcgaatccgggagcag

SEQ ID NO: 167183 - DNA, 704 bp, Homo sapiens
  Payload ID: 12900
  Gene Symbol: PCBP4
  Gene Name: poly(rC) binding protein 4
  ENST ID: ENST00000468324
  CDS Start-End: 200-704
caccaggccagatggagaggaagggagattggattcccctccccacccacacatacccagctgatgtcactcgcagttgtgagcggccgcctctcccggggacaatgtgggactgagcggcccagccgccgtgccgccgccgccgccgccgcaggacagccccagcgaggtcgctgtggccccagcctcgcctgacagaatgagcggctcggacgggggactggaggaggagccagagctcagcatcaccctcacgctgcggatgctgatgcacgggaaggaagtgggcagcatcatcgggaagaagggcgagactgtaaagcgaatccgggagcagagcagtgcccggatcaccatctccgagggctcctgccctgaacgcatcaccaccatcaccgggtctacagcagctgtcttccatgcagtctccatgattgctttcaaactggatgaggacctttgtgctgctcctgcaaatggtggaaatgtctccaggcctccagtgaccctgcgccttgtcatccctgccagtcagtgtggctcactgattgggaaggctggcaccaagatcaaggagatccgagagactacgggtgcccaggtacaggtggcaggggacctgctccccaactccacagagcgagctgttacggtatctggggtgcctgatgccatcatcctgtgtgtgcgccagatctgcgctg

SEQ ID NO: 167184 - DNA, 539 bp, Homo sapiens
  Payload ID: 12900
  Gene Symbol: PCBP4
  Gene Name: poly(rC) binding protein 4
  ENST ID: ENST00000489595
  CDS Start-End: 265-539
accgccagcacgcgcctgcttcccgtctgcgcgagtccacgcagctccccaggccatttccagcacatagaagagagattggaaaccaacgtgcagaactgccagtcccctgacacgctgtgccccacccactgcagcccagtgctgaatgaaccctgcccagaggtgtctgtagtgagcttctgccctagtgacttttgagccggccaggttgcagcgcggacacactcgcaggtcgctgtggccccagcctcgcctgacagaatgagcggctcggacgggggactggaggaggagccagagctcagcatcaccctcacgctgcggatgctgatgcacgggaaggaagtgggcagcatcatcgggaagaagggcgagactgtaaagcgaatccgggagcagagcagtgcccggatcaccatctccgagggctcctgccctgaacgcatcaccaccatcaccgggtctacagcagctgtcttccatgcagtctccatgattgctttcaaactggatgaggacctttgtgctgctcctgc

SEQ ID NO: 167185 - DNA, 3527 bp, Homo sapiens
  Payload ID: 12901
  Gene Symbol: PMFBP1
  Gene Name: polyamine modulated factor 1 binding protein 1
  Uniprot ID: Q8TBY8
  ENST ID: ENST00000237353
  CDS Start-End: 263-3286
atttccatgatgcacctctgtgcatgaagacttcagagggtactcaatgcaggaaatcagaattcagctccataaaacattccagattccacatatcaccaacattctttcttcctcttggcttatattagggataggggatgtggtttgttacaaaggatgagtattttgatagcttctcattccttgaactattctgcaggtttataacaaagctcagaaaatactaaaggttaaaggagaattgagagctgccaaggaaatgaaagatgaggcgggggagagagacagagaagtgagcagcctgaacagcaagctgttaagcctgcaacttgacatcaagaatctgcacgatgtctgcaagagacagaggaagaccttgcaggacaatcagctctgcatggaggaggcaatgaacagcagccacgacaagaagcaagcacaggcattagcattcgaggagtcagaggtggaatttgggtccagtaaacagtgtcatctgagacaactccagcaactgaagaaaaaattgctggtccttcaacaagaactggagtttcacacagaggagttgcagacttcttactattctctccgccagtatcagtccatcctagagaagcagacttccgacctggttcttctgcaccatcactgcaaactgaaagaagatgaggtgattctctatgaggaggaaatgggaaatcacaacgagaacacaggggagaagctccatttggcgcaggagcaactcgccttggccggggacaagatcgcctctctagagaggagcttaaacctctacagggataaataccagtcttccctgagcaacatcgagttactagaatgccaagtgaagatgttgcagggggaactcggcgggatcatgggtcaggagcctgagaacaagggtgatcattcaaaggtacggatatacacttctccttgcatgattcaagagcatcaggagactcagaaacgactgtctgaagtctggcaaaaggtctctcaacaggatgatctcattcaagaacttcgaaataagctggcctgcagtaacgctttggttctggagcgtgaaaaggctttgataaaactacaagccgattttgcttcctgtacagccacccacagataccctcctagctcctcagaagagtgtgaagacatcaaaaagatactgaagcacttgcaggagcagaaagacagccagtgcctgcatgtggaggagtaccagaacctggtgaaggatctgcgcgtggaactagaggccgtgtcggaacagaagagaaacatcatgaaggacatgatgaagctggagctggacctgcacggactgcgggaggagacatctgcccacattgagaggaaggataaggacatcaccatcctgcagtgccggctgcaggagctgcagctggagttcaccgagacccaaaagctcactttgaagaaagacaagttcctccaagagaaagatgagatgctgcaagagctggagaagaaactgacacaggttcagaacagcctcctgaaaaaggagaaggagctggagaagcagcagtgcatggccacagaacttgaaatgacagtcaaggaggctaagcaggacaagtccaaggaggcggagtgcaaggccctgcaggctgaggtccagaagctgaagaacagtctcgaagaggccaagcagcaggagaggctggctgctcagcaagcagcccagtgcaaagaagaggctgcactggcaggctgtcacctggaggacacccagaggaaactgcagaagggtctcctcctggacaagcagaaggcagacaccatccaggaactacagagagaacttcagatgctgcagaaggagtcctcgatggctgagaaggaacaaacctccaacagaaaacgggtggaggagctgtcattagaactctctgaagccctgaggaagcttgaaaattcagacaaggaaaagaggcagcttcagaagacagtggctgagcaggatatgaaaatgaatgacatgcttgatcgtatcaagcaccagcacagggagcaaggctccatcaaatgcaagttagaagaagatcttcaggaggccacaaagcttctggaggacaaacgggagcagttgaagaagagcaaagagcatgagaagctgatggagggagaacttgaagctttgcggcaggaatttaaaaagaaagacaagacgttgaaagagaattccagaaagttggaggaagaaaatgagaatctccgagcagagctacagtgttgttctacacaactggaatcctctctcaacaaatacaacaccagccagcaagtcatccaagacttgaataaagagatagcccttcagaaggagtccttaatgagcctgcaggcccagctggacaaagctctgcagaaggagaagcactatctccagactaccatcaccaaagaagcctatgatgcattatcccggaagtcagccgcctgccaggatgacctgacacaagccctcgagaagctcaatcacgtgacctcagagacaaagagcctgcagcaaagcttgacacagacccaagagaagaaagctcagctggaagaggaaatcattgcttatgaggaaaggatgaaaaagctcaatacggaattaagaaaactgcggggcttccaccaggagagtgagctggaggtgcacgcctttgacaagaagctagaggagatgagctgccaggtgctgcagtggcagaagcaacaccagaatgacctcaagatgctggcagccaaagaggagcagctcagggagttccaggaggagatggccgccttaaaagagaacctccttgaggacgataaggagccctgctgcctgccccagtggtctgtgcccaaagacacctgtaggctctaccgagggaatgatcagattatgaccaacttggagcaatgggcaaaacagcagaaggtcgccaatgagaaactaggaaaccagctccgagagcaggtgaaatacattgccaagctgagtggcgaaaaggaccacctccacagtgtaatggtccacttgcagcaggaaaacaagaagctgaagaaggagatagaagagaagaagatgaaagccgagaacacaaggctatgcaccaaagccctaggcccgagcagaacggagtccacacagagggagaaagtgtgcggcaccttgggctggaaggggttgccccaggatatgggtcaaagaatggacctcaccaagtacatcgggatgccccactgcccgggttcctcatactgctagaatccacatctagccctgagcagcatttccacgggtgtttcttcagaggacagtgagttcccagccctccctctctcttgacctggatcagctcttacaggagtatatcacggtcccagcctattttgcaagacactaacttttgttgagttttgtccacttcctgccatggagtgagctttagaaccatactaccatctccaggcccaaactctgaaataaagacatgagcatgagcaca

SEQ ID NO: 167186 - DNA, 3501 bp, Homo sapiens
  Payload ID: 12901
  Gene Symbol: PMFBP1
  Gene Name: polyamine modulated factor 1 binding protein 1
  Uniprot ID: Q8TBY8
  ENST ID: ENST00000355636
  CDS Start-End: 615-3263
caggtttataacaaagctcagaaaatactaaaggttaaaggagaattgagagctgccaaggaaatgaaagatgaggcgggggagagagacagagaagtgagcagcctgaacagcaagctgttaagcctgcaacttgacatcaagaatctgcacgatgtctgcaagagacagaggaagaccttgcaggacaatcagctctgcatggaggaggcaatgaacagcagccacctcattgccctgaaaatatcagatcatagtgatacaaggggagcagcgtctgctatggatctcagacaaacttctaagtcaaccatgaaaataaaaaccatcacacctgctctaaggacaagaagcaagcacaggcattagcattcgaggagtcagaggtggaatttgggtccagtaaacagtgtcatctgagacaactccagcaactgaagaaaaaattgctggtccttcaacaagaactggagtttcacacagaggagttgcagacttcttactattctctccgccagtatcagtccatcctagagaagcagacttccgacctggttcttctgcaccatcactgcaaactgaaagaagatgaggtgattctctatgaggaggaaatgggaaatcacaacgagaacacaggggagaagctccatttggcgcaggagcaactcgccttggccggggacaagatcgcctctctagagaggagcttaaacctctacagggataaataccagtcttccctgagcaacatcgagttactagaatgccaagtgaagatgttgcagggggaactcggcgggatcatgggtcaggagcctgagaacaagggtgatcattcaaaggtacggatatacacttctccttgcatgattcaagagcatcaggagactcagaaacgactgtctgaagtctggcaaaaggtctctcaacaggatgatctcattcaagaacttcgaaataagctggcctgcagtaacgctttggttctggagcgtgaaaaggctttgataaaactacaagccgattttgcttcctgtacagccacccacagataccctcctagctcctcagaagagtgtgaagacatcaaaaagatactgaagcacttgcaggagcagaaagacagccagtgcctgcatgtggaggagtaccagaacctggtgaaggatctgcgcgtggaactagaggccgtgtcggaacagaagagaaacatcatgaaggacatgatgaagctggagctggacctgcacggactgcgggaggagacatctgcccacattgagaggaaggataaggacatcaccatcctgcagtgccggctgcaggagctgcagctggagttcaccgagacccaaaagctcactttgaagaaagacaagttcctccaagagaaagatgagatgctgcaagagctggagaagaaactgacacaggttcagaacagcctcctgaaaaaggagaaggagctggagaagcagcagtgcatggccacagaacttgaaatgacagtcaaggaggctaagcaggacaagtccaaggaggcggagtgcaaggccctgcaggctgaggtccagaagctgaagaacagtctcgaagaggccaagcagcaggagaggctggctgctcagcaagcagcccagtgcaaagaagaggctgcactggcaggctgtcacctggaggacacccagaggaaactgcagaagggtctcctcctggacaagcagaaggcagacaccatccaggaactacagagagaacttcagatgctgcagaaggagtcctcgatggctgagaaggaacaaacctccaacagaaaacgggtggaggagctgtcattagaactctctgaagccctgaggaagcttgaaaattcagacaaggaaaagaggcagcttcagaagacagtggctgagcaggatatgaaaatgaatgacatgcttgatcgtatcaagcaccagcacagggagcaaggctccatcaaatgcaagttagaagaagatcttcaggaggccacaaagcttctggaggacaaacgggagcagttgaagaagagcaaagagcatgagaagctgatggagggagaacttgaagctttgcggcaggaatttaaaaagaaagacaagacgttgaaagagaattccagaaagttggaggaagaaaatgagaatctccgagcagagctacagtgttgttctacacaactggaatcctctctcaacaaatacaacaccagccagcaagtcatccaagacttgaataaagagatagcccttcagaaggagtccttaatgagcctgcaggcccagctggacaaagctctgcagaaggagaagcactatctccagactaccatcaccaaagaagcctatgatgcattatcccggaagtcagccgcctgccaggatgacctgacacaagccctcgagaagctcaatcacgtgacctcagagacaaagagcctgcagcaaagcttgacacagacccaagagaagaaagctcagctggaagaggaaatcattgcttatgaggaaaggatgaaaaagctcaatacggaattaagaaaactgcggggcttccaccaggagagtgagctggaggtgcacgcctttgacaagaagctagaggagatgagctgccaggtgctgcagtggcagaagcaacaccagaatgacctcaagatgctggcagccaaagaggagcagctcagggagttccaggaggagatggccgccttaaaagagaacctccttgaggacgataaggagccctgctgcctgccccagtggtctgtgcccaaagacacctgtaggctctaccgagggaatgatcagattatgaccaacttggagcaatgggcaaaacagcagaaggtcgccaatgagaaactaggaaaccagctccgagagcaggtgaaatacattgccaagctgagtggcgaaaaggacagggaaccaaccagagccagcagccccaacacaacccgtccttcctctccttcccacagccacctccacagtgtaatggtccacttgcagcaggaaaacaagaagctgaagaaggagatagaagagaagaagatgaaagccgagaacacaaggctatgcaccaaagccctaggcccgagcagaacggagtccacacagagggagaaagtgtgcggcaccttgggctggaaggggttgccccaggatatgggtcaaagaatggacctcaccaagtacatcgggatgccccactgcccgggttcctcatactgctagaatccacatctagccctgagcagcatttccacgggtgtttcttcagaggacagtgagttcccagccctccctctctcttgacctggatcagctcttacaggagtatatcacggtcccagcctattttgcaagacactaacttttgttgagttttgtccacttcctgccatggagtgagctttagaaccatactaccatctccaggcccaaactctgaaataaagacatgagcatgagc

SEQ ID NO: 167187 - DNA, 3671 bp, Homo sapiens
  Payload ID: 12901
  Gene Symbol: PMFBP1
  Gene Name: polyamine modulated factor 1 binding protein 1
  ENST ID: ENST00000379073
  CDS Start-End: 235-540
aatagaagttcaccagctgaggactacgaggatattgaggacaatgtggagcagagccccagctgactcataaaggacatgtagcatgagtaaaaaataaaccttcacggtcgtaagccactgagacttgggggttgtttgttactacaccatcacctagcctgtccccaccaggtttataacaaagctcagaaaatactaaaggttaaaggagaattgagagctgccaaggaaatgaaagatgaggcgggggagagagacagagaagtgagcagcctgaacagcaagctgttaagcctgcaacttgacatcaagaatctgcacgatgtctgcaagagacagaggaagaccttgcaggacaatcagctctgcatggaggaggcaatgaacagcagccacctcattgccctgaaaatatcagatcatagtgatacaaggggagcagcgtctgctatggatctcagacaaacttctaagtcaaccatgaaaataaaaaccatcacacctgctctaaggacaagaagcaagcacaggcattagcattcgaggagtcagaggtggaatttgggtccagtaaacagtgtcatctgagacaactccagcaactgaagaaaaaattgctggtccttcaacaagaactggagtttcacacagaggagttgcagacttcttactattctctccgccagtatcagtccatcctagagaagcagacttccgacctggttcttctgcaccatcactgcaaactgaaagaagatgaggtgattctctatgaggaggaaatgggaaatcacaacgagaacacaggggagaagctccatttggcgcaggagcaactcgccttggccggggacaagatcgcctctctagagaggagcttaaacctctacagggataaataccagtcttccctgagcaacatcgagttactagaatgccaagtgaagatgttgcagggggaactcggcgggatcatgggtcaggagcctgagaacaagggtgatcattcaaaggtacggatatacacttctccttgcatgattcaagagcatcaggagactcagaaacgactgtctgaagtctggcaaaaggtctctcaacaggatgatctcattcaagaacttcgaaataagctggcctgcagtaacgctttggttctggagcgtgaaaaggctttgataaaactacaagccgattttgcttcctgtacagccacccacagataccctcctagctcctcagaagagtgtgaagacatcaaaaagatactgaagcacttgcaggagcagaaagacagccagtgcctgcatgtggaggagtaccagaacctggtgaaggatctgcgcgtggaactagaggccgtgtcggaacagaagagaaacatcatgaaggacatgatgaagctggagctggacctgcacggactgcgggaggagacatctgcccacattgagaggaaggataaggacatcaccatcctgcagtgccggctgcaggagctgcagctggagttcaccgagacccaaaagctcactttgaagaaagacaagttcctccaagagaaagatgagatgctgcaagagctggagaagaaactgacacaggttcagaacagcctcctgaaaaaggagaaggagctggagaagcagcagtgcatggccacagaacttgaaatgacagtcaaggaggctaagcaggacaagtccaaggaggcggagtgcaaggccctgcaggctgaggtccagaagctgaagaacagtctcgaagaggccaagcagcaggagaggctggctgctcagcaagcagcccagtgcaaagaagaggctgcactggcaggctgtcacctggaggacacccagaggaaactgcagaagggtctcctcctggacaagcagaaggcagacaccatccaggaactacagagagaacttcagatgctgcagaaggagtcctcgatggctgagaaggaacaaacctccaacagaaaacgggtggaggagctgtcattagaactctctgaagccctgaggaagcttgaaaattcagacaaggaaaagaggcagcttcagaagacagtggctgagcaggatatgaaaatgaatgacatgcttgatcgtatcaagcaccagcacagggagcaaggctccatcaaatgcaagttagaagaagatcttcaggaggccacaaagcttctggaggacaaacgggagcagttgaagaagagcaaagagcatgagaagctgatggagggagaacttgaagctttgcggcaggaatttaaaaagaaagacaagacgttgaaagagaattccagaaagttggaggaagaaaatgagaatctccgagcagagctacagtgttgttctacacaactggaatcctctctcaacaaatacaacaccagccagcaagtcatccaagacttgaataaagagatagcccttcagaaggagtccttaatgagcctgcaggcccagctggacaaagctctgcagaaggagaagcactatctccagactaccatcaccaaagaagcctatgatgcattatcccggaagtcagccgcctgccaggatgacctgacacaagccctcgagaagctcaatcacgtgacctcagagacaaagagcctgcagcaaagcttgacacagacccaagagaagaaagctcagctggaagaggaaatcattgcttatgaggaaaggatgaaaaagctcaatacggaattaagaaaactgcggggcttccaccaggagagtgagctggaggtgcacgcctttgacaagaagctagaggagatgagctgccaggtgctgcagtggcagaagcaacaccagaatgacctcaagatgctggcagccaaagaggagcagctcagggagttccaggaggagatggccgccttaaaagagaacctccttgaggacgataaggagccctgctgcctgccccagtggtctgtgcccaaagacacctgtaggctctaccgagggaatgatcagattatgaccaacttggagcaatgggcaaaacagcagaaggtcgccaatgagaaactaggaaaccagctccgagagcaggtgaaatacattgccaagctgagtggcgaaaaggacagggaaccaaccagagccagcagccccaacacaacccgtccttcctctccttcccacagccacctccacagtgtaatggtccacttgcagcaggaaaacaagaagctgaagaaggagatagaagagaagaagatgaaagccgagaacacaaggctatgcaccaaagccctaggcccgagcagaacggagtccacacagagggagaaagtgtgcggcaccttgggctggaaggggttgccccaggatatgggtcaaagaatggacctcaccaagtacatcgggatgccccactgcccgggttcctcatactgctagaatccacatctagccctgagcagcatttccacgggtgtttcttcagaggacagtgagttcccagccctccctctctcttgacctggatcagctcttacaggagtatatcacggtcccagcctattttgcaagacactaacttttgttgagttttgtccacttcctgccatggagtgagctttagaaccatactaccatctccaggcccaaactctgaaataaagacatgagcatgag

SEQ ID NO: 167188 - DNA, 2038 bp, Homo sapiens
  Payload ID: 12901
  Gene Symbol: PMFBP1
  Gene Name: polyamine modulated factor 1 binding protein 1
  ENST ID: ENST00000537392
  CDS Start-End: 1-1509
caagtgaagatgttgcagggggaactcggcgggatcatgggtcaggagcctgagaacaagggtgatcattcaaaggtacggatatacacttctccttgcatgattcaagagcatcaggagactcagaaacgactgtctgaagtctggcaaaaggtctctcaacaggatgatctcattcaagaacttcgaaataagctggcctgcagtaacgctttggttctggagcgtgaaaaggctttgataaaactacaagccgattttgcttcctgtacagccacccacagataccctcctagctcctcagaagagtgtgaagacatcaaaaagatactgaagcacttgcaggagcagaaagacagccagtgcctgcatgtggaggagtaccagaacctggtgaaggatctgcgcgtggaactagaggccgtgtcggaacagaagagaaacatcatgaaggacatgatgaagctggagctggacctgcacggactgcgggaggagacatctgcccacattgagaggaaggataaggacatcaccatcctgcagtgccggctgcaggagctgcagctggagttcaccgagacccaaaagctcactttgaagaaagacaagttcctccaagagaaagatgagatgctgcaagagctggagaagaaactgacacaggttcagaacagcctcctgaaaaaggagaaggagctggagaagcagcagtgcatggccacagaacttgaaatgacagtcaaggaggctaagcaggacaagtccaaggaggcggagtgcaaggccctgcaggctgaggtccagaagctgaagaacagtctcgaagaggccaagcagcaggagaggctggctgctcagcaagcagcccagtgcaaagaagaggctgcactggcaggctgtcacctggaggacacccagaggaaactgcagaagggtctcctcctggacaagcagaaggcagacaccatccaggaactacagagagaacttcagatgctgcagaaggagtcctcgatggctgagaaggaacaaacctccaacagaaaacgggtggaggagctgtcattagaactctctgaagccctgaggaagcttgaaaattcagacaaggaaaagaggcagcttcagaagacagtggctgagcaggatatgaaaatgaatgacatgcttgatcgtatcaagcaccagcacagggagcaaggctccatcaaatgcaagttagaagaagatcttcaggaggccacaaagcttctggaggacaaacgggagcagttgaagaagagcaaagagcatgagaagctgatggagggagaacttgaagctttgcggcaggaatttaaaaagaaagacaagacgttgaaagagaattccagaaagttggaggaagaaaatgagaatctccgagcagagctacagtgttgttctacacaactggaatcctctctcaacaaatacaacaccagccagcaagtcatccaagacttgaataaagagaaatgcagctaactgctcagccaactgcggatcctgggccacctacagctctacttccctccccattggcacctggttgctgagccagagaaatgtttcttccatatgtggaaggtctcatctcatatctggtggagccccaagctatttgggctttggcatcaagtcttccaatgttacattttagaccagaatagcccttcagaaggagtccttaatgagcctgcaggcccagctggacaaagctctgcagaaggagaagcactatctccagactaccatcaccaaagaagcctatgatgcattatcccggaagtcagccgcctgccaggatgacctgacacaagccctcgagaagctcaatcacgtgacctcagagacaaagagcctgcagcaaagcttgacacagacccaagagaagaaagctcagctggaagaggaaatcattgcttatgaggaaaggatgaaaaagctcaatacggaattaagaaaactgcggggcttccaccaggagagtgagctggaggtgcacgcctttgac

SEQ ID NO: 167189 - DNA, 458 bp, Homo sapiens
  Payload ID: 12901
  Gene Symbol: PMFBP1
  Gene Name: polyamine modulated factor 1 binding protein 1
  ENST ID: ENST00000536211
  CDS Start-End: 255-458
caacaggcaacatactagataatagaagttcaccagctgaggactacgaggatattgaggacaatgtggagcagagccccagctgactcataaaggacatgtagcatgagtaaaaaataaaccttcacggtcgtaagccactgagacttgggggttgtttgttactacaccatcacctagcctgtccccaccaggtttataacaaagctcagaaaatactaaaggttaaaggagaattgagagctgccaaggaaatgaaagatgaggcgggggagagagacagagaagtgagcagcctgaacagcaagctgttaagcctgcaacttgacatcaagaatctgcacgatgtctgcaagagacagaggaagaccttgcaggacaatcagctctgcatggaggaggcaatgaacagcagccacgacaagaagcaagcacaggcattagcattcgaggagtca

SEQ ID NO: 167190 - DNA, 407 bp, Homo sapiens
  Payload ID: 12901
  Gene Symbol: PMFBP1
  Gene Name: polyamine modulated factor 1 binding protein 1
  ENST ID: ENST00000540440
  CDS Start-End: 265-407
tgaaacaggggttccaaaatgtagagtataagcaactagtggaggtgctagaaacggcacagctgtcaccaagagaagtcctactttgaaaagcagatggcaggagttttgaatacaaaaaaggagttgcctgggcagatggcagtagacaaggcatgaagaaatgaaggtctcaacagagacgcaagaggcagaacagaatatgtttataacaaagctcagaaaatactaaaggttaaaggagaattgagagctgccaaggaaatgaaagatgaggcgggggagagagacagagaagtgagcagcctgaacagcaagctgttaagcctgcaacttgacatcaagaatctgcacgatgtctgcaagagacagaggaagaccttgcaggacaatcagctctgcatgga

SEQ ID NO: 167191 - DNA, 556 bp, Homo sapiens
  Payload ID: 12901
  Gene Symbol: PMFBP1
  Gene Name: polyamine modulated factor 1 binding protein 1
  ENST ID: ENST00000539172
  CDS Start-End: 226-556
agctagataagtctcagcacttcacatgtttcctaactttatgagcatcaacattatggcaagctgatgcttcaaaaacaccatatcatcagatatttcatatgaatagttacaaaattaatggaagctcctcatagagtagtaagagagcctctgtgaccctgggtttataacaaagctcagaaaatactaaaggttaaaggagaattgagagctgccaaggaaatgaaagatgaggcgggggagagagacagagaagtgagcagcctgaacagcaagctgttaagcctgcaacttgacatcaagaatctgcacgatgtctgcaagagacagaggaagaccttgcaggacaatcagctctgcatggaggaggcaatgaacagcagccacgacaagaagcaagcacaggcattagcattcgaggagtcagaggtggaatttgggtccagtaaacagtgtcatctgagacaactccagcaactgaagaaaaaattgctggtccttcaacaagaactggagtttcacacagaggagttgcagacttcttactattctc

SEQ ID NO: 167192 - DNA, 955 bp, Homo sapiens
  Payload ID: 12901
  Gene Symbol: PMFBP1
  Gene Name: polyamine modulated factor 1 binding protein 1
  ENST ID: ENST00000537792
  CDS Start-End: 1-351
atgctggcagccaaagaggagcagctcagggagttccaggaggagatggccgccttaaaagagaacctccttgaggacgataaggagccctgctgcctgccccagtggtctgtgcccaaagacacctgtaggctctaccgagggaatgatcagattatgaccaacttggagcaatgggcaaaacagcagaaggtcgccaatgagaaactaggaaaccagctccgagagcaggtgaaatacattgccaagctgagtggcgaaaaggagtcttttttgctgctttacacaaggattaaaaaagacagccacagccaagtcacgcatacaccaagtgtcctgggccagttttagatgcgatgggtccagccacctcccgctgccccggcagcacctcggatactctgcagccccgctcccgccatgccgtgctcctgcatggaagaactccacctcctctgccagagagtctggtccagcaggaactgccctggggggccgtgatatgcacagatgaaagtcctcagatgaaagggctttgtccgcagcctcagggctcccgccagaaggctgaggacccaatacctgctgccatcctctctggggacagcctcagctcacagaccaaagcgggctggcgtgcggcgaggggtcatgggctccccttgctctttccggcctggagtgtagatcttcgtagacctggagacacagcaggagagatcaggaaacaccgtgccctcacccacagccaggagggcaggaggatgcagagccccaggacttactgttcctaacccatggtggggagctctgggccgagggatctcctccccggcacattctcactcctctgccgtccccatgttcgactggcgatgtaatcaaggaagctcactcattccgatatgctttagatcggattttaacaactcctcccacagtccctaggggagct

SEQ ID NO: 167193 - DNA, 3935 bp, Homo sapiens
  Payload ID: 12901
  Gene Symbol: PMFBP1
  Gene Name: polyamine modulated factor 1 binding protein 1
  ENST ID: ENST00000537465
  CDS Start-End: 160-3228
attctttcttcctcttggcttatattagggataggggatgtggtttgttacaaaggatgagtattttgatagcttctcattccttgaactattctgcaggtttataacaaagctcagaaaatactaaaggttaaaggagaattgagagctgccaaggaaatgaaagatgaggcgggggagagagacagagaagtgagcagcctgaacagcaagctgttaagcctgcaacttgacatcaagaatctgcacgatgtctgcaagagacagaggaagaccttgcaggacaatcagctctgcatggaggaggcaatgaacagcagccacgacaagaagcaagcacaggcattagcattcgaggagtcagaggtggaatttgggtccagtaaacagtgtcatctgagacaactccagcaactgaagaaaaaattgctggtccttcaacaagaactggagtttcacacagaggagttgcagacttcttactattctctccgccagtatcagtccatcctagagaagcagacttccgacctggttcttctgcaccatcactgcaaactgaaagaagatgaggtgattctctatgaggaggaaatgggaaatcacaacgagaacacaggggagaagctccatttggcgcaggagcaactcgccttggccggggacaagatcgcctctctagagaggagcttaaacctctacagggataaataccagtcttccctgagcaacatcgagttactagaatgccaagtgaagatgttgcagggggaactcggcgggatcatgggtcaggagcctgagaacaagggtgatcattcaaaggtacggatatacacttctccttgcatgattcaagagcatcaggagactcagaaacgactgtctgaagtctggcaaaaggtctctcaacaggatgatctcattcaagaacttcgaaataagctggcctgcagtaacgctttggttctggagcgtgaaaaggctttgataaaactacaagccgattttgcttcctgtacagccacccacagataccctcctagctcctcagaagagtgtgaagacatcaaaaagatactgaagcacttgcaggagcagaaagacagccagtgcctgcatgtggaggagtaccagaacctggtgaaggatctgcgcgtggaactagaggccgtgtcggaacagaagagaaacatcatgaaggacatgatgaagctggagctggacctgcacggactgcgggaggagacatctgcccacattgagaggaaggataaggacatcaccatcctgcagtgccggctgcaggagctgcagctggagttcaccgagacccaaaagctcactttgaagaaagacaagttcctccaagagaaagatgagatgctgcaagagctggagaagaaactgacacaggttcagaacagcctcctgaaaaaggagaaggagctggagaagcagcagtgcatggccacagaacttgaaatgacagtcaaggaggctaagcaggacaagtccaaggaggcggagtgcaaggccctgcaggctgaggtccagaagctgaagaacagtctcgaagaggccaagcagcaggagaggctggctggtgaggcccctgcagctcagcaagcagcccagtgcaaagaagaggctgcactggcaggctgtcacctggaggacacccagaggaaactgcagaagggtctcctcctggacaagcagaaggcagacaccatccaggaactacagagagaacttcagatgctgcagaaggagtcctcgatggctgagaaggaacaaacctccaacagaaaacgggtggaggagctgtcattagaactctctgaagccctgaggaagcttgaaaattcagacaaggaaaagaggcagcttcagaagacagtggctgagcaggatatgaaaatgaatgacatgcttgatcgtatcaagcaccagcacagggagcaaggctccatcaaatgcaagttagaagaagatcttcaggaggccacaaagcttctggaggacaaacgggagcagttgaagaagagcaaagagcatgagaagctgatggagggagaacttgaagctttgcggcaggaatttaaaaagaaagacaagacgttgaaagagaattccagaaagttggaggaagaaaatgagaatctccgagcagagctacagtgttgttctacacaactggaatcctctctcaacaaatacaacaccagccagcaagtcatccaagacttgaataaagagatagcccttcagaaggagtccttaatgagcctgcaggcccagctggacaaagctctgcagaaggagaagcactatctccagactaccatcaccaaagaagcctatgatgcattatcccggaagtcagccgcctgccaggatgacctgacacaagccctcgagaagctcaatcacgtgacctcagagacaaagagcctgcagcaaagcttgacacagacccaagagaagaaagctcagctggaagaggaaatcattgcttatgaggaaaggatgaaaaagctcaatacggaattaagaaaactgcggggcttccaccaggagagtgagctggaggtgcacgcctttgacaagaagctagaggagatgagctgccaggtgctgcagtggcagaagcaacaccagaatgacctcaagatgctggcagccaaagaggagcagctcagggagttccaggaggagatggccgccttaaaagagaacctccttgaggacgataaggagccctgctgcctgccccagtggtctgtgcccaaagacacctgtaggctctaccgagggaatgatcagattatgaccaacttggagcaatgggcaaaacagcagaaggtcgccaatgagaaactaggaaaccagctccgagagcaggtgaaatacattgccaagctgagtggcgaaaaggaccacctccacagtgtaatggtccacttgcagcaggaaaacaagaagctgaagaaggagatagaagagaagaagatgaaagccgagaacacaaggctatgcaccaaagccctaggcccgagcagaacggagtccacacagagggagaaagtgtgcggcaccttgggctggaaggggttgccccaggatatgggtcaaagaatggacctcaccaagtacatcgggatgccccactgcccgggtacgtctgccatttgtcaaaaaaataagtgtgatttttttctttaaatcactggattgagaattcaagtaggaagaagaaaataggccttttgtggcctcaagtcattttcttagcgactttggaccaaagatcgttgttttcacatctgtaaagggaggaggcaaattaagaccccttctgatctaagaacatctgaagcatacccaagtgcctcacatctcagacctgccccctcccctgacccagacccattttagggaacaggtagaagaggcatcttccttctacgtctggaaaccccgtaagagcaccccagccacctacccagcctgggtccacagccgcctttcctgccacctgtaaactccatgttaccccagaggcaagaagtcaccctgcagcagagctgcctggccatgcggccagcccttgaggaatcacctcgttaatttctcctcgaatcaaaactctcatttcctccctgttccctcaggttcctcatactgctagaatccacatctagccctgagcagcatttccacgggtgtttcttcagaggacagtgagttcccagccctccctctctcttgacctggatcagctcttacaggagtatatcacggtcccagcctattttgcaagacactaacttttgttgagttttgtccacttcctgccatggagtgagctttagaaccatactaccatctccaggcccaaactctgaaataaagacatgagcatgagcaca

SEQ ID NO: 167194 - DNA, 559 bp, Homo sapiens
  Payload ID: 12901
  Gene Symbol: PMFBP1
  Gene Name: polyamine modulated factor 1 binding protein 1
  ENST ID: ENST00000535461
  CDS Start-End: 90-559
aacacccttttaaaaacacaaacagatgggtttataacaaagctcagaaaatactaaaggttaaaggagaattgagagctgccaaggaaatgaaagatgaggcgggggagagagacagagaagtgagcagcctgaacagcaagctgttaagcctgcaacttgacatcaagaatctgcacgatgtctgcaagagacagaggaagaccttgcaggacaatcagctctgcatggaggaggcaatgaacagcagccacgacaagaagcaagcacaggcattagcattcgaggagtcagaggtggaatttgggtccagtaaacagtgtcatctgagacaactccagcaactgaagaaaaaattgctggtccttcaacaagaactggagtttcacacagaggagttgcagacttcttactattctctccgccagtatcagtccatcctagagaagcagacttccgacctggttcttctgcaccatcactgcaaactgaaagaagatgaggtgattctctatgaggaggaaatgggaaatcacaacgagaacacaggggagaagct

SEQ ID NO: 167195 - DNA, 1858 bp, Homo sapiens
  Payload ID: 12902
  Gene Symbol: PAOX
  Gene Name: polyamine oxidase (exo-N4-amino)
  Uniprot ID: Q6QHF9
  ENST ID: ENST00000278060
  CDS Start-End: 84-1619
ccccctcgctccgcctccggcctcctccgagagctccagacctcccggctactcagaagccctcggactgcccggaccgcgcgatggagtcgaccggcagcgtcggggaggccccgggcggaccccgggtgctggtggtgggcggcggcatcgcggggctgggcgcggcgcagaggctctgcggccactccgccttcccgcacctgcgggtcctggaggccacggcccgcgccgggggccgcatccgctcggagcgctgcttcggtggcgtggtggaggtgggcgcgcactggatccatgggccctcccggggtaaccccgtcttccagctggctgctgagtacgggctgctgggggagaaggagctgtcccaggagaaccagctggtggagaccgggggtcacgtgggcctgccctccgtgagctacgccagctccggggccagcgtgagcctccagctggtggcggagatggcgactctgttctacggcctgatagaccagacccgggagttcctgcacgctgcagagaccccggtgcccagcgtcggggagtacctcaagaaggagattggccagcacgtggccggctggacagaggatgaggagaccaggaagctgaagctggccgtcctgaactccttcttcaacctggaatgctgtgtgagcggcacccacagcatggacctggtggccctggcaccctttggggagtataccgtgctgccggggctggactgcaccttttctaagggctatcaaggactcacaaactgcatgatggccgccctgccggaggacactgtagtttttgagaagcctgtgaagaccatccactggaacgggtccttccaggaggcagcctttcccggggagacctttccagtgtcggtagagtgtgaggatggagaccggttcccggcgcaccatgtcatcgtcaccgtgcccttaggttttcttagggaacatttggacaccttctttgaccctcccctgccggctgagaaggcagaagcaatcaggaagataggctttgggaccaacaacaaaatcttcctggagtttgaggagcccttctgggagccagactgccagctgatccagctggtgtgggaggacacgtcgcccctggaggatgctgcccctgagctacaggacgcctggttccggaagctcattggctttgtggtcctgcctgcctttgcgtctgtccacgttctctgtgggttcattgccggacttgagtctgagttcatggagactctgtcggatgaagaagtacttctgtgtctcacccaagtgctccggagagtgacaggaaacccacggctccccgcgcccaagagcgtcctgcggtctcgctggcacagcgccccgtacactagggggtcctacagctacgtggccgtgggcagtactgggggcgacctggacctgctggctcagcccctccctgcagacggcgccggcgcccagctccagatcctgtttgcgggggaagccacacatcgcacgttttactccacgacgcacggggctctgctgtcgggatggagggaggccgaccgcctcctcagtctgtgggccccgcaggtgcagcagcccaggcccaggctctagctgggcccagcctactctgttccacccgtgtcgggggtaggctgggaccctcatttcttctgacagatttcagtctggcttgaaatttggggatgttaatgagggtcctctggtttttggtaaccagggccaccttctcagttcttgtgtctgttattggagtctggccagggttgacttgagctgagacaccagatgctcacggagatgctggacacataaagcaagttacagccaca

SEQ ID NO: 167196 - DNA, 1482 bp, Homo sapiens
  Payload ID: 12902
  Gene Symbol: PAOX
  Gene Name: polyamine oxidase (exo-N4-amino)
  Uniprot ID: Q6QHF9
  ENST ID: ENST00000356306
  CDS Start-End: 31-1008
cagaagccctcggactgcccggaccgcgcgatggagtcgaccggcagcgtcggggaggccccgggcggaccccgggtgctggtggtgggcggcggcatcgcggggctgggcgcggcgcagaggctctgcggccactccgccttcccgcacctgcgggtcctggaggccacggcccgcgccgggggccgcatccgctcggagcgctgcttcggtggcgtggtggaggtgggcgcgcactggatccatgggccctcccggggtaaccccgtcttccagctggctgctgagtacgggctgctgggggagaaggagctgtcccaggagaaccagctggtggagaccgggggtcacgtgggcctgccctccgtgagctacgccagctccggggccagcgtgagcctccagctggtggcggagatggcgactctgttctacggcctgatagaccagacccgggagttcctgcacgctgcagagaccccggtgcccagcgtcggggagtacctcaagaaggagattggccagcacgtggccggctggacagaggatgaggagaccaggaagctgaagctggccgtcctgaactccttcttcaacctggaatgctgtgtgagcggcacccacagcatggacctggtggccctggcaccctttggggagtataccgtgctgccggggctggactgcaccttttctaagggctatcaaggactcacaaactgcatgatggccgccctgccggaggacactgtagtttttgagaagcctgtgaagaccatccactggaacgggtccttccaggaggcagcctttcccggggagacctttccagtgtcggtagagtgtgaggatggagaccggttcccggcgcaccatgtcatcgtcaccgtgcccttaggtctgtccacgttctctgtgggttcattgccggacttgagtctgagttcatggagactctgtcggatgaagaagtacttctgtgtctcacccaagtgctccggagagtgacaggaaacccacggctccccgcgcccaagagcgtcctgcggtctcgctggcacagcgccccgtacactagggggtcctacagctacgtggccgtgggcagtactgggggcgacctggacctgctggctcagcccctccctgcagacggcgccggcgcccagctccagatcctgtttgcgggggaagccacacatcgcacgttttactccacgacgcacggggctctgctgtcgggatggagggaggccgaccgcctcctcagtctgtgggccccgcaggtgcagcagcccaggcccaggctctagctgggcccagcctactctgttccacccgtgtcgggggtaggctgggaccctcatttcttctgacagatttcagtctggcttgaaatttggggatgttaatgagggtcctctggtttttggtaaccagggccaccttctcagttcttgtgtctgttattggagtctggcc

SEQ ID NO: 167197 - DNA, 1633 bp, Homo sapiens
  Payload ID: 12902
  Gene Symbol: PAOX
  Gene Name: polyamine oxidase (exo-N4-amino)
  Uniprot ID: Q6QHF9
  ENST ID: ENST00000357296
  CDS Start-End: 57-1517
cgagagctccagacctcccggctactcagaagccctcggactgcccggaccgcgcgatggagtcgaccggcagcgtcggggaggccccgggcggaccccgggtgctggtggtgggcggcggcatcgcggggctgggcgcggcgcagaggctctgcggccactccgccttcccgcacctgcgggtcctggaggccacggcccgcgccgggggccgcatccgctcggagcgctgcttcggtggcgtggtggaggtgggcgcgcactggatccatgggccctcccggggtaaccccgtcttccagctggctgctgagtacgggctgctgggggagaaggagctgtcccaggagaaccagctggtggagaccgggggtcacgtgggcctgccctccgtgagctacgccagctccggggccagcgtgagcctccagctggtggcggagatggcgactctgttctacggcctgatagaccagacccgggagttcctgcacgctgcagagaccccggtgcccagcgtcggggagtacctcaagaaggagattggccagcacgtggccggctggacagaggatgaggagaccaggaagctgaagctggccgtcctgaactccttcttcaacctggaatgctgtgtgagcggcacccacagcatggacctggtggccctggcaccctttggggagtataccgtgctgccggggctggactgcaccttttctaagggctatcaaggactcacaaactgcatgatggccgccctgccggaggacactgtagtttttgagaagcctgtgaagaccatccactggaacgggtccttccaggaggcagcctttcccggggagacctttccagtgtcggtagagtgtgaggatggagaccggttcccggcgcaccatgtcatcgtcaccgtgcccttaggttttcttagggaacatttggacaccttctttgaccctcccctgccggctgagaaggcagaagcaatcaggaagataggctttgggaccaacaacaaaatcttcctggagtttgaggagcccttctgggagccagactgccagctgatccagctggtgtgggaggacacgtcgcccctggaggatgctgcccctgagctacaggacgcctggttccggaagctcattggctttgtggtcctgcctgcctttgcgtctgtccacgttctctgtgggttcattgccggacttgagtctgagttcatggagactctgtcggatgaagaagtacttctgtgtctcacccaagtgctccggagagtgacagctccagatcctgtttgcgggggaagccacacatcgcacgttttactccacgacgcacggggctctgctgtcgggatggagggaggccgaccgcctcctcagtctgtgggccccgcaggtgcagcagcccaggcccaggctctagctgggcccagcctactctgttccacccgtgtcgggggtaggctgggaccctcatttcttctgacagatttcagtctggcttgaaatttggggatgttaatgagggtcctctggtttttggtaaccagggccaccttctcagttcttgtgtctgttattggagtctggccagggttgacttgagctgagacaccagatgc

SEQ ID NO: 167198 - DNA, 609 bp, Homo sapiens
  Payload ID: 12902
  Gene Symbol: PAOX
  Gene Name: polyamine oxidase (exo-N4-amino)
  ENST ID: ENST00000368539
  CDS Start-End: 142-480
ctggctgctgagtacgggctgctgggggagaaggagctgtcccaggagaaccagctggtggagaccgggggtcacgtgggcctgccctccgtgagctacgccagctccggggccagcgtgagcctccagctggtggcggagatggcgactctgttctacggcctgatagaccagacccgggagttcctgcacgctgcagagaccccggtgcccagcgtcggggagtacctcaagaaggagattggccagcacgtggccggctggacagaggatgaggagaccaggaagctgaagctggccgtcctgaactccttcttcaacctggaatgctgtgtgagcggcacccacagcacggggctctgctgtcgggatggagggaggccgaccgcctcctcagtctgtgggccccgcaggtgcagcagcccaggcccaggctctagctgggcccagcctactctgttccacccgtgtcgggggtaggctgggaccctcatttcttctgacagatttcagtctggcttgaaatttggggatgttaatgagggtcctctggtttttggtaaccagggccaccttctcagttcttgtgtctgttattggagtctggcc

SEQ ID NO: 167199 - DNA, 837 bp, Homo sapiens
  Payload ID: 12902
  Gene Symbol: PAOX
  Gene Name: polyamine oxidase (exo-N4-amino)
  Uniprot ID: Q6QHF9
  ENST ID: ENST00000529585
  CDS Start-End: 31-240
cagaagccctcggactgcccggaccgcgcgatggagtcgaccggcagcgtcggggaggccccgggcggaccccgggtgctggtggtgggcggcggcatcgcggggctgggcgcggcgcagaggctctgcggccactccgccttcccgcacctgcgggtcctggaggccacggcccgcgccgggggccgcatccgctcggagcgctgcttcggggctatcaaggactcacaaactgcatgatggccgccctgccggaggacactgtagtttttgagaagcctgtgaagaccatccactggaacgggtccttccaggaggcagcctttcccggggagacctttccagtgtcggtagagtgtgaggatggagaccggttcccggcgcaccatgtcatcgtcaccgtgcccttaggtctgtccacgttctctgtgggttcattgccggacttgagtctgagttcatggagactctgtcggatgaagaagtacttctgtgtctcacccaagtgctccggagagtgacagctccagatcctgtttgcgggggaagccacacatcgcacgttttactccacgacgcacggggctctgctgtcgggatggagggaggccgaccgcctcctcagtctgtgggccccgcaggtgcagcagcccaggcccaggctctagctgggcccagcctactctgttccacccgtgtcgggggtaggctgggaccctcatttcttctgacagatttcagtctggcttgaaatttggggatgttaatgagggtcctctggtttttggtaaccagggccaccttctcagttcttgtgtctgttattggagtctggcc

SEQ ID NO: 167200 - DNA, 1336 bp, Homo sapiens
  Payload ID: 12902
  Gene Symbol: PAOX
  Gene Name: polyamine oxidase (exo-N4-amino)
  Uniprot ID: Q6QHF9
  ENST ID: ENST00000476834
  CDS Start-End: 31-240
cagaagccctcggactgcccggaccgcgcgatggagtcgaccggcagcgtcggggaggccccgggcggaccccgggtgctggtggtgggcggcggcatcgcggggctgggcgcggcgcagaggctctgcggccactccgccttcccgcacctgcgggtcctggaggccacggcccgcgccgggggccgcatccgctcggagcgctgcttcggggctatcaaggactcacaaactgcatgatggccgccctgccggaggacactgtagtttttgagaagcctgtgaagaccatccactggaacgggtccttccaggaggcagcctttcccggggagacctttccagtgtcggtagagtgtgaggatggagaccggttcccggcgcaccatgtcatcgtcaccgtgcccttagaacttgtcagtgtttccaaatcagcacacatagatctacagcggtcttttttgtttccctccagtggctttgttcattcacgtttggagttttcttagggaacatttggacaccttctttgaccctcccctgccggctgagaaggcagaagcaatcaggaagataggctttgggaccaacaacaaaatcttcctggagtttgaggagcccttctgggagccagactgccagctgatccagctggtgtgggaggacacgtcgcccctggaggatgctgcccctgagctacaggacgcctggttccggaagctcattggctttgtggtcctgcctgcctttgcgtctgtccacgttctctgtgggttcattgccggacttgagtctgagttcatggagactctgtcggatgaagaagtacttctgtgtctcacccaagtgctccggagagtgacaggaaacccacggctccccgcgcccaagagcgtcctgcggtctcgctggcacagcgccccgtacactagggggtcctacagctacgtggccgtgggcagtactgggggcgacctggacctgctggctcagcccctccctgcagacggcgccggcgcccagctccagatcctgtttgcgggggaagccacacatcgcacgttttactccacgacgcacggggctctgctgtcgggatggagggaggccgaccgcctcctcagtctgtgggccccgcaggtgcagcagcccaggcccaggctctagctgggcccagcctactctgttccacccgtgtcgggggtaggctgggaccctcatttcttctgacagatttcagtctggcttgaaatttggggatgttaatgagggtcctctggtttttggtaaccagggccaccttctcagttcttgtgtctgttattggagtctggcc

SEQ ID NO: 167201 - DNA, 995 bp, Homo sapiens
  Payload ID: 12902
  Gene Symbol: PAOX
  Gene Name: polyamine oxidase (exo-N4-amino)
  Uniprot ID: Q6QHF9
  ENST ID: ENST00000483211
  CDS Start-End: 31-240
cagaagccctcggactgcccggaccgcgcgatggagtcgaccggcagcgtcggggaggccccgggcggaccccgggtgctggtggtgggcggcggcatcgcggggctgggcgcggcgcagaggctctgcggccactccgccttcccgcacctgcgggtcctggaggccacggcccgcgccgggggccgcatccgctcggagcgctgcttcggggctatcaaggactcacaaactgcatgatggccgccctgccggaggacactgtagtttttgagaagcctgtgaagaccatccactggaacgggtccttccaggaggcagcctttcccggggagacctttccagtgtcggtagagtgtgaggatggagaccggttcccggcgcaccatgtcatcgtcaccgtgcccttaggtctgtccacgttctctgtgggttcattgccggacttgagtctgagttcatggagactctgtcggatgaagaagtacttctgtgtctcacccaagtgctccggagagtgacaggaaacccacggctccccgcgcccaagagcgtcctgcggtctcgctggcacagcgccccgtacactagggggtcctacagctacgtggccgtgggcagtactgggggcgacctggacctgctggctcagcccctccctgcagacggcgccggcgcccagctccagatcctgtttgcgggggaagccacacatcgcacgttttactccacgacgcacggggctctgctgtcgggatggagggaggccgaccgcctcctcagtctgtgggccccgcaggtgcagcagcccaggcccaggctctagctgggcccagcctactctgttccacccgtgtcgggggtaggctgggaccctcatttcttctgacagatttcagtctggcttgaaatttggggatgttaatgagggtcctctggtttttggtaaccagggccaccttctcagttcttgtgtctgttattggagtctggcc

SEQ ID NO: 167202 - DNA, 1324 bp, Homo sapiens
  Payload ID: 12902
  Gene Symbol: PAOX
  Gene Name: polyamine oxidase (exo-N4-amino)
  Uniprot ID: Q6QHF9
  ENST ID: ENST00000480071
  CDS Start-End: 31-1008
cagaagccctcggactgcccggaccgcgcgatggagtcgaccggcagcgtcggggaggccccgggcggaccccgggtgctggtggtgggcggcggcatcgcggggctgggcgcggcgcagaggctctgcggccactccgccttcccgcacctgcgggtcctggaggccacggcccgcgccgggggccgcatccgctcggagcgctgcttcggtggcgtggtggaggtgggcgcgcactggatccatgggccctcccggggtaaccccgtcttccagctggctgctgagtacgggctgctgggggagaaggagctgtcccaggagaaccagctggtggagaccgggggtcacgtgggcctgccctccgtgagctacgccagctccggggccagcgtgagcctccagctggtggcggagatggcgactctgttctacggcctgatagaccagacccgggagttcctgcacgctgcagagaccccggtgcccagcgtcggggagtacctcaagaaggagattggccagcacgtggccggctggacagaggatgaggagaccaggaagctgaagctggccgtcctgaactccttcttcaacctggaatgctgtgtgagcggcacccacagcatggacctggtggccctggcaccctttggggagtataccgtgctgccggggctggactgcaccttttctaagggctatcaaggactcacaaactgcatgatggccgccctgccggaggacactgtagtttttgagaagcctgtgaagaccatccactggaacgggtccttccaggaggcagcctttcccggggagacctttccagtgtcggtagagtgtgaggatggagaccggttcccggcgcaccatgtcatcgtcaccgtgcccttaggtctgtccacgttctctgtgggttcattgccggacttgagtctgagttcatggagactctgtcggatgaagaagtacttctgtgtctcacccaagtgctccggagagtgacagctccagatcctgtttgcgggggaagccacacatcgcacgttttactccacgacgcacggggctctgctgtcgggatggagggaggccgaccgcctcctcagtctgtgggccccgcaggtgcagcagcccaggcccaggctctagctgggcccagcctactctgttccacccgtgtcgggggtaggctgggaccctcatttcttctgacagatttcagtctggcttgaaatttggggatgttaatgagggtcctctggtttttggtaaccagggccaccttctcagttcttgtgtctgttattggagtctggcc

SEQ ID NO: 167203 - DNA, 884 bp, Homo sapiens
  Payload ID: 12903
  Gene Symbol: PMF1
  Gene Name: polyamine-modulated factor 1
  Uniprot ID: Q6P1K2
  ENST ID: ENST00000368273
  CDS Start-End: 11-634
caacttcaacatggccgaagcaagtagcgccaatctaggcagcggctgtgaggaaaaaaggcatgaggggtcgtcttcggaatctgtgccacccggcactaccatttcgagggtgaagctcctcgacaccatggtggacacttttcttcagaagctggtcgccgccggcagctctccactccttcattgggacggaagtgctggtccccgcctgccctctggtggacagtctgtgaaacaggccttcagttgggcggcgtgcaggttaccacaggggaggaaggaggaaatctctgacatcaaagaggaggggaacctagaagctgtcttgaatgccttggataaaattgtggaagaaggcaaagtccgcaaagagccagcctggcgccccagcgggatcccagagaaggatctgcacagtgttatggcaccctacttcctgcagcaacgggacaccctgcggcgccatgtgcagaaacaggaggccgagaaccagcagctggcagatgccgtcctggcagggcggaggcaggtggaggagctgcagctacaggtccaggcccagcagcaggcctggcaggctctacacagagaacagagggagctggttgctgtgctgagggagcctgagtgaggagaccgccagccccagaagcagagggcagtcaaggtcaagagcctgtggtccagcatgcctggcctgggcgggctacctctgagaacggctgaaatggtgcccagtccatcagcagtgatggaatttgctggaggactaggccagagcaagcctcactgccactgtgcctttggggcacccttggggttggacatacaccccctttagattcctctgtttcttctacctggataattcttggccatgt

SEQ ID NO: 167204 - DNA, 1068 bp, Homo sapiens
  Payload ID: 12903
  Gene Symbol: PMF1
  Gene Name: polyamine-modulated factor 1
  Uniprot ID: Q6P1K2
  ENST ID: ENST00000368277
  CDS Start-End: 10-627
aacttcaacatggccgaagcaagtagcgccaatctaggcagcggctgtgaggaaaaaaggcatgaggggtcgtcttcggaatctgtgccacccggcactaccatttcgagggtgaagctcctcgacaccatggtggacacttttcttcagaagctggtcgccgccggcagctaccagagattcactgactgctataagtgcttctaccagttgcagcctgcgatgacacagcaaatctatgacaagtttatagctcagttgcagacatctatccgggaggaaatctctgacatcaaagaggaggggaacctagaagctgtcttgaatgccttggataaaattgtggaagaaggcaaagtccgcaaagagccagcctggcgccccagcgggatcccagagaaggatctgcacagtgttatggcaccctacttcctgcagcaacgggacaccctgcggcgccatgtgcagaaacaggaggccgagaaccagcagctggcagatgccgtcctggcagggcggaggcaggtggaggagctgcagctacaggtccaggcccagcagcaggcctggcaggctctacacagagaacagagggagctggttgctgtgctgagggagcctgagtgaggagaccgccagccccagaagcagagggcagtcaaggtcaagagcctgtggtccagcatgcctggcctgggcgggctacctctgagaacggctgaaatggtgcccagtccatcagcagtgatggaatttgctggaggactaggccagagcaagcctcactgccactgtgcctttggggcacccttggggttggacatacaccccctttagattcctctgtttcttctacctggataattcttggccatgttctctcttctctaggttcaggtcagctctgcccctccgcccccctcctgctggttccccagcccttttccctggccctggcttggagaatctgttttcaatctccactgattgcccccttgctggccagcccaggggcctttaccatgttctctccacatccgtaaataaacttccttcactacactgtaa

SEQ ID NO: 167205 - DNA, 1019 bp, Homo sapiens
  Payload ID: 12903
  Gene Symbol: PMF1
  Gene Name: polyamine-modulated factor 1
  Uniprot ID: Q6P1K2
  ENST ID: ENST00000368279
  CDS Start-End: 24-566
agatttggaggttcaacttcaacatggccgaagcaagtagcgccaatctaggcagcggctgtgaggaaaaaaggcatgaggggtcgtcttcggaatctgtgccacccggcactaccatttcgagggtgaagctcctcgacaccatggtggacacttttcttcagaagctggtcgccgccggcagctaccagagattcactgactgctataagtgcttctaccagttgcagcctgcgatgacacagcaaatctatgacaagtttatagctcagttgcagacatctatccgggaggaaatctctgacatcaaagaggaggggaacctagaagctgtcttgaatgccttggataaaattgtggaagaaggcaaagtccgcaaagagccagcctgcaacgggacaccctgcggcgccatgtgcagaaacaggaggccgagaaccagcagctggcagatgccgtcctggcagggcggaggcaggtggaggagctgcagctacaggtccaggcccagcagcaggcctggcaggctctacacagagaacagagggagctggttgctgtgctgagggagcctgagtgaggagaccgccagccccagaagcagagggcagtcaaggtcaagagcctgtggtccagcatgcctggcctgggcgggctacctctgagaacggctgaaatggtgcccagtccatcagcagtgatggaatttgctggaggactaggccagagcaagcctcactgccactgtgcctttggggcacccttggggttggacatacaccccctttagattcctctgtttcttctacctggataattcttggccatgttctctcttctctaggttcaggtcagctctgcccctccgcccccctcctgctggttccccagcccttttccctggccctggcttggagaatctgttttcaatctccactgattgcccccttgctggccagcccaggggcctttaccatgttctctccacatccgtaaataaacttccttcactacactgt

SEQ ID NO: 167206 - DNA, 837 bp, Homo sapiens
  Payload ID: 12903
  Gene Symbol: PMF1
  Gene Name: polyamine-modulated factor 1
  ENST ID: ENST00000497069
  CDS Start-End: 1-281
caagtagcgccaatctaggcagcggctgtgaggaaaaaaggcatgaggggtcgtcttcggaatctgtgccacccggcactaccatttcgagggtgaagctcctcgacaccatggtggacacttttcttcagaagctggtcgccgccggcagctctccactccttcattgggacggaagtgctggtccccgcctgccctctggtggacagtctgtgaaacaggccttcagttgggcggcgtgcaggttaccacaggggaggaagctaccagagattcactgactgctataagtgcttctaccagttgcagcctgcgatgacacagcaaatctatgacaagtttatagctcagttgcagacatctatccgggaggaaatctctgacatcaaagaggaggggaacctagaagctgtcttgaatgccttggataaaattgtggaagaaggcaaagtccgcaaagagccagcctggcgccccagcgggatcccagagaaggatctgcacagtgttatggcaccctacttcctgcagcaacgggacaccctgcggcgccatgtgcagaaacaggaggccgagaaccagcagctggcagatgccgtcctggcagggcggaggcaggtggaggagctgcagctacaggtccaggcccagcagcaggcctggcaggctctacacagagaacagagggagctggttgctgtgctgagggagcctgagtgaggagaccgccagccccagaagcagagggcagtcaaggtcaagagcctgtggtccagcatgcctggcctgggcgggctacctctgagaacggctgaaatggtgcccagtccatcagca

SEQ ID NO: 167207 - DNA, 933 bp, Homo sapiens
  Payload ID: 12903
  Gene Symbol: PMF1
  Gene Name: polyamine-modulated factor 1
  ENST ID: ENST00000466489
  CDS Start-End: 12-275
tcaacttcaacatggccgaagcaagtagcgccaatctaggcagcggctgtgaggaaaaaaggcatgaggggtcgtcttcggaatctgtgccacccggcactaccatttcgagggtgaagctcctcgacaccatggtggacacttttcttcagaagctggtcgccgccggcagacggagtttcactcttgttgcccagactggagtgcagtggcgtgatctcggctcatggcaacctccacctcctgggttcaagcaattctcctcagcctcctgagtagccgggattataggtgccgccaccacgcccagctaatttttgtatttttagtagagatggggtttcaccatgttagccaggctgatctcgaactcctaatgtcagtcccttttctagctcctccggtcatgatacatccacactccagactctgtgtctggccctgcatggaagccaacatggccagatggcctggattgagtcccagctggctccatcacatgctggttgtgtgaccttgggcaagcttctctctgcctcagcttcctcatctgaaaaatgggggtgatgataatagaaccccgcctcacagaatcatggttgatctgcagtccctttgacggcaggaattgtactgtttcgtctttgggtttgtaccaccaagcttggcctggtacctggtcggtgctcactctccactccttcattgggacggaagtgctggtccccgcctgccctctggtggacagtctgtgaaacaggccttcagttgggcggcgtgcaggttaccacaggggaggaagctaccagagattcactgactgctataagtgcttctaccagttgcagcctgcgatgacacagcaaatctatgacaagtttatagctcagttgcagacatctatccgggaggaaatctctgacatcaaagagg

SEQ ID NO: 167208 - DNA, 5145 bp, Homo sapiens
  Payload ID: 12904
  Gene Symbol: PBRM1
  Gene Name: polybromo 1
  Uniprot ID: Q86U86
  ENST ID: ENST00000296302
  CDS Start-End: 3-5072
ccatgggttccaagagaagaagagctacctccccttccagcagtgtcagcggggactttgatgatgggcaccattctgtgtcaacaccaggcccaagcaggaaaaggaggagactttccaatcttccaactgtagatcctattgccgtgtgccatgaactctataataccatccgagactataaggatgaacagggcagacttctctgtgagctcttcattagggcaccaaagcgaagaaatcaaccagactattatgaagtggtttctcagcccattgacttgatgaaaatccaacagaaactaaaaatggaagagtatgatgatgttaatttgctgactgctgacttccagcttctttttaacaatgcaaagtcctattataagccagattctcctgaatataaagccgcttgcaaactctgggatttgtaccttcgaacaagaaatgagtttgttcagaaaggagaagcagatgacgaagatgatgatgaagatgggcaagacaatcagggcacagtgactgaaggatcttctccagcttacttgaaggagatcctggagcagcttcttgaagccatagttgtagctacaaatccatcaggacgtctcattagcgaactttttcagaaactgccttctaaagtgcaatatccagattattatgcaataattaaggagcctatagatctcaagaccattgcccagaggatacagaatggaagctacaaaagtattcatgcaatggccaaagatatagatctcctcgcaaaaaatgccaaaacttataatgagcctggctctcaagtattcaaggatgcaaattcaattaaaaaaatattttatatgaaaaaggctgaaattgaacatcatgaaatggctaagtcaagtcttcgaatgaggactccatccaacttggctgcagccagactgacaggtccttcacacagtaaaggcagccttggtgaagagagaaatcccactagcaagtattaccgtaataaaagagcagtacaaggaggtcgtttatcagcaattacaatggcacttcaatatggctcagaaagtgaagaagatgctgctttagctgctgcacgctatgaagagggagagtcagaagcagaaagcatcacttcctttatggatgtttcaaatcctttttatcagctttatgacacagttaggagttgtcggaataaccaagggcagctaatagctgaacctttttaccatttgccttcaaagaaaaaataccctgattattaccagcaaattaaaatgcccatatcactacaacagatccgaacaaaactgaagaatcaagaatatgaaactttagatcatttggagtgtgatctgaatttaatgtttgaaaatgccaaacgctataatgtgcccaattcagccatctacaagcgagttctaaaattgcagcaagttatgcaggcaaagaagaaagagcttgccaggagagacgatatcgaggacggagacagcatgatctcttcagccacctctgatactggtagtgccaaaagaaaaagtaaaaagaacataagaaagcagcgaatgaaaatcttattcaatgttgttcttgaagctcgagagccaggttcaggcagaagactttgtgacctatttatggttaaaccatccaaaaaggactatcctgattattataaaatcatcttggagccaatggacttgaaaataattgagcataacatccgcaatgacaaatatgctggtgaagagggaatgatagaagacatgaagctgatgttccggaatgccaggcactataatgaggagggctcccaggtttataatgatgcacatatcctggagaagttactcaaggagaaaaggaaagagctgggcccactgcctgatgatgatgacatggcttctcccaaactcaagctgagtaggaagagtggcatttctcctaaaaaatcaaaatacatgactccaatgcagcagaaactaaatgaggtctatgaagctgtaaagaactatactgataagaggggtcgccgcctcagtgccatatttctgaggcttccctctagatctgagttgcctgactactatctgactattaaaaagcccatggacatggaaaaaattcgaagtcacatgatggccaacaagtaccaagatattgactctatggttgaggactttgtcatgatgtttaataatgcctgtacatacaatgagccggagtctttgatctacaaagatgctcttgttctacacaaagtcctgcttgaaacacgcagagacctggagggagatgaggactctcatgtcccaaatgtgactttgctgattcaagagcttatccacaatctttttgtgtcagtcatgagtcatcaggatgatgagggaagatgctacagcgattctttagcagaaattcctgctgtggatcccaactttcctaacaaaccaccccttacatttgacataattaggaagaatgttgaaaataatcgctaccgtcggcttgatttatttcaagagcatatgtttgaagtattggaacgagcaagaaggatgaatcggacagattcagaaatatatgaagatgcagtagaacttcagcagttttttattaaaattcgtgatgaactctgcaaaaatggagagattcttctttcaccggcactcagctataccacaaaacatttgcataatgatgtggagaaagagagaaaggaaaaattgccaaaagaaatagaggaagataaactaaaacgagaagaagaaaaaagagaagctgaaaagagtgaagattcctctggtgctgcaggcctctcaggcttacatcgcacatacagccaggactgtagctttaaaaacagcatgtaccatgttggagattacgtctatgtggaacctgcagaggccaacctacaaccacatatcgtctgtattgaaagactgtgggaggattcagctggtgaaaaatggttgtatggctgttggttttaccgaccaaatgaaacattccacctggctacacgaaaatttctagaaaaagaagtttttaagagtgactattacaacaaagttccagttagtaaaattctaggcaagtgtgtggtcatgtttgtcaaggaatactttaagttatgcccagaaaacttccgagatgaggatgtttttgtctgtgaatcacggtattctgccaaaaccaaatcttttaagaaaattaaactgtggaccatgcccatcagctcagtcaggtttgtccctcgggatgtgcctctgcctgtggttcgcgtggcctctgtatttgcaaatgcagataaaggtgatgatgagaagaatacagacaactcagaggacagtcgagctgaagacaattttaacttggaaaaggaaaaagaagatgtccctgtggaaatgtccaatggtgaaccaggttgccactactttgagcagctccattacaatgacatgtggctgaaggttggcgactgtgtcttcatcaagtcccatggcctggtgcgtcctcgtgtgggcagaattgaaaaagtatgggttcgagatggagctgcatatttttatggccccatcttcattcacccagaagaaacagagcatgagcccacaaaaatgttctacaaaaaagaagtatttctgagtaatctggaagaaacctgccccatgacatgtattctcggaaagtgtgctgtgttgtcattcaaggacttcctctcctgcaggccaactgaaataccagaaaatgacattctgctttgtgagagccgctacaatgagagcgacaagcagatgaagaaattcaaaggattgaagaggttttcactctctgctaaagtggtagatgatgaaatttactacttcagaaaaccaattgttcctcagaaggagccatcacctttgctggaaaagaagatccagttgctagaagctaaatttgccgagttagaaggtggagatgatgatattgaagagatgggagaagaagatagtgaggtcattgaacctccttctctacctcagcttcagacccccctggccagtgagctggacctcatgccctacacacccccacagtctaccccaaagtctgccaaaggcagtgcaaagaaggaaggctccaaacggaaaatcaacatgagtggctacatcctgttcagcagtgagatgagggctgtgattaaggcccaacacccagactactctttcggggagctcagccgcctggtggggacagaatggagaaatcttgagacagccaagaaagcagaatatgaagagcgggcagctaaagttgctgagcagcaggagagagagcgagcagcacagcaacagcagccgagtgcttctccccgagcaggcacccctgtgggggctctcatgggggtggtgccaccaccaacaccaatggggatgctcaatcagcagttgacacctgttgcaggcatgatgggtggctatccgccaggccttccacctttgcagggcccagttgatggccttgttagcatgggcagcatgcagccacttcaccctggggggcctccaccccaccatcttccgccaggtgtgcctggcctcccgggcatcccaccaccgggtgtgatgaaccaaggagtggcccctatggtagggactccagcaccaggtggaagtccatatggacaacaggtgggagttttggggcctccagggcagcaggcaccacctccatatcccggcccacatccagctggaccccctgtcatacagcagccaacaacacccatgtttgtagctcccccaccaaagacccagcggcttcttcactcagaggcctacctgaaatacattgaaggactcagtgcggagtccaacagcattagcaagtgggatcagacactggcagctcgaagacgcgacgtccatttgtcgaaagaacaggagagccgcctaccctctcactggctgaaaagcaaaggggcccacaccaccatggcagatgccctctggcgccttcgagatttgatgctccgggacaccctcaacattcgccaagcatacaacctagaaaatgtttaatcacatcattacgtttcttttatatagaagcataaagagttgtggatcagtagccattttagttactgggggt

SEQ ID NO: 167209 - DNA, 4825 bp, Homo sapiens
  Payload ID: 12904
  Gene Symbol: PBRM1
  Gene Name: polybromo 1
  Uniprot ID: Q86U86
  ENST ID: ENST00000337303
  CDS Start-End: 4-4752
tccatgggttccaagagaagaagagctacctccccttccagcagtgtcagcggggactttgatgatgggcaccattctgtgtcaacaccaggcccaagcaggaaaaggaggagactttccaatcttccaactgtagatcctattgccgtgtgccatgaactctataataccatccgagactataaggatgaacagggcagacttctctgtgagctcttcattagggcaccaaagcgaagaaatcaaccagactattatgaagtggtttctcagcccattgacttgatgaaaatccaacagaaactaaaaatggaagagtatgatgatgttaatttgctgactgctgacttccagcttctttttaacaatgcaaagtcctattataagccagattctcctgaatataaagccgcttgcaaactctgggatttgtaccttcgaacaagaaatgagtttgttcagaaaggagaagcagatgacgaagatgatgatgaagatgggcaagacaatcagggcacagtgactgaaggatcttctccagcttacttgaaggagatcctggagcagcttcttgaagccatagttgtagctacaaatccatcaggacgtctcattagcgaactttttcagaaactgccttctaaagtgcaatatccagattattatgcaataattaaggagcctatagatctcaagaccattgcccagaggatacagaatggaagctacaaaagtattcatgcaatggccaaagatatagatctcctcgcaaaaaatgccaaaacttataatgagcctggctctcaagtattcaaggatgcaaattcaattaaaaaaatattttatatgaaaaaggctgaaattgaacatcatgaaatggctaagtcaagtcttcgaatgaggactccatccaacttggctgcagccagactgacaggtccttcacacagtaaaggcagccttggtgaagagagaaatcccactagcaagtattaccgtaataaaagagcagtacaaggaggtcgtttatcagcaattacaatggcacttcaatatggctcagaaagtgaagaagatgctgctttagctgctgcacgctatgaagagggagagtcagaagcagaaagcatcacttcctttatggatgtttcaaatcctttttatcagctttatgacacagttaggagttgtcggaataaccaagggcagctaatagctgaacctttttaccatttgccttcaaagaaaaaataccctgattattaccagcaaattaaaatgcccatatcactacaacagatccgaacaaaactgaagaatcaagaatatgaaactttagatcatttggagtgtgatctgaatttaatgtttgaaaatgccaaacgctataatgtgcccaattcagccatctacaagcgagttctaaaattgcagcaagttatgcaggcaaagaagaaagagcttgccaggagagacgatatcgaggacggagacagcatgatctcttcagccacctctgatactggtagtgccaaaagaaaaagtaaaaagaacataagaaagcagcgaatgaaaatcttattcaatgttgttcttgaagctcgagagccaggttcaggcagaagactttgtgacctatttatggttaaaccatccaaaaaggactatcctgattattataaaatcatcttggagccaatggacttgaaaataattgagcataacatccgcaatgacaaatatgctggtgaagagggaatgatagaagacatgaagctgatgttccggaatgccaggcactataatgaggagggctcccaggtttataatgatgcacatatcctggagaagttactcaaggagaaaaggaaagagctgggcccactgcctgatgatgatgacatggcttctcccaaactcaagctgagtaggaagagtggcatttctcctaaaaaatcaaaatacatgactccaatgcagcagaaactaaatgaggtctatgaagctgtaaagaactatactgataagaggggtcgccgcctcagtgccatatttctgaggcttccctctagatctgagttgcctgactactatctgactattaaaaagcccatggacatggaaaaaattcgaagtcacatgatggccaacaagtaccaagatattgactctatggttgaggactttgtcatgatgtttaataatgcctgtacatacaatgagccggagtctttgatctacaaagatgctcttgttctacacaaagtcctgcttgaaacacgcagagacctggagggagatgaggactctcatgtcccaaatgtgactttgctgattcaagagcttatccacaatctttttgtgtcagtcatgagtcatcaggatgatgagggaagatgctacagcgattctttagcagaaattcctgctgtggatcccaactttcctaacaaaccaccccttacatttgacataattaggaagaatgttgaaaataatcgctaccgtcggcttgatttatttcaagagcatatgtttgaagtattggaacgagcaagaaggatgaatcggacagattcagaaatatatgaagatgcagtagaacttcagcagttttttattaaaattcgtgatgaactctgcaaaaatggagagattcttctttcaccggcactcagctataccacaaaacatttgcataatgatgtggagaaagagagaaaggaaaaattgccaaaagaaatagaggaagataaactaaaacgagaagaagaaaaaagagaagctgaaaagagtgaagattcctctggtgctgcaggcctctcaggcttacatcgcacatacagccaggactgtagctttaaaaacagcatgtaccatgttggagattacgtctatgtggaacctgcagaggccaacctacaaccacatatcgtctgtattgaaagactgtgggaggattcagctggtgaaaaatggttgtatggctgttggttttaccgaccaaatgaaacattccacctggctacacgaaaatttctagaaaaagaagtttttaagagtgactattacaacaaagttccagttagtaaaattctaggcaagtgtgtggtcatgtttgtcaaggaatactttaagttatgcccagaaaacttccgagatgaggatgtttttgtctgtgaatcacggtattctgccaaaaccaaatcttttaagaaaattaaactgtggaccatgcccatcagctcagtcaggtttgtccctcgggatgtgcctctgcctgtggttcgcgtggcctctgtatttgcaaatgcagataaaggtgatgatgagaagaatacagacaactcagaggacagtcgagctgaagacaattttaacttggaaaaggaaaaagaagatgtccctgtggaaatgtccaatggtgaaccaggttgccactactttgagcagctccattacaatgacatgtggctgaaggttggcgactgtgtcttcatcaagtcccatggcctggtgcgtcctcgtgtgggcagaattgaaaaagtatgggttcgagatggagctgcatatttttatggccccatcttcattcacccagaagaaacagagcatgagcccacaaaaatgttctacaaaaaagaagtatttctgagtaatctggaagaaacctgccccatgacatgtattctcggaaagtgtgctgtgttgtcattcaaggacttcctctcctgcaggccaactgaaataccagaaaatgacattctgctttgtgagagccgctacaatgagagcgacaagcagatgaagaaattcaaaggattgaagaggttttcactctctgctaaagtggtagatgatgaaatttactacttcagaaaaccaattgttcctcagaaggagccatcacctttgctggaaaagaagatccagttgctagaagctaaatttgccgagttagaaggtggagatgatgatattgaagagatgggagaagaagatagtgaggtcattgaacctccttctctacctcagcttcagacccccctggccagtgagctggacctcatgccctacacacccccacagtctaccccaaagtctgccaaaggcagtgcaaagaaggaaggctccaaacggaaaatcaacatgagtggctacatcctgttcagcagtgagatgagggctgtgattaaggcccaacacccagactactctttcggggagctcagccgcctggtggggacagaatggagaaatcttgagacagccaagaaagcagaatatgaaggtgtgatgaaccaaggagtggcccctatggtagggactccagcaccaggtggaagtccatatggacaacaggtgggagttttggggcctccagggcagcaggcaccacctccatatcccggcccacatccagctggaccccctgtcatacagcagccaacaacacccatgtttgtagctcccccaccaaagacccagcggcttcttcactcagaggcctacctgaaatacattgaaggactcagtgcggagtccaacagcattagcaagtgggatcagacactggcagctcgaagacgcgacgtccatttgtcgaaagaacaggagagccgcctaccctctcactggctgaaaagcaaaggggcccacaccaccatggcagatgccctctggcgccttcgagatttgatgctccgggacaccctcaacattcgccaagcatacaacctagaaaatgtttaatcacatcattacgtttcttttatatagaagcataaagagttgtggatcagtagccattttagttactgggggt

SEQ ID NO: 167210 - DNA, 7523 bp, Homo sapiens
  Payload ID: 12904
  Gene Symbol: PBRM1
  Gene Name: polybromo 1
  Uniprot ID: Q86U86
  ENST ID: ENST00000356770
  CDS Start-End: 4-4812
tccatgggttccaagagaagaagagctacctccccttccagcagtgtcagcggggactttgatgatgggcaccattctgtgtcaacaccaggcccaagcaggaaaaggaggagactttccaatcttccaactgtagatcctattgccgtgtgccatgaactctataataccatccgagactataaggatgaacagggcagacttctctgtgagctcttcattagggcaccaaagcgaagaaatcaaccagactattatgaagtggtttctcagcccattgacttgatgaaaatccaacagaaactaaaaatggaagagtatgatgatgttaatttgctgactgctgacttccagcttctttttaacaatgcaaagtcctattataagccagattctcctgaatataaagccgcttgcaaactctgggatttgtaccttcgaacaagaaatgagtttgttcagaaaggagaagcagatgacgaagatgatgatgaagatgggcaagacaatcagggcacagtgactgaaggatcttctccagcttacttgaaggagatcctggagcagcttcttgaagccatagttgtagctacaaatccatcaggacgtctcattagcgaactttttcagaaactgccttctaaagtgcaatatccagattattatgcaataattaaggagcctatagatctcaagaccattgcccagaggatacagaatggaagctacaaaagtattcatgcaatggccaaagatatagatctcctcgcaaaaaatgccaaaacttataatgagcctggctctcaagtattcaaggatgcaaattcaattaaaaaaatattttatatgaaaaaggctgaaattgaacatcatgaaatggctaagtcaagtcttcgaatgagtaataaaagagcagtacaaggaggtcgtttatcagcaattacaatggcacttcaatatggctcagaaagtgaagaagatgctgctttagctgctgcacgctatgaagagggagagtcagaagcagaaagcatcacttcctttatggatgtttcaaatcctttttatcagctttatgacacagttaggagttgtcggaataaccaagggcagctaatagctgaacctttttaccatttgccttcaaagaaaaaataccctgattattaccagcaaattaaaatgcccatatcactacaacagatccgaacaaaactgaagaatcaagaatatgaaactttagatcatttggagtgtgatctgaatttaatgtttgaaaatgccaaacgctataatgtgcccaattcagccatctacaagcgagttctaaaattgcagcaagttatgcaggcaaagaagaaagagcttgccaggagagacgatatcgaggacggagacagcatgatctcttcagccacctctgatactggtagtgccaaaagaaaaagtaaaaagaacataagaaagcagcgaatgaaaatcttattcaatgttgttcttgaagctcgagagccaggttcaggcagaagactttgtgacctatttatggttaaaccatccaaaaaggactatcctgattattataaaatcatcttggagccaatggacttgaaaataattgagcataacatccgcaatgacaaatatgctggtgaagagggaatgatagaagacatgaagctgatgttccggaatgccaggcactataatgaggagggctcccaggtttataatgatgcacatatcctggagaagttactcaaggagaaaaggaaagagctgggcccactgcctgatgatgatgacatggcttctcccaaactcaagctgagtaggaagagtggcatttctcctaaaaaatcaaaatacatgactccaatgcagcagaaactaaatgaggtctatgaagctgtaaagaactatactgataagaggggtcgccgcctcagtgccatatttctgaggcttccctctagatctgagttgcctgactactatctgactattaaaaagcccatggacatggaaaaaattcgaagtcacatgatggccaacaagtaccaagatattgactctatggttgaggactttgtcatgatgtttaataatgcctgtacatacaatgagccggagtctttgatctacaaagatgctcttgttctacacaaagtcctgcttgaaacacgcagagacctggagggagatgaggactctcatgtcccaaatgtgactttgctgattcaagagcttatccacaatctttttgtgtcagtcatgagtcatcaggatgatgagggaagatgctacagcgattctttagcagaaattcctgctgtggatcccaactttcctaacaaaccaccccttacatttgacataattaggaagaatgttgaaaataatcgctaccgtcggcttgatttatttcaagagcatatgtttgaagtattggaacgagcaagaaggatgaatcggacagattcagaaatatatgaagatgcagtagaacttcagcagttttttattaaaattcgtgatgaactctgcaaaaatggagagattcttctttcaccggcactcagctataccacaaaacatttgcataatgatgtggagaaagagagaaaggaaaaattgccaaaagaaatagaggaagataaactaaaacgagaagaagaaaaaagagaagctgaaaagagtgaagattcctctggtgctgcaggcctctcaggcttacatcgcacatacagccaggactgtagctttaaaaacagcatgtaccatgttggagattacgtctatgtggaacctgcagaggccaacctacaaccacatatcgtctgtattgaaagactgtgggaggattcagctggtgaaaaatggttgtatggctgttggttttaccgaccaaatgaaacattccacctggctacacgaaaatttctagaaaaagaagtttttaagagtgactattacaacaaagttccagttagtaaaattctaggcaagtgtgtggtcatgtttgtcaaggaatactttaagttatgcccagaaaacttccgagatgaggatgtttttgtctgtgaatcacggtattctgccaaaaccaaatcttttaagaaaattaaactgtggaccatgcccatcagctcagtcaggtttgtccctcgggatgtgcctctgcctgtggttcgcgtggcctctgtatttgcaaatgcagataaaggtgatgatgagaagaatacagacaactcagaggacagtcgagctgaagacaattttaacttggaaaaggaaaaagaagatgtccctgtggaaatgtccaatggtgaaccaggttgccactactttgagcagctccattacaatgacatgtggctgaaggttggcgactgtgtcttcatcaagtcccatggcctggtgcgtcctcgtgtgggcagaattgaaaaagtatgggttcgagatggagctgcatatttttatggccccatcttcattcacccagaagaaacagagcatgagcccacaaaaatgttctacaaaaaagaagtatttctgagtaatctggaagaaacctgccccatgacatgtattctcggaaagtgtgctgtgttgtcattcaaggacttcctctcctgcaggccaactgaaataccagaaaatgacattctgctttgtgagagccgctacaatgagagcgacaagcagatgaagaaattcaaaggattgaagaggttttcactctctgctaaagtggtagatgatgaaatttactacttcagaaaaccaattgttcctcagaaggagccatcacctttgctggaaaagaagatccagttgctagaagctaaatttgccgagttagaaggtggagatgatgatattgaagagatgggagaagaagatagtgaggtcattgaacctccttctctacctcagcttcagacccccctggccagtgagctggacctcatgccctacacacccccacagtctaccccaaagtctgccaaaggcagtgcaaagaaggaaggctccaaacggaaaatcaacatgagtggctacatcctgttcagcagtgagatgagggctgtgattaaggcccaacacccagactactctttcggggagctcagccgcctggtggggacagaatggagaaatcttgagacagccaagaaagcagaatatgaaggcatgatgggtggctatccgccaggccttccacctttgcagggcccagttgatggccttgttagcatgggcagcatgcagccacttcaccctggggggcctccaccccaccatcttccgccaggtgtgcctggcctcccgggcatcccaccaccgggtgtgatgaaccaaggagtggcccctatggtagggactccagcaccaggtggaagtccatatggacaacaggtgggagttttggggcctccagggcagcaggcaccacctccatatcccggcccacatccagctggaccccctgtcatacagcagccaacaacacccatgtttgtagctcccccaccaaagacccagcggcttcttcactcagaggcctacctgaaatacattgaaggactcagtgcggagtccaacagcattagcaagtgggatcagacactggcagctcgaagacgcgacgtccatttgtcgaaagaacaggagagccgcctaccctctcactggctgaaaagcaaaggggcccacaccaccatggcagatgccctctggcgccttcgagatttgatgctccgggacaccctcaacattcgccaagcatacaacctagaaaatgtttaatcacatcattacgtttcttttatatagaagcataaagagttgtggatcagtagccattttagttactgggggtggggggaaggaacaaaggaggataatttttattgcattttactgtacatcacaaggccatttttatatacggacacttttaataagctatttcaatttgtttgttatattaagttgactttatcaaatacacaaagatttttttgcatatgtttccttcgtttaaaaccagtttcataattggttgtatatgtagacttggagttttatctttttacttgttgccatggaactgaaaccattagaggtttttgtcttggcttggggtttttgttttcttggttttgggtttttttatatatatatataaaagaacaaaatgaaaaaaaacacacacacacaagagtttacagattagtttaaattgataatgaaatgtgaagtttgtcctagtttacatcttagagaggggagtatacttgtgtttgtttcatgtgcctgaatatcttaagccactttctgcaaaagctgtttcttacagatgaagtgctttctttgaaaggtggttatttaggttttagatgtttaatagacacagcacatttgctctattaactcagaggctcactacagaaatatgtaatcagtgctgtgcatctgtctgcagctaatgtacctcctggacaccaggaggggaaaaagcactttttcaattgtgctgagttagacatctgtgagttagactatggtgtcagtgatttttgcagaacacgtgcacaaccctgaggtatgtttaatctaggcaggtacgtttaaggatattttgatctatttataatgaattcacaatttatgcctataaatttcagatgatttaaaattttaaacctgttacattgaaaaacattgaagttcgtcttgaagaaagcattaaggtatgcatggaggtgatttatttttaaacataacacctaacctaacatgggtaagagagtatggaactagatatgagctgtataagaagcataattgtgaacaagtagattgattgccttcatatacaagtatgttttagtattccttatttccttattatcagatgtattttttcttttaagtttcaatgttgttataattctcaaccagaaatttaatactttctaaaatattttttaaatttagcttgtgcttttgaattacaggagaagggaatcataatttaataaaacgcttactagaaagaccattacagatcccaaacacttgggtttggtgaccctgtctttcttatatgaccctacaataaacatttgaaggcagcataggatggcagacagtaggaacattgtttcacttggcggcatgtttttgaaacctgctttatagtaactgggtgattgccattgtggtagagcttccactgctgtttataatctgagagagttaatctcagaggatgcttttttccttttaatctgctatgaatcagtacccagatgtttaattactgtacttattaaatcatgagggcaaaagagtgtagaatggaaaaaagtctcttgtatctagatactttaaatatgggaggccctttaacttaattgcctttagtcaaccactggatttgaatttgcatcaagtattttaaataatattgaatttaaaaaaatgtattgcagtagtgtgtcagtaccttattgttaaagtgagtcagataaatcttcaattcctggctatttgggcaattgaatcatcatggactgtataatgcaatcagattattttgtttctagacatccttgaattacaccaaagaacatgaaatttagttgtggttaaattatttatttatttcatgcattcattttatttcccttaaggtctggatgagacttctttggggagcctctaaaaaaatttttcactgggggccacgtgggtcattagaagccagagctctcctccaggctccttcccagtgcctagaggtgctataggaaacatagatccagccaggggcttccctaaagcagtgcagcaccggcccagggcatcactagacaggccctaattaagttttttttaaaaagcctgtgtatttattttagaatcatgtttttctgtatattaacttgggggatatcgttaatatttaggatataagatttgaggtcagccatcttcaaaaaagaaaaaaaaattgactcaagaaagtacaagtaaactatacacctttttttcataagttttaggaactgtagtaatgtggcttagaaagtataatggcctaaatgttttcaaaatgtaagttcctgtggagaagaattgtttatattgcaaacggggggactgaggggaacctgtaggtttaaaacagtatgtttgtcagccaactgatttaaaaggcctttaactgttttggttgttgttttttttttaagccactctccccttcctatgaggaagaattgagaggggcacctatttctgtaaaatccccaaattggtgttgatgattttgagcttgaatgttttcatacctgattaaaacttggtttattctaatttctgtatcatatcatctgaggtttacgtggtaactagtcttataacatgtatgtatcttttttttgttgttcatctaaagctttttaatccaaataaatacagagtttgcaaagtgatttggattaaccagg

SEQ ID NO: 167211 - DNA, 5071 bp, Homo sapiens
  Payload ID: 12904
  Gene Symbol: PBRM1
  Gene Name: polybromo 1
  Uniprot ID: Q86U86
  ENST ID: ENST00000394830
  CDS Start-End: 101-4849
aggagcaatagcagcagccgtggcggccacggggcggggcgcggcggtcggtgaccgcggccggggctgcaggcggcggagcggctggaagttggattccatgggttccaagagaagaagagctacctccccttccagcagtgtcagcggggactttgatgatgggcaccattctgtgtcaacaccaggcccaagcaggaaaaggaggagactttccaatcttccaactgtagatcctattgccgtgtgccatgaactctataataccatccgagactataaggatgaacagggcagacttctctgtgagctcttcattagggcaccaaagcgaagaaatcaaccagactattatgaagtggtttctcagcccattgacttgatgaaaatccaacagaaactaaaaatggaagagtatgatgatgttaatttgctgactgctgacttccagcttctttttaacaatgcaaagtcctattataagccagattctcctgaatataaagccgcttgcaaactctgggatttgtaccttcgaacaagaaatgagtttgttcagaaaggagaagcagatgacgaagatgatgatgaagatgggcaagacaatcagggcacagtgactgaaggatcttctccagcttacttgaaggagatcctggagcagcttcttgaagccatagttgtagctacaaatccatcaggacgtctcattagcgaactttttcagaaactgccttctaaagtgcaatatccagattattatgcaataattaaggagcctatagatctcaagaccattgcccagaggatacagaatggaagctacaaaagtattcatgcaatggccaaagatatagatctcctcgcaaaaaatgccaaaacttataatgagcctggctctcaagtattcaaggatgcaaattcaattaaaaaaatattttatatgaaaaaggctgaaattgaacatcatgaaatggctaagtcaagtcttcgaatgaggactccatccaacttggctgcagccagactgacaggtccttcacacagtaaaggcagccttggtgaagagagaaatcccactagcaagtattaccgtaataaaagagcagtacaaggaggtcgtttatcagcaattacaatggcacttcaatatggctcagaaagtgaagaagatgctgctttagctgctgcacgctatgaagagggagagtcagaagcagaaagcatcacttcctttatggatgtttcaaatcctttttatcagctttatgacacagttaggagttgtcggaataaccaagggcagctaatagctgaacctttttaccatttgccttcaaagaaaaaataccctgattattaccagcaaattaaaatgcccatatcactacaacagatccgaacaaaactgaagaatcaagaatatgaaactttagatcatttggagtgtgatctgaatttaatgtttgaaaatgccaaacgctataatgtgcccaattcagccatctacaagcgagttctaaaattgcagcaagttatgcaggcaaagaagaaagagcttgccaggagagacgatatcgaggacggagacagcatgatctcttcagccacctctgatactggtagtgccaaaagaaaaagtaaaaagaacataagaaagcagcgaatgaaaatcttattcaatgttgttcttgaagctcgagagccaggttcaggcagaagactttgtgacctatttatggttaaaccatccaaaaaggactatcctgattattataaaatcatcttggagccaatggacttgaaaataattgagcataacatccgcaatgacaaatatgctggtgaagagggaatgatagaagacatgaagctgatgttccggaatgccaggcactataatgaggagggctcccaggtttataatgatgcacatatcctggagaagttactcaaggagaaaaggaaagagctgggcccactgcctgatgatgatgacatggcttctcccaaactcaagctgagtaggaagagtggcatttctcctaaaaaatcaaaatacatgactccaatgcagcagaaactaaatgaggtctatgaagctgtaaagaactatactgataagaggggtcgccgcctcagtgccatatttctgaggcttccctctagatctgagttgcctgactactatctgactattaaaaagcccatggacatggaaaaaattcgaagtcacatgatggccaacaagtaccaagatattgactctatggttgaggactttgtcatgatgtttaataatgcctgtacatacaatgagccggagtctttgatctacaaagatgctcttgttctacacaaagtcctgcttgaaacacgcagagacctggagggagatgaggactctcatgtcccaaatgtgactttgctgattcaagagcttatccacaatctttttgtgtcagtcatgagtcatcaggatgatgagggaagatgctacagcgattctttagcagaaattcctgctgtggatcccaactttcctaacaaaccaccccttacatttgacataattaggaagaatgttgaaaataatcgctaccgtcggcttgatttatttcaagagcatatgtttgaagtattggaacgagcaagaaggatgaatcggacagattcagaaatatatgaagatgcagtagaacttcagcagttttttattaaaattcgtgatgaactctgcaaaaatggagagattcttctttcaccggcactcagctataccacaaaacatttgcataatgatgtggagaaagagagaaaggaaaaattgccaaaagaaatagaggaagataaactaaaacgagaagaagaaaaaagagaagctgaaaagagtgaagattcctctggtgctgcaggcctctcaggcttacatcgcacatacagccaggactgtagctttaaaaacagcatgtaccatgttggagattacgtctatgtggaacctgcagaggccaacctacaaccacatatcgtctgtattgaaagactgtgggaggattcagctgaaaaagaagtttttaagagtgactattacaacaaagttccagttagtaaaattctaggcaagtgtgtggtcatgtttgtcaaggaatactttaagttatgcccagaaaacttccgagatgaggatgtttttgtctgtgaatcacggtattctgccaaaaccaaatcttttaagaaaattaaactgtggaccatgcccatcagctcagtcaggtttgtccctcgggatgtgcctctgcctgtggttcgcgtggcctctgtatttgcaaatgcagataaaggtgatgatgagaagaatacagacaactcagaggacagtcgagctgaagacaattttaacttggaaaaggaaaaagaagatgtccctgtggaaatgtccaatggtgaaccaggttgccactactttgagcagctccattacaatgacatgtggctgaaggttggcgactgtgtcttcatcaagtcccatggcctggtgcgtcctcgtgtgggcagaattgaaaaagtatgggttcgagatggagctgcatatttttatggccccatcttcattcacccagaagaaacagagcatgagcccacaaaaatgttctacaaaaaagaagtatttctgagtaatctggaagaaacctgccccatgacatgtattctcggaaagtgtgctgtgttgtcattcaaggacttcctctcctgcaggccaactgaaataccagaaaatgacattctgctttgtgagagccgctacaatgagagcgacaagcagatgaagaaattcaaaggattgaagaggttttcactctctgctaaagtggtagatgatgaaatttactacttcagaaaaccaattgttcctcagaaggagccatcacctttgctggaaaagaagatccagttgctagaagctaaatttgccgagttagaaggtggagatgatgatattgaagagatgggagaagaagatagtgagtctaccccaaagtctgccaaaggcagtgcaaagaaggaaggctccaaacggaaaatcaacatgagtggctacatcctgttcagcagtgagatgagggctgtgattaaggcccaacacccagactactctttcggggagctcagccgcctggtggggacagaatggagaaatcttgagacagccaagaaagcagaatatgaaggcatgatgggtggctatccgccaggccttccacctttgcagggcccagttgatggccttgttagcatgggcagcatgcagccacttcaccctggggggcctccaccccaccatcttccgccaggtgtgcctggcctcccgggcatcccaccaccgggtgtgatgaaccaaggagtggcccctatggtagggactccagcaccaggtggaagtccatatggacaacaggtgggagttttggggcctccagggcagcaggcaccacctccatatcccggcccacatccagctggaccccctgtcatacagcagccaacaacacccatgtttgtagctcccccaccaaagacccagcggcttcttcactcagaggcctacctgaaatacattgaaggactcagtgcggagtccaacagcattagcaagtgggatcagacactggcagctcgaagacgcgacgtccatttgtcgaaagaacaggagagccgcctaccctctcactggctgaaaagcaaaggggcccacaccaccatggcagatgccctctggcgccttcgagatttgatgctccgggacaccctcaacattcgccaagcatacaacctagaaaatgtttaatcacatcattacgtttcttttatatagaagcataaagagttgtggatcagtagccattttagttactgggggtggggggaaggaacaaaggaggataatttttattgcattttactgtacatcacaaggccatttttatatacggacacttttaataagctatttcaatttgtttgttatattaagttgactttatcaaatacacaaagatttttttgcata

SEQ ID NO: 167212 - DNA, 4905 bp, Homo sapiens
  Payload ID: 12904
  Gene Symbol: PBRM1
  Gene Name: polybromo 1
  Uniprot ID: Q86U86
  ENST ID: ENST00000410007
  CDS Start-End: 4-4833
tccatgggttccaagagaagaagagctacctccccttccagcagtgtcagcggggactttgatgatgggcaccattctgtgtcaacaccaggcccaagcaggaaaaggaggagactttccaatcttccaactgtagatcctattgccgtgtgccatgaactctataataccatccgagactataaggatgaacagggcagacttctctgtgagctcttcattagggcaccaaagcgaagaaatcaaccagactattatgaagtggtttctcagcccattgacttgatgaaaatccaacagaaactaaaaatggaagagtatgatgatgttaatttgctgactgctgacttccagcttctttttaacaatgcaaagtcctattataagccagattctcctgaatataaagccgcttgcaaactctgggatttgtaccttcgaacaagaaatgagtttgttcagaaaggagaagcagatgacgaagatgatgatgaagatgggcaagacaatcagggcacagtgactgaaggatcttctccagcttacttgaaggagatcctggagcagcttcttgaagccatagttgtagctacaaatccatcaggacgtctcattagcgaactttttcagaaactgccttctaaagtgcaatatccagattattatgcaataattaaggagcctatagatctcaagaccattgcccagaggatacagaatggaagctacaaaagtattcatgcaatggccaaagatatagatctcctcgcaaaaaatgccaaaacttataatgagcctggctctcaagtattcaaggatgcaaattcaattaaaaaaatattttatatgaaaaaggctgaaattgaacatcatgaaatggctaagtcaagtcttcgaatgaggactccatccaacttggctgcagccagactgacaggtccttcacacagtaaaggcagccttggtgaagagagaaatcccactagcaagtattaccgtaataaaagagcagtacaaggaggtcgtttatcagcaattacaatggcacttcaatatggctcagaaagtgaagaagatgctgctttagctgctgcacgctatgaagagggagagtcagaagcagaaagcatcacttcctttatggatgtttcaaatcctttttatcagctttatgacacagttaggagttgtcggaataaccaagggcagctaatagctgaacctttttaccatttgccttcaaagaaaaaataccctgattattaccagcaaattaaaatgcccatatcactacaacagatccgaacaaaactgaagaatcaagaatatgaaactttagatcatttggagtgtgatctgaatttaatgtttgaaaatgccaaacgctataatgtgcccaattcagccatctacaagcgagttctaaaattgcagcaagttatgcaggcaaagaagaaagagcttgccaggagagacgatatcgaggacggagacagcatgatctcttcagccacctctgatactggtagtgccaaaagaaaaagtaaaaagaacataagaaagcagcgaatgaaaatcttattcaatgttgttcttgaagctcgagagccaggttcaggcagaagactttgtgacctatttatggttaaaccatccaaaaaggactatcctgattattataaaatcatcttggagccaatggacttgaaaataattgagcataacatccgcaatgacaaatatgctggtgaagagggaatgatagaagacatgaagctgatgttccggaatgccaggcactataatgaggagggctcccaggtttataatgatgcacatatcctggagaagttactcaaggagaaaaggaaagagctgggcccactgcctgatgatgatgacatggcttctcccaaactcaagctgagtaggaagagtggcatttctcctaaaaaatcaaaatacatgactccaatgcagcagaaactaaatgaggtctatgaagctgtaaagaactatactgataagaggggtcgccgcctcagtgccatatttctgaggcttccctctagatctgagttgcctgactactatctgactattaaaaagcccatggacatggaaaaaattcgaagtcacatgatggccaacaagtaccaagatattgactctatggttgaggactttgtcatgatgtttaataatgcctgtacatacaatgagccggagtctttgatctacaaagatgctcttgttctacacaaagtcctgcttgaaacacgcagagacctggagggagatgaggactctcatgtcccaaatgtgactttgctgattcaagagcttatccacaatctttttgtgtcagtcatgagtcatcaggatgatgagggaagatgctacagcgattctttagcagaaattcctgctgtggatcccaactttcctaacaaaccaccccttacatttgacataattaggaagaatgttgaaaataatcgctaccgtcggcttgatttatttcaagagcatatgtttgaagtattggaacgagcaagaaggatgaatcggacagattcagaaatatatgaagatgcagtagaacttcagcagttttttattaaaattcgtgatgaactctgcaaaaatggagagattcttctttcaccggcactcagctataccacaaaacatttgcataatgatgtggagaaagagagaaaggaaaaattgccaaaagaaatagaggaagataaactaaaacgagaagaagaaaaaagagaagctgaaaagagtgaagattcctctggtgctgcaggcctctcaggcttacatcgcacatacagccaggactgtagctttaaaaacagcatgtaccatgttggagattacgtctatgtggaacctgcagaggccaacctacaaccacatatcgtctgtattgaaagactgtgggaggattcagctgaaaaagaagtttttaagagtgactattacaacaaagttccagttagtaaaattctaggcaagtgtgtggtcatgtttgtcaaggaatactttaagttatgcccagaaaacttccgagatgaggatgtttttgtctgtgaatcacggtattctgccaaaaccaaatcttttaagaaaattaaactgtggaccatgcccatcagctcagtcaggtttgtccctcgggatgtgcctctgcctgtggttcgcgtggcctctgtatttgcaaatgcagataaaggtgatgatgagaagaatacagacaactcagaggacagtcgagctgaagacaattttaacttggaaaaggaaaaagaagatgtccctgtggaaatgtccaatggtgaaccaggttgccactactttgagcagctccattacaatgacatgtggctgaaggttggcgactgtgtcttcatcaagtcccatggcctggtgcgtcctcgtgtgggcagaattgaaaaagtatgggttcgagatggagctgcatatttttatggccccatcttcattcacccagaagaaacagagcatgagcccacaaaaatgttctacaaaaaagaagtatttctgagtaatctggaagaaacctgccccatgacatgtattctcggaaagtgtgctgtgttgtcattcaaggacttcctctcctgcaggccaactgaaataccagaaaatgacattctgctttgtgagagccgctacaatgagagcgacaagcagatgaagaaattcaaaggattgaagaggttttcactctctgctaaagtggtagatgatgaaatttactacttcagaaaaccaattgttcctcagaaggagccatcacctttgctggaaaagaagatccagttgctagaagctaaatttgccgagttagaaggtggagatgatgatattgaagagatgggagaagaagatagtgaggtcattgaacctccttctctacctcagcttcagacccccctggccagtgagctggacctcatgccctacacacccccacagtctaccccaaagtctgccaaaggcagtgcaaagaaggaaggctccaaacggaaaatcaacatgagtggctacatcctgttcagcagtgagatgagggctgtgattaaggcccaacacccagactactctttcggggagctcagccgcctggtggggacagaatggagaaatcttgagacagccaagaaagcagaatatgaaggcatgatgggtggctatccgccaggccttccacctttgcagggcccagttgatggccttgttagcatgggcagcatgcagccacttcaccctggggggcctccaccccaccatcttccgccaggtgtgcctggcctcccgggcatcccaccaccgggtgtgatgaaccaaggagtggcccctatggtagggactccagcaccaggtggaagtccatatggacaacaggtgggagttttggggcctccagggcagcaggcaccacctccatatcccggcccacatccagctggaccccctgtcatacagcagccaacaacacccatgtttgtagctcccccaccaaagacccagcggcttcttcactcagaggcctacctgaaatacattgaaggactcagtgcggagtccaacagcattagcaagtgggatcagacactggcagctcgaagacgcgacgtccatttgtcgaaagaacaggagagccgcctaccctctcactggctgaaaagcaaaggggcccacaccaccatggcagatgccctctggcgccttcgagatttgatgctccgggacaccctcaacattcgccaagcatacaacctagaaaatgtttaatcacatcattacgtttcttttatatagaagcataaagagttgtggatcagtagccattttagttactggggg

SEQ ID NO: 167213 - DNA, 4980 bp, Homo sapiens
  Payload ID: 12904
  Gene Symbol: PBRM1
  Gene Name: polybromo 1
  Uniprot ID: Q86U86
  ENST ID: ENST00000409057
  CDS Start-End: 4-4908
tccatgggttccaagagaagaagagctacctccccttccagcagtgtcagcggggactttgatgatgggcaccattctgtgtcaacaccaggcccaagcaggaaaaggaggagactttccaatcttccaactgtagatcctattgccgtgtgccatgaactctataataccatccgagactataaggatgaacagggcagacttctctgtgagctcttcattagggcaccaaagcgaagaaatcaaccagactattatgaagtggtttctcagcccattgacttgatgaaaatccaacagaaactaaaaatggaagagtatgatgatgttaatttgctgactgctgacttccagcttctttttaacaatgcaaagtcctattataagccagattctcctgaatataaagccgcttgcaaactctgggatttgtaccttcgaacaagaaatgagtttgttcagaaaggagaagcagatgacgaagatgatgatgaagatgggcaagacaatcagggcacagtgactgaaggatcttctccagcttacttgaaggagatcctggagcagcttcttgaagccatagttgtagctacaaatccatcaggacgtctcattagcgaactttttcagaaactgccttctaaagtgcaatatccagattattatgcaataattaaggagcctatagatctcaagaccattgcccagaggatacagaatggaagctacaaaagtattcatgcaatggccaaagatatagatctcctcgcaaaaaatgccaaaacttataatgagcctggctctcaagtattcaaggatgcaaattcaattaaaaaaatattttatatgaaaaaggctgaaattgaacatcatgaaatggctaagtcaagtcttcgaatgaggactccatccaacttggctgcagccagactgacaggtccttcacacagtaaaggcagccttggtgaagagagaaatcccactagcaagtattaccgtaataaaagagcagtacaaggaggtcgtttatcagcaattacaatggcacttcaatatggctcagaaagtgaagaagatgctgctttagctgctgcacgctatgaagagggagagtcagaagcagaaagcatcacttcctttatggatgtttcaaatcctttttatcagctttatgacacagttaggagttgtcggaataaccaagggcagctaatagctgaacctttttaccatttgccttcaaagaaaaaataccctgattattaccagcaaattaaaatgcccatatcactacaacagatccgaacaaaactgaagaatcaagaatatgaaactttagatcatttggagtgtgatctgaatttaatgtttgaaaatgccaaacgctataatgtgcccaattcagccatctacaagcgagttctaaaattgcagcaagttatgcaggcaaagaagaaagagcttgccaggagagacgatatcgaggacggagacagcatgatctcttcagccacctctgatactggtagtgccaaaagaaaaagtaaaaagaacataagaaagcagcgaatgaaaatcttattcaatgttgttcttgaagctcgagagccaggttcaggcagaagactttgtgacctatttatggttaaaccatccaaaaaggactatcctgattattataaaatcatcttggagccaatggacttgaaaataattgagcataacatccgcaatgacaaatatgctggtgaagagggaatgatagaagacatgaagctgatgttccggaatgccaggcactataatgaggagggctcccaggtttataatgatgcacatatcctggagaagttactcaaggagaaaaggaaagagctgggcccactgcctgatgatgatgacatggcttctcccaaactcaagctgagtaggaagagtggcatttctcctaaaaaatcaaaatacatgactccaatgcagcagaaactaaatgaggtctatgaagctgtaaagaactatactgataagaggggtcgccgcctcagtgccatatttctgaggcttccctctagatctgagttgcctgactactatctgactattaaaaagcccatggacatggaaaaaattcgaagtcacatgatggccaacaagtaccaagatattgactctatggttgaggactttgtcatgatgtttaataatgcctgtacatacaatgagccggagtctttgatctacaaagatgctcttgttctacacaaagtcctgcttgaaacacgcagagacctggagggagatgaggactctcatgtcccaaatgtgactttgctgattcaagagcttatccacaatctttttgtgtcagtcatgagtcatcaggatgatgagggaagatgctacagcgattctttagcagaaattcctgctgtggatcccaactttcctaacaaaccaccccttacatttgacataattaggaagaatgttgaaaataatcgctaccgtcggcttgatttatttcaagagcatatgtttgaagtattggaacgagcaagaaggatgaatcggacagattcagaaatatatgaagatgcagtagaacttcagcagttttttattaaaattcgtgatgaactctgcaaaaatggagagattcttctttcaccggcactcagctataccacaaaacatttgcataatgatgtggagaaagagagaaaggaaaaattgccaaaagaaatagaggaagataaactaaaacgagaagaagaaaaaagagaagctgaaaagagtgaagattcctctggtgctgcaggcctctcaggcttacatcgcacatacagccaggactgtagctttaaaaacagcatgtaccatgttggagattacgtctatgtggaacctgcagaggccaacctacaaccacatatcgtctgtattgaaagactgtgggaggattcagctggtgaaaaatggttgtatggctgttggttttaccgaccaaatgaaacattccacctggctacacgaaaatttctagaaaaagaagtttttaagagtgactattacaacaaagttccagttagtaaaattctaggcaagtgtgtggtcatgtttgtcaaggaatactttaagttatgcccagaaaacttccgagatgaggatgtttttgtctgtgaatcacggtattctgccaaaaccaaatcttttaagaaaattaaactgtggaccatgcccatcagctcagtcaggtttgtccctcgggatgtgcctctgcctgtggttcgcgtggcctctgtatttgcaaatgcagataaaggtgatgatgagaagaatacagacaactcagaggacagtcgagctgaagacaattttaacttggaaaaggaaaaagaagatgtccctgtggaaatgtccaatggtgaaccaggttgccactactttgagcagctccattacaatgacatgtggctgaaggttggcgactgtgtcttcatcaagtcccatggcctggtgcgtcctcgtgtgggcagaattgaaaaagtatgggttcgagatggagctgcatatttttatggccccatcttcattcacccagaagaaacagagcatgagcccacaaaaatgttctacaaaaaagaagtatttctgagtaatctggaagaaacctgccccatgacatgtattctcggaaagtgtgctgtgttgtcattcaaggacttcctctcctgcaggccaactgaaataccagaaaatgacattctgctttgtgagagccgctacaatgagagcgacaagcagatgaagaaattcaaaggattgaagaggttttcactctctgctaaagtggtagatgatgaaatttactacttcagaaaaccaattgttcctcagaaggagccatcacctttgctggaaaagaagatccagttgctagaagctaaatttgccgagttagaaggtggagatgatgatattgaagagatgggagaagaagatagtgaggtcattgaacctccttctctacctcagcttcagacccccctggccagtgagctggacctcatgccctacacacccccacagtctaccccaaagtctgccaaaggcagtgcaaagaaggaaggctccaaacggaaaatcaacatgagtggctacatcctgttcagcagtgagatgagggctgtgattaaggcccaacacccagactactctttcggggagctcagccgcctggtggggacagaatggagaaatcttgagacagccaagaaagcagaatatgaaggcatgatgggtggctatccgccaggccttccacctttgcagggcccagttgatggccttgttagcatgggcagcatgcagccacttcaccctggggggcctccaccccaccatcttccgccaggtgtgcctggcctcccgggcatcccaccaccgggtgtgatgaaccaaggagtggcccctatggtagggactccagcaccaggtggaagtccatatggacaacaggtgggagttttggggcctccagggcagcaggcaccacctccatatcccggcccacatccagctggaccccctgtcatacagcagccaacaacacccatgtttgtagctcccccaccaaagacccagcggcttcttcactcagaggcctacctgaaatacattgaaggactcagtgcggagtccaacagcattagcaagtgggatcagacactggcagctcgaagacgcgacgtccatttgtcgaaagaacaggagagccgcctaccctctcactggctgaaaagcaaaggggcccacaccaccatggcagatgccctctggcgccttcgagatttgatgctccgggacaccctcaacattcgccaagcatacaacctagaaaatgtttaatcacatcattacgtttcttttatatagaagcataaagagttgtggatcagtagccattttagttactggggg

SEQ ID NO: 167214 - DNA, 4849 bp, Homo sapiens
  Payload ID: 12904
  Gene Symbol: PBRM1
  Gene Name: polybromo 1
  Uniprot ID: Q86U86
  ENST ID: ENST00000409767
  CDS Start-End: 4-4797
tccatgggttccaagagaagaagagctacctccccttccagcagtgtcagcggggactttgatgatgggcaccattctgtgtcaacaccaggcccaagcaggaaaaggaggagactttccaatcttccaactgtagatcctattgccgtgtgccatgaactctataataccatccgagactataaggatgaacagggcagacttctctgtgagctcttcattagggcaccaaagcgaagaaatcaaccagactattatgaagtggtttctcagcccattgacttgatgaaaatccaacagaaactaaaaatggaagagtatgatgatgttaatttgctgactgctgacttccagcttctttttaacaatgcaaagtcctattataagccagattctcctgaatataaagccgcttgcaaactctgggatttgtaccttcgaacaagaaatgagtttgttcagaaaggagaagcagatgacgaagatgatgatgaagatgggcaagacaatcagggcacagtgactgaaggatcttctccagcttacttgaaggagatcctggagcagcttcttgaagccatagttgtagctacaaatccatcaggacgtctcattagcgaactttttcagaaactgccttctaaagtgcaatatccagattattatgcaataattaaggagcctatagatctcaagaccattgcccagaggatacagaatggaagctacaaaagtattcatgcaatggccaaagatatagatctcctcgcaaaaaatgccaaaacttataatgagcctggctctcaagtattcaaggatgcaaattcaattaaaaaaatattttatatgaaaaaggctgaaattgaacatcatgaaatggctaagtcaagtcttcgaatgaggactccatccaacttggctgcagccagactgacaggtccttcacacagtaaaggcagccttggtgaagagagaaatcccactagcaagtattaccgtaataaaagagcagtacaaggaggtcgtttatcagcaattacaatggcacttcaatatggctcagaaagtgaagaagatgctgctttagctgctgcacgctatgaagagggagagtcagaagcagaaagcatcacttcctttatggatgtttcaaatcctttttatcagctttatgacacagttaggagttgtcggaataaccaagggcagctaatagctgaacctttttaccatttgccttcaaagaaaaaataccctgattattaccagcaaattaaaatgcccatatcactacaacagatccgaacaaaactgaagaatcaagaatatgaaactttagatcatttggagtgtgatctgaatttaatgtttgaaaatgccaaacgctataatgtgcccaattcagccatctacaagcgagttctaaaattgcagcaagttatgcaggcaaagaagaaagagcttgccaggagagacgatatcgaggacggagacagcatgatctcttcagccacctctgatactggtagtgccaaaagaaaaaggaacactcatgacagtgagatgttgggtctcaggaggctatccagtaaaaagaacataagaaagcagcgaatgaaaatcttattcaatgttgttcttgaagctcgagagccaggttcaggcagaagactttgtgacctatttatggttaaaccatccaaaaaggactatcctgattattataaaatcatcttggagccaatggacttgaaaataattgagcataacatccgcaatgacaaatatgctggtgaagagggaatgatagaagacatgaagctgatgttccggaatgccaggcactataatgaggagggctcccaggtttataatgatgcacatatcctggagaagttactcaaggagaaaaggaaagagctgggcccactgcctgatgatgatgacatggcttctcccaaactcaagctgagtaggaagagtggcatttctcctaaaaaatcaaaatacatgactccaatgcagcagaaactaaatgaggtctatgaagctgtaaagaactatactgataagaggggtcgccgcctcagtgccatatttctgaggcttccctctagatctgagttgcctgactactatctgactattaaaaagcccatggacatggaaaaaattcgaagtcacatgatggccaacaagtaccaagatattgactctatggttgaggactttgtcatgatgtttaataatgcctgtacatacaatgagccggagtctttgatctacaaagatgctcttgttctacacaaagtcctgcttgaaacacgcagagacctggagggagatgaggactctcatgtcccaaatgtgactttgctgattcaagagcttatccacaatctttttgtgtcagtcatgagtcatcaggatgatgagggaagatgctacagcgattctttagcagaaattcctgctgtggatcccaactttcctaacaaaccaccccttacatttgacataattaggaagaatgttgaaaataatcgctaccgtcggcttgatttatttcaagagcatatgtttgaagtattggaacgagcaagaaggatgaatcggacagattcagaaatatatgaagatgcagtagaacttcagcagttttttattaaaattcgtgatgaactctgcaaaaatggagagattcttctttcaccggcactcagctataccacaaaacatttgcataatgatgtggagaaagagagaaaggaaaaattgccaaaagaaatagaggaagataaactaaaacgagaagaagaaaaaagagaagctgaaaagagtgaagattcctctggtgctgcaggcctctcaggcttacatcgcacatacagccaggactgtagctttaaaaacagcatgtaccatgttggagattacgtctatgtggaacctgcagaggccaacctacaaccacatatcgtctgtattgaaagactgtgggaggattcagctggtgaaaaatggttgtatggctgttggttttaccgaccaaatgaaacattccacctggctacacgaaaatttctagaaaaagaagtttttaagagtgactattacaacaaagttccagttagtaaaattctaggcaagtgtgtggtcatgtttgtcaaggaatactttaagttatgcccagaaaacttccgagatgaggatgtttttgtctgtgaatcacggtattctgccaaaaccaaatcttttaagaaaattaaactgtggaccatgcccatcagctcagtcaggtttgtccctcgggatgtgcctctgcctgtggttcgcgtggcctctgtatttgcaaatgcagataaaggtgatgatgagaagaatacagacaactcagaggacagtcgagctgaagacaattttaacttggaaaaggaaaaagaagatgtccctgtggaaatgtccaatggtgaaccaggttgccactactttgagcagctccattacaatgacatgtggctgaaggttggcgactgtgtcttcatcaagtcccatggcctggtgcgtcctcgtgtgggcagaattgaaaaagtatgggttcgagatggagctgcatatttttatggccccatcttcattcacccagaagaaacagagcatgagcccacaaaaatgttctacaaaaaagaagtatttctgagtaatctggaagaaacctgccccatgacatgtattctcggaaagtgtgctgtgttgtcattcaaggacttcctctcctgcaggccaactgaaataccagaaaatgacattctgctttgtgagagccgctacaatgagagcgacaagcagatgaagaaattcaaaggattgaagaggttttcactctctgctaaagtggtagatgatgaaatttactacttcagaaaaccaattgttcctcagaaggagccatcacctttgctggaaaagaagatccagttgctagaagctaaatttgccgagttagaaggtggagatgatgatattgaagagatgggagaagaagatagtgaggtcattgaacctccttctctacctcagcttcagacccccctggccagtgagctggacctcatgccctacacacccccacagtctaccccaaagtctgccaaaggcagtgcaaagaaggaaggctccaaacggaaaatcaacatgagtggctacatcctgttcagcagtgagatgagggctgtgattaaggcccaacacccagactactctttcggggagctcagccgcctggtggggacagaatggagaaatcttgagacagccaagaaagcagaatatgaaggtgtgatgaaccaaggagtggcccctatggtagggactccagcaccaggtggaagtccatatggacaacaggtgggagttttggggcctccagggcagcaggcaccacctccatatcccggcccacatccagctggaccccctgtcatacagcagccaacaacacccatgtttgtagctcccccaccaaagacccagcggcttcttcactcagaggcctacctgaaatacattgaaggactcagtgcggagtccaacagcattagcaagtgggatcagacactggcagctcgaagacgcgacgtccatttgtcgaaagaacaggagagccgcctaccctctcactggctgaaaagcaaaggggcccacaccaccatggcagatgccctctggcgccttcgagatttgatgctccgggacaccctcaacattcgccaagcatacaacctagaaaatgtttaatcacatcattacgtttcttttatatagaagcataaagagttgtggatcagta

SEQ ID NO: 167215 - DNA, 5015 bp, Homo sapiens
  Payload ID: 12904
  Gene Symbol: PBRM1
  Gene Name: polybromo 1
  Uniprot ID: Q86U86
  ENST ID: ENST00000409114
  CDS Start-End: 4-4962
tccatgggttccaagagaagaagagctacctccccttccagcagtgtcagcggggactttgatgatgggcaccattctgtgtcaacaccaggcccaagcaggaaaaggaggagactttccaatcttccaactgtagatcctattgccgtgtgccatgaactctataataccatccgagactataaggatgaacagggcagacttctctgtgagctcttcattagggcaccaaagcgaagaaatcaaccagactattatgaagtggtttctcagcccattgacttgatgaaaatccaacagaaactaaaaatggaagagtatgatgatgttaatttgctgactgctgacttccagcttctttttaacaatgcaaagtcctattataagccagattctcctgaatataaagccgcttgcaaactctgggatttgtaccttcgaacaagaaatgagtttgttcagaaaggagaagcagatgacgaagatgatgatgaagatgggcaagacaatcagggcacagtgactgaaggatcttctccagcttacttgaaggagatcctggagcagcttcttgaagccatagttgtagctacaaatccatcaggacgtctcattagcgaactttttcagaaactgccttctaaagtgcaatatccagattattatgcaataattaaggagcctatagatctcaagaccattgcccagaggatacagaatggaagctacaaaagtattcatgcaatggccaaagatatagatctcctcgcaaaaaatgccaaaacttataatgagcctggctctcaagtattcaaggatgcaaattcaattaaaaaaatattttatatgaaaaaggctgaaattgaacatcatgaaatggctaagtcaagtcttcgaatgaggactccatccaacttggctgcagccagactgacaggtccttcacacagtaaaggcagccttggtgaagagagaaatcccactagcaagtattaccgtaataaaagagcagtacaaggaggtcgtttatcagcaattacaatggcacttcaatatggctcagaaagtgaagaagatgctgctttagctgctgcacgctatgaagagggagagtcagaagcagaaagcatcacttcctttatggatgtttcaaatcctttttatcagctttatgacacagttaggagttgtcggaataaccaagggcagctaatagctgaacctttttaccatttgccttcaaagaaaaaataccctgattattaccagcaaattaaaatgcccatatcactacaacagatccgaacaaaactgaagaatcaagaatatgaaactttagatcatttggagtgtgatctgaatttaatgtttgaaaatgccaaacgctataatgtgcccaattcagccatctacaagcgagttctaaaattgcagcaagttatgcaggcaaagaagaaagagcttgccaggagagacgatatcgaggacggagacagcatgatctcttcagccacctctgatactggtagtgccaaaagaaaaaggaacactcatgacagtgagatgttgggtctcaggaggctatccagtaaaaagaacataagaaagcagcgaatgaaaatcttattcaatgttgttcttgaagctcgagagccaggttcaggcagaagactttgtgacctatttatggttaaaccatccaaaaaggactatcctgattattataaaatcatcttggagccaatggacttgaaaataattgagcataacatccgcaatgacaaatatgctggtgaagagggaatgatagaagacatgaagctgatgttccggaatgccaggcactataatgaggagggctcccaggtttataatgatgcacatatcctggagaagttactcaaggagaaaaggaaagagctgggcccactgcctgatgatgatgacatggcttctcccaaactcaagctgagtaggaagagtggcatttctcctaaaaaatcaaaatacatgactccaatgcagcagaaactaaatgaggtctatgaagctgtaaagaactatactgataagaggggtcgccgcctcagtgccatatttctgaggcttccctctagatctgagttgcctgactactatctgactattaaaaagcccatggacatggaaaaaattcgaagtcacatgatggccaacaagtaccaagatattgactctatggttgaggactttgtcatgatgtttaataatgcctgtacatacaatgagccggagtctttgatctacaaagatgctcttgttctacacaaagtcctgcttgaaacacgcagagacctggagggagatgaggactctcatgtcccaaatgtgactttgctgattcaagagcttatccacaatctttttgtgtcagtcatgagtcatcaggatgatgagggaagatgctacagcgattctttagcagaaattcctgctgtggatcccaactttcctaacaaaccaccccttacatttgacataattaggaagaatgttgaaaataatcgctaccgtcggcttgatttatttcaagagcatatgtttgaagtattggaacgagcaagaaggatgaatcggacagattcagaaatatatgaagatgcagtagaacttcagcagttttttattaaaattcgtgatgaactctgcaaaaatggagagattcttctttcaccggcactcagctataccacaaaacatttgcataatgatgtggagaaagagagaaaggaaaaattgccaaaagaaatagaggaagataaactaaaacgagaagaagaaaaaagagaagctgaaaagagtgaagattcctctggtgctgcaggcctctcaggcttacatcgcacatacagccaggactgtagctttaaaaacagcatgtaccatgttggagattacgtctatgtggaacctgcagaggccaacctacaaccacatatcgtctgtattgaaagactgtgggaggattcagctggtgaaaaatggttgtatggctgttggttttaccgaccaaatgaaacattccacctggctacacgaaaatttctagaaaaagaagtttttaagagtgactattacaacaaagttccagttagtaaaattctaggcaagtgtgtggtcatgtttgtcaaggaatactttaagttatgcccagaaaacttccgagatgaggatgtttttgtctgtgaatcacggtattctgccaaaaccaaatcttttaagaaaattaaactgtggaccatgcccatcagctcagtcaggtttgtccctcgggatgtgcctctgcctgtggttcgcgtggcctctgtatttgcaaatgcagataaaggtgatgatgagaagaatacagacaactcagaggacagtcgagctgaagacaattttaacttggaaaaggaaaaagaagatgtccctgtggaaatgtccaatggtgaaccaggttgccactactttgagcagctccattacaatgacatgtggctgaaggttggcgactgtgtcttcatcaagtcccatggcctggtgcgtcctcgtgtgggcagaattgaaaaagtatgggttcgagatggagctgcatatttttatggccccatcttcattcacccagaagaaacagagcatgagcccacaaaaatgttctacaaaaaagaagtatttctgagtaatctggaagaaacctgccccatgacatgtattctcggaaagtgtgctgtgttgtcattcaaggacttcctctcctgcaggccaactgaaataccagaaaatgacattctgctttgtgagagccgctacaatgagagcgacaagcagatgaagaaattcaaaggattgaagaggttttcactctctgctaaagtggtagatgatgaaatttactacttcagaaaaccaattgttcctcagaaggagccatcacctttgctggaaaagaagatccagttgctagaagctaaatttgccgagttagaaggtggagatgatgatattgaagagatgggagaagaagatagtgaggtcattgaacctccttctctacctcagcttcagacccccctggccagtgagctggacctcatgccctacacacccccacagtctaccccaaagtctgccaaaggcagtgcaaagaaggaaggctccaaacggaaaatcaacatgagtggctacatcctgttcagcagtgagatgagggctgtgattaaggcccaacacccagactactctttcggggagctcagccgcctggtggggacagaatggagaaatcttgagacagccaagaaagcagaatatgaagagcgggcagctaaagttgctgagcagcaggagagagagcgagcagcacagcaacagcagccgagtgcttctccccgagcaggcacccctgtgggggctctcatgggggtggtgccaccaccaacaccaatggggatgctcaatcagcagttgacacctgttgcaggtgtgatgaaccaaggagtggcccctatggtagggactccagcaccaggtggaagtccatatggacaacaggtgggagttttggggcctccagggcagcaggcaccacctccatatcccggcccacatccagctggaccccctgtcatacagcagccaacaacacccatgtttgtagctcccccaccaaagacccagcggcttcttcactcagaggcctacctgaaatacattgaaggactcagtgcggagtccaacagcattagcaagtgggatcagacactggcagctcgaagacgcgacgtccatttgtcgaaagaacaggagagccgcctaccctctcactggctgaaaagcaaaggggcccacaccaccatggcagatgccctctggcgccttcgagatttgatgctccgggacaccctcaacattcgccaagcatacaacctagaaaatgtttaatcacatcattacgtttcttttatatagaagcataaagagttgtggatcagtag

SEQ ID NO: 167216 - DNA, 4385 bp, Homo sapiens
  Payload ID: 12904
  Gene Symbol: PBRM1
  Gene Name: polybromo 1
  ENST ID: ENST00000423351
  CDS Start-End: 4-4385
tccatgggttccaagagaagaagagctacctccccttccagcagtgtcagcggggactttgatgatgggcaccattctgtgtcaacaccaggcccaagcaggaaaaggaggagactttccaatcttccaactgtagatcctattgccgtgtgccatgaactctataataccatccgagactataaggatgaacagggcagacttctctgtgagctcttcattagggcaccaaagcgaagaaatcaaccagactattatgaagtggtttctcagcccattgacttgatgaaaatccaacagaaactaaaaatggaagagtatgatgatgttaatttgctgactgctgacttccagcttctttttaacaatgcaaagtcctattataagccagattctcctgaatataaagccgcttgcaaactctgggatttgtaccttcgaacaagaaatgagtttgttcagaaaggagaagcagatgacgaagatgatgatgaagatgggcaagacaatcagggcacagtgactgaaggatcttctccagcttacttgaaggagatcctggagcagcttcttgaagccatagttgtagctacaaatccatcaggacgtctcattagcgaactttttcagaaactgccttctaaagtgcaatatccagattattatgcaataattaaggagcctatagatctcaagaccattgcccagaggatacagaatggaagctacaaaagtattcatgcaatggccaaagatatagatctcctcgcaaaaaatgccaaaacttataatgagcctggctctcaagtattcaaggatgcaaattcaattaaaaaaatattttatatgaaaaaggctgaaattgaacatcatgaaatggctaagtcaagtcttcgaatgaggactccatccaacttggctgcagccagactgacaggtccttcacacagtaaaggcagccttggtgaagagagaaatcccactagcaagtattaccgtaataaaagagcagtacaaggaggtcgtttatcagcaattacaatggcacttcaatatggctcagaaagtgaagaagatgctgctttagctgctgcacgctatgaagagggagagtcagaagcagaaagcatcacttcctttatggatgtttcaaatcctttttatcagctttatgacacagttaggagttgtcggaataaccaagggcagctaatagctgaacctttttaccatttgccttcaaagaaaaaataccctgattattaccagcaaattaaaatgcccatatcactacaacagatccgaacaaaactgaagaatcaagaatatgaaactttagatcatttggagtgtgatctgaatttaatgtttgaaaatgccaaacgctataatgtgcccaattcagccatctacaagcgagttctaaaattgcagcaagttatgcaggcaaagaagaaagagcttgccaggagagacgatatcgaggacggagacagcatgatctcttcagccacctctgatactggtagtgccaaaagaaaaagtaaaaagaacataagaaagcagcgaatgaaaatcttattcaatgttgttcttgaagctcgagagccaggttcaggcagaagactttgtgacctatttatggttaaaccatccaaaaaggactatcctgattattataaaatcatcttggagccaatggacttgaaaataattgagcataacatccgcaatgacaaatatgctggtgaagagggaatgatagaagacatgaagctgatgttccggaatgccaggcactataatgaggagggctcccaggtttataatgatgcacatatcctggagaagttactcaaggagaaaaggaaagagctgggcccactgcctgatgatgatgacatggcttctcccaaactcaagctgagtaggaagagtggcatttctcctaaaaaatcaaaatacatgactccaatgcagcagaaactaaatgaggtctatgaagctgtaaagaactatactgataagaggggtcgccgcctcagtgccatatttctgaggcttccctctagatctgagttgcctgactactatctgactattaaaaagcccatggacatggaaaaaattcgaagtcacatgatggccaacaagtaccaagatattgactctatggttgaggactttgtcatgatgtttaataatgcctgtacatacaatgagccggagtctttgatctacaaagatgctcttgttctacacaaagtcctgcttgaaacacgcagagacctggagggagatgaggactctcatgtcccaaatgtgactttgctgattcaagagcttatccacaatctttttgtgtcagtcatgagtcatcaggatgatgagggaagatgctacagcgattctttagcagaaattcctgctgtggatcccaactttcctaacaaaccaccccttacatttgacataattaggaagaatgttgaaaataatcgctaccgtcggcttgatttatttcaagagcatatgtttgaagtattggaacgagcaagaaggatgaatcggacagattcagaaatatatgaagatgcagtagaacttcagcagttttttattaaaattcgtgatgaactctgcaaaaatggagagattcttctttcaccggcactcagctataccacaaaacatttgcataatgatgtggagaaagagagaaaggaaaaattgccaaaagaaatagaggaagataaactaaaacgagaagaagaaaaaagagctgaaaagagtgaagattcctctggtgctgcaggcctctcaggcttacatcgcacatacagccaggactgtagctttaaaaacagcatgtaccatgttggagattacgtctatgtggaacctgcagaggccaacctacaaccacatatcgtctgtattgaaagactgtgggaggattcagctggtgaaaaatggttgtatggctgttggttttaccgaccaaatgaaacattccacctggctacacgaaaatttctagaaaaagaagtttttaagagtgactattacaacaaagttccagttagtaaaattctaggcaagtgtgtggtcatgtttgtcaaggaatactttaagttatgcccagaaaacttccgagatgaggatgtttttgtctgtgaatcacggtattctgccaaaaccaaatcttttaagaaaattaaactgtggaccatgcccatcagctcagtcaggtttgtccctcgggatgtgcctctgcctgtggttcgcgtggcctctgtatttgcaaatgcagataaaggtgatgatgagaagaatacagacaactcagaggacagtcgagctgaagacaattttaacttggaaaaggaaaaagaagatgtccctgtggaaatgtccaatggtgaaccaggttgccactactttgagcagctccattacaatgacatgtggctgaaggttggcgactgtgtcttcatcaagtcccatggcctggtgcgtcctcgtgtgggcagaattgaaaaagtatgggttcgagatggagctgcatatttttatggccccatcttcattcacccagaagaaacagagcatgagcccacaaaaatgttctacaaaaaagaagtatttctgagtaatctggaagaaacctgccccatgacatgtattctcggaaagtgtgctgtgttgtcattcaaggacttcctctcctgcaggccaactgaaataccagaaaatgacattctgctttgtgagagccgctacaatgagagcgacaagcagatgaagaaattcaaaggattgaagaggttttcactctctgctaaagtggtagatgatgaaatttactacttcagaaaaccaattgttcctcagaaggagccatcacctttgctggaaaagaagatccagttgctagaagctaaatttgccgagttagaaggtggagatgatgatattgaagagatgggagaagaagatagtgaggtcattgaacctccttctctacctcagcttcagacccccctggccagtgagctggacctcatgccctacacacccccacagtctaccccaaagtctgccaaaggcagtgcaaagaaggaaggctccaaacggaaaatcaacatgagtggctacatcctgttcagcagtgagatgagggctgtgattaaggcccaacacccagactactctttcggggagctcagccgcctggtggggacagaatggagaaatcttgagacagccaagaaagcagaatatgaaggcatgatgggtggctatccgccaggccttccacctttgcagggcccagttgatggccttgttagcatgggcagcatgcagccacttcaccctggggg

SEQ ID NO: 167217 - DNA, 783 bp, Homo sapiens
  Payload ID: 12904
  Gene Symbol: PBRM1
  Gene Name: polybromo 1
  ENST ID: ENST00000420148
  CDS Start-End: 327-783
gactggttttgcggcggcaccgggaggggtaagggaggtgagggcggcgggtgccgaagcgacggcagcggccgcggccggaggagcaatagcagcagccgtggcggccacggggcggggcgcggcggtcggtgaccgcggccggggctgcaggcggcggagcggctggcttgccaacacttggtgtcacatgtgagcctcccacatgtattcactctccattccagctctgtgattgaactctgctcttattgactagggggcagttgggcaggcatgcctcattcctggaattgacagtcattcctaataagaagttggattccatgggttccaagagaagaagagctacctccccttccagcagtgtcagcggggactttgatgatgggcaccattctgtgtcaacaccaggcccaagcaggaaaaggaggagactttccaatcttccaactgtagatcctattgccgtgtgccatgaactctataataccatccgagactataaggatgaacagggcagacttctctgtgagctcttcattagggcaccaaagcgaagaaatcaaccagactattatgaagtggtttctcagcccattgacttgatgaaaatccaacagaaactaaaaatggaagagtatgatgatgttaatttgctgactgctgacttccagcttctttttaacaatgcaaagtcctattataagccagattctcctgaatataaagccgcttgcaaactctgggatttgtaccttcgaacaagaaatgagtttgttc

SEQ ID NO: 167218 - DNA, 457 bp, Homo sapiens
  Payload ID: 12904
  Gene Symbol: PBRM1
  Gene Name: polybromo 1
  ENST ID: ENST00000424867
  CDS Start-End: 380-457
ggcggtcggtgaccgcggccggggctgcaggcggcggagcggctgggtcgcccatatttgattttgagctccaaaatggaagattggaaaatatgttttgaagagcttgccaacacttggtgtcacatgtgagcctcccacatgtattcactctccattccagctctgtgattgaactctgctcttattgactagggggcagttgggcaggcatgcctcattcctggaattgacagtcattcctaatttttgaatatactaacactgaatcagcacttctaaagcccttccttctcccactggcttcacttggctttcagacataatgaggagactggcttttcgaggcgctggttgtgctctgaagaagttggattccatgggttccaagagaagaagagctacctccccttccagcagtgtcagcggggactttgatgatgggcaccattctgtg

SEQ ID NO: 167219 - DNA, 3256 bp, Homo sapiens
  Payload ID: 12904
  Gene Symbol: PBRM1
  Gene Name: polybromo 1
  ENST ID: ENST00000446103
  CDS Start-End: 1-3256
atccgagactataaggatgaacagggcagacttctctgtgagctcttcattagggcaccaaagcgaagaaatcaaccagactattatgaagtggtttctcagcccattgacttgatgaaaatccaacagaaactaaaaatggaagagtatgatgatgttaatttgctgactgctgacttccagcttctttttaacaatgcaaagtcctattataagccagattctcctgaatataaagccgcttgcaaactctgggatttgtaccttcgaacaagaaatgagtttgttcagaaaggagaagcagatgacgaagatgatgatgaagatgggcaagacaatcagggcacagtgactgaaggatcttctccagcttacttgaaggagatcctggagcagcttcttgaagccatagttgtagctacaaatccatcaggacgtctcattagcgaactttttcagaaactgccttctaaagtgcaatatccagattattatgcaataattaaggagcctatagatctcaagaccattgcccagaggatacagaatggaagctacaaaagtattcatgcaatggccaaagatatagatctcctcgcaaaaaatgccaaaacttataatgagcctggctctcaagtattcaaggatgcaaattcaattaaaaaaatattttatatgaaaaaggctgaaattgaacatcatgaaatggctaagtcaagtcttcgaatgaggactccatccaacttggctgcagccagactgacaggtccttcacacagtaaaggcagccttggtgaagagagaaatcccactagcaagtattaccgtaataaaagagcagtacaaggaggtcgtttatcagcaattacaatggcacttcaatatggctcagaaagtgaagaagatgctgctttagctgctgcacgctatgaagagggagagtcagaagcagaaagcatcacttcctttatggatgtttcaaatcctttttatcagctttatgacacagttaggagttgtcggaataaccaagggcagctaatagctgaacctttttaccatttgccttcaaagaaaaaataccctgattattaccagcaaattaaaatgcccatatcactacaacagatccgaacaaaactgaagaatcaagaatatgaaactttagatcatttggagtgtgatctgaatttaatgtttgaaaatgccaaacgctataatgtgcccaattcagccatctacaagcgagttctaaaattgcagcaagttatgcaggcaaagaagaaagagcttgccaggagagacgatatcgaggacggagacagcatgatctcttcagccacctctgatactggtagtgccaaaagaaaaaggaacactcatgacagtgagatgttgggtctcaggaggctatccagtaaaaagaacataagaaagcagcgaatgaaaatcttattcaatgttgttcttgaagctcgagagccaggttcaggcagaagactttgtgacctatttatggttaaaccatccaaaaaggactatcctgattattataaaatcatcttggagccaatggacttgaaaataattgagcataacatccgcaatgacaaatatgctggtgaagagggaatgatagaagacatgaagctgatgttccggaatgccaggcactataatgaggagggctcccaggtttataatgatgcacatatcctggagaagttactcaaggagaaaaggaaagagctgggcccactgcctgatgatgatgacatggcttctcccaaactcaagctgagtaggaagagtggcatttctcctaaaaaatcaaaatacatgactccaatgcagcagaaactaaatgaggtctatgaagctgtaaagaactatactgataagaggggtcgccgcctcagtgccatatttctgaggcttccctctagatctgagttgcctgactactatctgactattaaaaagcccatggacatggaaaaaattcgaagtcacatgatggccaacaagtaccaagatattgactctatggttgaggactttgtcatgatgtttaataatgcctgtacatacaatgagccggagtctttgatctacaaagatgctcttgttctacacaaagtcctgcttgaaacacgcagagacctggagggagatgaggactctcatgtcccaaatgtgactttgctgattcaagagcttatccacaatctttttgtgtcagtcatgagtcatcaggatgatgagggaagatgctacagcgattctttagcagaaattcctgctgtggatcccaactttcctaacaaaccaccccttacatttgacataattaggaagaatgttgaaaataatcgctaccgtcggcttgatttatttcaagagcatatgtttgaagtattggaacgagcaagaaggatgaatcggacagattcagaaatatatgaagatgcagtagaacttcagcagttttttattaaaattcgtgatgaactctgcaaaaatggagagattcttctttcaccggcactcagctataccacaaaacatttgcataatgatgtggagaaagagagaaaggaaaaattgccaaaagaaatagaggaagataaactaaaacgagaagaagaaaaaagagctgaaaagagtgaagattcctctggtgctgcaggcctctcaggcttacatcgcacatacagccaggactgtagctttaaaaacagcatgtaccatgttggagattacgtctatgtggaacctgcagaggccaacctacaaccacatatcgtctgtattgaaagactgtgggaggattcagctggtgaaaaatggttgtatggctgttggttttaccgaccaaatgaaacattccacctggctacacgaaaatttctagaaaaagaagtttttaagagtgactattacaacaaagttccagttagtaaaattctaggcaagtgtgtggtcatgtttgtcaaggaatactttaagttatgcccagaaaacttccgagatgaggatgtttttgtctgtgaatcacggtattctgccaaaaccaaatcttttaagaaaattaaactgtggaccatgcccatcagctcagtcaggtttgtccctcgggatgtgcctctgcctgtggttcgcgtggcctctgtatttgcaaatgcagataaaggtgatgatgagaagaatacagacaactcagaggacagtcgagctgaagacaattttaacttgg

SEQ ID NO: 167220 - DNA, 4766 bp, Homo sapiens
  Payload ID: 12904
  Gene Symbol: PBRM1
  Gene Name: polybromo 1
  Uniprot ID: Q86U86
  ENST ID: ENST00000412587
  CDS Start-End: 4-2574
tccatgggttccaagagaagaagagctacctccccttccagcagtgtcagcggggactttgatgatgggcaccattctgtgtcaacaccaggcccaagcaggaaaaggaggagactttccaatcttccaactgtagatcctattgccgtgtgccatgaactctataataccatccgagactataaggatgaacagggcagacttctctgtgagctcttcattagggcaccaaagcgaagaaatcaaccagactattatgaagtggtttctcagcccattgacttgatgaaaatccaacagaaactaaaaatggaagagtatgatgatgttaatttgctgactgctgacttccagcttctttttaacaatgcaaagtcctattataagccagattctcctgaatataaagccgcttgcaaactctgggatttgtaccttcgaacaagaaatgagtttgttcagaaaggagaagcagatgacgaagatgatgatgaagatgggcaagacaatcagggcacagtgactgaaggatcttctccagcttacttgaaggagatcctggagcagcttcttgaagccatagttgtagctacaaatccatcaggacgtctcattagcgaactttttcagaaactgccttctaaagtgcaatatccagattattatgcaataattaaggagcctatagatctcaagaccattgcccagaggatacagaatggaagctacaaaagtattcatgcaatggccaaagatatagatctcctcgcaaaaaatgccaaaacttataatgagcctggctctcaagtattcaaggatgcaaattcaattaaaaaaatattttatatgaaaaaggctgaaattgaacatcatgaaatggctaagtcaagtcttcgaatgaggactccatccaacttggctgcagccagactgacaggtccttcacacagtaaaggcagccttggtgaagagagaaatcccactagcaagtattaccgtaataaaagagcagtacaaggaggtcgtttatcagcaattacaatggcacttcaatatggctcagaaagtgaagaagatgctgctttagctgctgcacgctatgaagagggagagtcagaagcagaaagcatcacttcctttatggatgtttcaaatcctttttatcagctttatgacacagttaggagttgtcggaataaccaagggcagctaatagctgaacctttttaccatttgccttcaaagaaaaaataccctgattattaccagcaaattaaaatgcccatatcactacaacagatccgaacaaaactgaagaatcaagaatatgaaactttagatcatttggagtgtgatctgaatttaatgtttgaaaatgccaaacgctataatgtgcccaattcagccatctacaagcgagttctaaaattgcagcaagttatgcaggcaaagaagaaagagcttgccaggagagacgatatcgaggacggagacagcatgatctcttcagccacctctgatactggtagtgccaaaagaaaaagtaaaaagaacataagaaagcagcgaatgaaaatcttattcaatgttgttcttgaagctcgagagccaggttcaggcagaagactttgtgacctatttatggttaaaccatccaaaaaggactatcctgattattataaaatcatcttggagccaatggacttgaaaataattgagcataacatccgcaatgacaaatatgctggtgaagagggaatgatagaagacatgaagctgatgttccggaatgccaggcactataatgaggagggctcccaggtttataatgatgcacatatcctggagaagttactcaaggagaaaaggaaagagctgggcccactgcctgatgatgatgacatggcttctcccaaactcaagctgagtaggaagagtggcatttctcctaaaaaatcaaaatacatgactccaatgcagcagaaactaaatgaggtctatgaagctgtaaagaactatactgataagaggggtcgccgcctcagtgccatatttctgaggcttccctctagatctgagttgcctgactactatctgactattaaaaagcccatggacatggaaaaaattcgaagtcacatgatggccaacaagtaccaagatattgactctatggttgaggactttgtcatgatgtttaataatgcctgtacatacaatgagccggagtctttgatctacaaagatgctcttgttctacacaaagtcctgcttgaaacacgcagagacctggagggagatgaggactctcatgtcccaaatgtgactttgctgattcaagagcttatccacaatctttttgtgtcagtcatgagtcatcaggatgatgagggaagatgctacagcgattctttagcagaaattcctgctgtggatcccaactttcctaacaaaccaccccttacatttgacataattaggaagaatgttgaaaataatcgctaccgtcggcttgatttatttcaagagcatatgtttgaagtattggaacgagcaagaaggatgaatcgctgaaaagagtgaagattcctctggtgctgcaggcctctcaggcttacatcgcacatacagccaggactgtagctttaaaaacagcatgtaccatgttggagattacgtctatgtggaacctgcagaggccaacctacaaccacatatcgtctgtattgaaagactgtgggaggattcagctggtgaaaaatggttgtatggctgttggttttaccgaccaaatgaaacattccacctggctacacgaaaatttctagaaaaagaagtttttaagagtgactattacaacaaagttccagttagtaaaattctaggcaagtgtgtggtcatgtttgtcaaggaatactttaagttatgcccagaaaacttccgagatgaggatgtttttgtctgtgaatcacggtattctgccaaaaccaaatcttttaagaaaattaaactgtggaccatgcccatcagctcagtcaggtttgtccctcgggatgtgcctctgcctgtggttcgcgtggcctctgtatttgcaaatgcagataaaggtgatgatgagaagaatacagacaactcagaggacagtcgagctgaagacaattttaacttggaaaaggaaaaagaagatgtccctgtggaaatgtccaatggtgaaccaggttgccactactttgagcagctccattacaatgacatgtggctgaaggttggcgactgtgtcttcatcaagtcccatggcctggtgcgtcctcgtgtgggcagaattgaaaaagtatgggttcgagatggagctgcatatttttatggccccatcttcattcacccagaagaaacagagcatgagcccacaaaaatgttctacaaaaaagaagtatttctgagtaatctggaagaaacctgccccatgacatgtattctcggaaagtgtgctgtgttgtcattcaaggacttcctctcctgcaggccaactgaaataccagaaaatgacattctgctttgtgagagccgctacaatgagagcgacaagcagatgaagaaattcaaaggattgaagaggttttcactctctgctaaagtggtagatgatgaaatttactacttcagaaaaccaattgttcctcagaaggagccatcacctttgctggaaaagaagatccagttgctagaagctaaatttgccgagttagaaggtggagatgatgatattgaagagatgggagaagaagatagtgaggtcattgaacctccttctctacctcagcttcagacccccctggccagtgagctggacctcatgccctacacacccccacagtctaccccaaagtctgccaaaggcagtgcaaagaaggaaggctccaaacggaaaatcaacatgagtggctacatcctgttcagcagtgagatgagggctgtgattaaggcccaacacccagactactctttcggggagctcagccgcctggtggggacagaatggagaaatcttgagacagccaagaaagcagaatatgaaggcatgatgggtggctatccgccaggccttccacctttgcagggcccagttgatggccttgttagcatgggcagcatgcagccacttcaccctggggggcctccaccccaccatcttccgccaggtgtgcctggcctcccgggcatcccaccaccgggtgtgatgaaccaaggagtggcccctatggtagggactccagcaccaggtggaagtccatatggacaacaggtgggagttttggggcctccagggcagcaggcaccacctccatatcccggcccacatccagctggaccccctgtcatacagcagccaacaacacccatgtttgtagctcccccaccaaagacccagcggcttcttcactcagaggcctacctgaaatacattgaaggactcagtgcggagtccaacagcattagcaagtgggatcagacactggcagctcgaagacgcgacgtccatttgtcgaaagaacaggagagccgcctaccctctcactggctgaaaagcaaaggggcccacaccaccatggcagatgccctctggcgccttcgagatttgatgctccgggacaccctcaacattcgccaagcatacaacctagaaaatgtttaatcacatcattacgtttcttttatatagaagcataaagagttgtggatcagtagccattttagttactgggggt

SEQ ID NO: 167221 - DNA, 547 bp, Homo sapiens
  Payload ID: 12904
  Gene Symbol: PBRM1
  Gene Name: polybromo 1
  ENST ID: ENST00000439181
  CDS Start-End: 418-547
tgggcccagtagccttgtcgcacctgccggcagggacaaaggcgcactacgggtcggaaactccccgcgctcctctttcccgctcgtcgcggggcagcttcaaagctgtcaacgtttccctcagtccccaataccagtgacagcttgccaacacttggtgtcacatgtgagcctcccacatgtattcactctccattccagctctgtgattgaactctgctcttattgactagggggcagttgggcaggcatgcctcattcctggaattgacagtcattcctaatttttgaatatactaacactgaatcagcacttctaaagcccttccttctcccactggcttcacttggctttcagacataatgaggagactggcttttcgaggcgctggttgtgctctgaagaagttggattccatgggttccaagagaagaagagctacctccccttccagcagtgtcagcggggactttgatgatgggcaccattctgtgtcaacaccaggcccaagcaggaaaaggaggagactttccaatcttccaactg

SEQ ID NO: 167222 - DNA, 809 bp, Homo sapiens
  Payload ID: 12904
  Gene Symbol: PBRM1
  Gene Name: polybromo 1
  ENST ID: ENST00000431678
  CDS Start-End: 118-809
gcggccgcggccggaggagcaatagcagcagccgtggcggccacggggcggggcgcggcggtcggtgaccgcggccggggctgcaggcggcggagcggctggaagaagttggattccatgggttccaagagaagaagagctacctccccttccagcagtgtcagcggggactttgatgatgggcaccattctgtgtcaacaccaggcccaagcaggaaaaggaggagactttccaatcttccaactgtagatcctattgccgtgtgccatgaactctataataccatccgagactataaggatgaacagggcagacttctctgtgagctcttcattagggcaccaaagcgaagaaatcaaccagactattatgaagtggtttctcagcccattgacttgatgaaaatccaacagaaactaaaaatggaagagtatgatgatgttaatttgctgactgctgacttccagcttctttttaacaatgcaaagtcctattataagccagattctcctgaatataaagccgcttgcaaactctgggatttgtaccttcgaacaagaaatgagtttgttcagaaaggagaagcagatgacgaagatgatgatgaagatgggcaagacaatcagggcacagtgactgaaggatcttctccagcttacttgaaggagatcctggagcagcttcttgaagccatagttgtagctacaaatccatcaggacgtctcattagcgaactttttcagaaactgccttctaaagtgcaatatccagattattatgcaataattaaggagcctatagatctcaa

SEQ ID NO: 167223 - DNA, 476 bp, Homo sapiens
  Payload ID: 12904
  Gene Symbol: PBRM1
  Gene Name: polybromo 1
  ENST ID: ENST00000458294
  CDS Start-End: 348-476
aggtgagggcggcgggtgccgaagcgacggcagcggccgcggccggaggagcaatagcagcagccgtggcggccacggggcggggcgcggcggtcggtgaccgcggccggggctgcaggcggcggagcggctgggtcgcccatatttgattttgagctccaaaatggaagattggaaaatatgttttgaagagcttgccaacacttggtgtcacatgtgagcctcccacatgtattcactctccattccagctctgtgattgaactctgctcttattgactagggggcagttgggcaggcatgcctcattcctggaattgacagtcattcctaataagttggattccatgggttccaagagaagaagagctacctccccttccagcagtgtcagcggggactttgatgatgggcaccattctgtgtcaacaccaggcccaagcaggaaaaggaggagactttccaatcttccaact

SEQ ID NO: 167224 - DNA, 517 bp, Homo sapiens
  Payload ID: 12904
  Gene Symbol: PBRM1
  Gene Name: polybromo 1
  ENST ID: ENST00000449505
  CDS Start-End: 163-517
cggatgggcccagtagccttgtcgcacctgccggcagggacaaaggcgcactacgggtcggaaactccccgcgctcctctttcccgctcgtcgcggggcagcttcaaagctgtcaacgtttccctcagtccccaataccagtgacagaagaagttggattccatgggttccaagagaagaagagctacctccccttccagcagtgtcagcggggactttgatgatgggcaccattctgtgtcaacaccaggcccaagcaggaaaaggaggagactttccaatcttccaactgtagatcctattgccgtgtgccatgaactctataataccatccgagactataaggatgaacagggcagacttctctgtgagctcttcattagggcaccaaagcgaagaaatcaaccagactattatgaagtggtttctcagcccattgacttgatgaaaatccaacagaaactaaaaatggaagagtatgatgatgttaatttgctgactgctgacttccagcttc

SEQ ID NO: 167225 - DNA, 517 bp, Homo sapiens
  Payload ID: 12904
  Gene Symbol: PBRM1
  Gene Name: polybromo 1
  ENST ID: ENST00000450271
  CDS Start-End: 257-517
gcggccgcggccggaggagcaatagcagcagccgtggcggccacggggcggggcgcggcggtcggtgaccgcggccggggctgcaggcggcggagcggctggcttgccaacacttggtgtcacatgtgagcctcccacatgtattcactctccattccagctctgtgattgaactctgctcttattgactagggggcagttgggcaggcatgcctcattcctggaattgacagtcattcctaataagttggattccatgggttccaagagaagaagagctacctccccttccagcagtgtcagcggggactttgatgatgggcaccattctgtgtcaacaccaggcccaagcaggaaaaggaggagactttccaatcttccaactgtagatcctattgccgtgtgccatgaactctataataccatccgagactataaggatgaacagggcagacttctctgtgagctcttcattagggcaccaaagcgaagaaatcaaccagactattatgaagtg

SEQ ID NO: 167226 - DNA, 1792 bp, Homo sapiens
  Payload ID: 12905
  Gene Symbol: PCGF1
  Gene Name: polycomb group ring finger 1
  Uniprot ID: Q9BSM1
  ENST ID: ENST00000233630
  CDS Start-End: 913-1692
tgaggtctccattggaatctctcccttctcgtatctccagttgcatttgatgttaatacctcatagcaaatttatccctttttaagtacccagagccggcggtgtagagctctcgagcgagcaccccgcgtagtccccaagtgcgggactgggcctatgctactacaggcgctcgctgcctaagcctgtctgtgtgtggcagtgtcctagtcgtcctcccctcctccttcggcatctgctctgcattagtctgtcccaggcctccgcaggcgccgatgattaaatcatcatcattaaccagggcctgccccccccatccccggcagcaggggggagaatgggggaataagatcactaccaagtccctgggggtctctcactccccatcccccggcaccctctccgagactctgcaaagcccaagaaactccctccgtgaagccgggagaagacccgccatctggacgaagctccgctacgcggacgccgacagggcggcattacgaggagaggacccaggaggggcttcttcagcagggtcgtcgtcacagaagaccgacgaccctgagcgggtagcgggcacagactgccaggcctttgggggtaggagggggcagtctttcgcaggctccgaaagttagtcttgaggtcgcgtagggcctattatgatgatttctacaggaggttgaagagataagacccttccctgtgctcccccccccccactccttaattacggattgagcaggggaggggccggtggggctcaggtgagcacacagggagaaagggacgtgggcggggccttacagagggtgagcgaatccgaaaagacctagaacctcgttgctgggagacaagtcccgccctgcaggcggcaccggaagtggccggctgggatcagcctttaagatggcgtctcctcaggggggccagattgcgatcgcgatgaggcttcggaaccagctccagtcagtgtacaagatggacccgctacggaacgaggaggaggttcgagtgaagatcaaagacttgaatgaacacattgtttgctgcctatgcgccggctacttcgtggatgccaccaccatcacagagtgtcttcatactttctgcaagagttgtattgtgaagtacctccaaactagcaagtactgccccatgtgcaacattaagatccacgagacacagccactgctcaacctcaaactggaccgggtcatgcaggacatcgtgtataagctggtgcctggcttgcaagacagtgaagagaaacggattcgggaattctaccagtcccgaggtttggaccgggtcacccagcccactggggaagagccagcactgagcaacctcggcctccccttcagcagctttgaccactctaaagcccactactatcgctatgatgagcagttgaacctgtgcctggagcggctgagttctggcaaagacaagaataaaagcgtcctgcagaacaagtatgtccgatgttctgttagagctgaggtacgccatctccggagggtcctgtgtcaccgcttgatgctaaaccctcagcatgtgcagctcctttttgacaatgaagttctccctgatcacatgacaatgaagcagatatggctctcccgctggttcggcaagccatcccctttgcttttacaatacagtgtgaaagagaagaggaggtaggggccaagcccccaccccatcccactccccttccctccccagatatttatgtgaaatgaactgcagctttattttttgaaataaaaacttttaaaaagca

SEQ ID NO: 167227 - DNA, 988 bp, Homo sapiens
  Payload ID: 12905
  Gene Symbol: PCGF1
  Gene Name: polycomb group ring finger 1
  ENST ID: ENST00000612049
  CDS Start-End: 197-910
ggaaaggagggtcaggcgagtccacgtgagggaagcccccgctgtgcgcggagccctctgctgggcggagggggagtgccagcccccaggagctaatccccggctgatggcgcagggcgcggggcttggccgtctagtgtgatgaaggaggcgacccccaaggtgggaaggcgcacgggttggggtttgagggtggatgattggtgacggagggtgtatcttcgaggaggttcgagtgaagatcaaagacttgaatgaacacattgtttgctgcctatgcgccggctacttcgtggatgccaccaccatcacagagtgtcttcatactttctgcaagagttgtattgtgaagtacctccaaactagcaagtactgccccatgtgcaacattaagatccacgagacacagccactgctcaacctcaaactggaccgggtcatgcaggacatcgtgtataagctggtgcctggcttgcaagacagtgaagagaaacggattcgggaattctaccagtcccgaggtttggaccgggtcacccagcccactggggaagagccagcactgagcaacctcggcctccccttcagcagctttgaccactctaaagcccactactatcgctatgatgagcagttgaacctgtgcctggagcggctgagttctggcaaagacaagaataaaagcgtcctgcagaacaagtatgtccgatgttctgttagagctgaggtacgccatctccggagggtcctgtgtcaccgcttgatgctaaaccctcagcatgtgcagctcctttttgacaatgaagttctccctgatcacatgacaatgaagcagatatggctctcccgctggttcggcaagccatcccctttgcttttacaatacagtgtgaaagagaagaggaggtaggggccaagcccccaccccatcccactccccttccctccccagatatttatgtgaaatgaactgcagctttattttttg

SEQ ID NO: 167228 - DNA, 2604 bp, Homo sapiens
  Payload ID: 12906
  Gene Symbol: PCGF2
  Gene Name: polycomb group ring finger 2
  ENST ID: ENST00000610440
  CDS Start-End: 244-1278
tctcccctcccgccgcccgggcgagcgacacggctgcggcccccctcccctcccttccctccctccctcccatccccccctccccgagacccaccggaccccgaacccagatggccgaaacgggctccccgtcttaacgatttggcgtctccctcgaccaccacctctttgtgcagcagcccccgggcagaccctgttccgagggcaacgctccccagtccccccacccccgaccccggaatcatgcatcggactacacggatcaaaatcacagagctgaacccccacctcatgtgtgccctctgcggggggtacttcatcgacgccaccactatcgtggagtgcctgcattccttctgcaaaacctgcatcgtgcgctacctggagaccaacaaatactgccccatgtgtgacgtgcaggtccataaaacccggccgctgctgagcatcaggtctgacaaaacacttcaagacattgtctacaaattggtccctgggctttttaaagatgagatgaaacggcggcgggatttctatgcagcgtaccccctgacggaggtccccaacggctccaatgaggaccgcggcgaggtcttggagcaggagaagggggctctgagtgatgatgagattgtcagcctctccatcgaattctacgaaggtgccagggaccgggacgagaagaagggccccctggagaatggggatggggacaaagagaaaacaggggtgcgcttcctgcgatgcccagcagccatgaccgtcatgcatcttgccaagtttctccgcaacaagatggatgtgcccagcaagtacaaggtggaggttctgtacgaggacgagccactgaaggaatactacaccctcatggacatcgcctacatctacccctggcggcggaacgggcctctccccctcaagtaccgtgtccagccagcctgcaagcggctcaccctagccacggtgcccaccccctccgagggcaccaacaccagcggggcgtccgagtgtgagtcagtcagcgacaaggctcccagccctgccaccctgccagccacctcctcctccctgcccagcccagccaccccatcccatggctctcccagttcccatgggcctccagccacccaccctacctcccccactcccccttcgacagccagtggggccaccacagctgccaacgggggtagcttgaactgcctgcagacaccatcctccaccagcagggggcgcaagatgactgtcaacggcgctcccgtgccccccttaacttgaggccagggaccctctcccttcttccagccaagcctctccactccttccactttttctgggcccttttttccacctcttctactttccccagctcttcccaccttgggggtggggggcgggttttataaataaatatatatatatatgtacataggaaaaaccaaatatacatacttattttctatggaccaaccagattaatttaaatgccacaggaaacaaactttatgtgtgtgtgtatgtgtggaaaatggtgttcattttttttggggggggtcttgtgtaatttgctgtttttgggggtgcctggagatgaactggatgggccactggagtctcaataaagctctgcaccatcctcgctgtttcccaaggcaggtggtgtgttgggggccccttcagacccaaagctttaggcatgattccaactggctgcatataggagtcagttagaatcgtttctttctctccccgtttctctccccatcttggctgctgtcctgcctctgaccagtggccgccccccacgttgttgaatgtccagaaattgctaagaacagtgccttttacaaatgcagtttatccctggttctgaggagcaagtgcagggtggaggtggcacctgcatcacctcctcctcttgcagtggaaactttgtgcaaagaatagatagttctgcctctttttttttttttcctgtgtgtgtggcctttgcatcatttatcttgtggaaaagaagattcaggccctgagaggtctcagctcttggaggagggctaaggctttagcattgtgaagcgctgcacccccaccaaccttaccctcaccggggaaccctcactagcaggactggtggtggagtctcacctggggcctagagtggaagtgggggtgggttaacctcacacaagcacagatcccagactttgccagaggcaaacagccttccaattgcccctccacccccagctgaggcccggtcacctggtcaggacagagcaactgcatctaaaagcacaagaagacagaaacctgtaagctctgaccccacccccaccccttgagaggtcagcggaccacctccttagggacagaccctggcaggtcgctgcccaccgagatttcctcaagtgtgcatagatctgagaggagtcgggagtcgagactcgagattccatcatagcgtaggtgtgtggggttgggagccccctgatgggcttgtctgtgtttgcaccttgtcctgtgtctgaggtcctgtgactgtaccctcctttgccctgggacatctgtatctcttggctttgtaataaatgctgcatactttct

SEQ ID NO: 167229 - DNA, 2179 bp, Homo sapiens
  Payload ID: 12906
  Gene Symbol: PCGF2
  Gene Name: polycomb group ring finger 2
  Uniprot ID: P35227
  ENST ID: ENST00000611883
  CDS Start-End: 202-1236
gagagcccgaacaggaagagggtacagctttgtgcaggtcacatgcccactgcagccctccagcctctggtccccagagcggactttggaagctgaactgcttttgttgctggaagacttatgttataatttaccctgggtggaccagggtcgtacaaaagggcaacgctccccagtccccccacccccgaccccggaatcatgcatcggactacacggatcaaaatcacagagctgaacccccacctcatgtgtgccctctgcggggggtacttcatcgacgccaccactatcgtggagtgcctgcattccttctgcaaaacctgcatcgtgcgctacctggagaccaacaaatactgccccatgtgtgacgtgcaggtccataaaacccggccgctgctgagcatcaggtctgacaaaacacttcaagacattgtctacaaattggtccctgggctttttaaagatgagatgaaacggcggcgggatttctatgcagcgtaccccctgacggaggtccccaacggctccaatgaggaccgcggcgaggtcttggagcaggagaagggggctctgagtgatgatgagattgtcagcctctccatcgaattctacgaaggtgccagggaccgggacgagaagaagggccccctggagaatggggatggggacaaagagaaaacaggggtgcgcttcctgcgatgcccagcagccatgaccgtcatgcatcttgccaagtttctccgcaacaagatggatgtgcccagcaagtacaaggtggaggttctgtacgaggacgagccactgaaggaatactacaccctcatggacatcgcctacatctacccctggcggcggaacgggcctctccccctcaagtaccgtgtccagccagcctgcaagcggctcaccctagccacggtgcccaccccctccgagggcaccaacaccagcggggcgtccgagtgtgagtcagtcagcgacaaggctcccagccctgccaccctgccagccacctcctcctccctgcccagcccagccaccccatcccatggctctcccagttcccatgggcctccagccacccaccctacctcccccactcccccttcgacagccagtggggccaccacagctgccaacgggggtagcttgaactgcctgcagacaccatcctccaccagcagggggcgcaagatgactgtcaacggcgctcccgtgccccccttaacttgaggccagggaccctctcccttcttccagccaagcctctccactccttccactttttctgggcccttttttccacctcttctactttccccagctcttcccaccttgggggtggggggcgggttttataaataaatatatatatatatgtacataggaaaaaccaaatatacatacttattttctatggaccaaccagattaatttaaatgccacaggaaacaaactttatgtgtgtgtgtatgtgtggaaaatggtgttcattttttttggggggggtcttgtgtaatttgctgtttttgggggtgcctggagatgaactggatgggccactggagtctcaataaagctctgcaccatcctcgctgtttcccaaggcaggtggtgtgttgggggccccttcagacccaaagctttaggcatgattccaactggctgcatataggagtcagttagaatcgtttctttctctccccgtttctctccccatcttggctgctgtcctgcctctgaccagtggccgccccccacgttgttgaatgtccagaaattgctaagaacagtgccttttacaaatgcagtttatccctggttctgaggagcaagtgcagggtggaggtggcacctgcatcacctcctcctcttgcagtggaaactttgtgcaaagaatagatagttctgcctctttttttttttttcctgtgtgtgtggcctttgcatcatttatcttgtggaaaagaagattcaggccctgagaggtctcagctcttggaggagggctaaggctttagcattgtgaagcgctgcacccccaccaaccttaccctcaccggggaaccctcactagcaggactggtggtggagtctcacctggggcctagagtggaagtgggggtgggttaacctcacacaagcacagatcccagactttgccagaggcaaacag

SEQ ID NO: 167230 - DNA, 1499 bp, Homo sapiens
  Payload ID: 12906
  Gene Symbol: PCGF2
  Gene Name: polycomb group ring finger 2
  ENST ID: ENST00000618941
  CDS Start-End: 347-1120
ggactccccctgcctttccctctcctggcctgtaaccctctggggattgggatgggggccggccgttcttcgcaagccccgatgggagggggaggctctgagccgatcctgccttcgcaccccccgcgccccgtcagtccctagcccagcttgccccgtccgcctttctttctcccttttttctgtccctttttccctttcctctcttccaagatggccgaaacgggctccccgtcttaacgatttggcgtctccctcgaccaccacctctttgtgcagcagcccccgggcagaccctgttccgagggcaacgctccccagtccccccacccccgaccccggaatcatgcatcggactacacggatcaaaatcacagagctgaacccccacctcatgtgtgccctctgcggggggtacttcatcgacgccaccactatcgtggagtgcctgcattccttctgcaaaacctgcatcgtgcgctacctggagaccaacaaatactgccccatgtgtgacgtgcaggtccataaaacccggccgctgctgagcatcaggtctgacaaaacacttcaagacattgtctacaaattggtccctgggctttttaaagatgagatgaaacggcggcgggatttctatgcagcgtaccccctgacggaggtccccaacggctccaatgaggaccgcggcgaggtcttggagcaggagaagggggctctgagtgatgatgagattgtcagcctctccatcgaattctacgaaggtgccaggcaaggaccgggacgagaagaagggccccctggagaatggggatggggacaaagagaaaacaggggtgcgcttcctgcgatgcccagcagccatgaccgtcatgcatcttgccaagtttctccgcaacaagatggatgtgcccagcaagtacaaggtggaggttctgtacgaggacgagccactgaaggaatactacaccctcatggacatcgcctacatctacccctggcggcggaacgggcctctccccctcaagtaccgtgtccagccagcctgcaagcggctcaccctagccacggtgcccaccccctccgagggcaccaacaccagcggggcgtccgagtgtgagtcagtcagcgacaaggctcccagccctgccaccctgccagccacctcctcctccctgcccagcccagccaccccatcccatggctctcccagttcccatgggcctccagccacccaccctacctcccccactcccccttcgacagccagtggggccaccacagctgccaacgggggtagcttgaactgcctgcagacaccatcctccaccagcagggggcgcaagatgactgtcaacggcgctcccgtgccccccttaacttgaggccagggaccctctcccttcttccagccaagcctctccactccttccactttttctgggcccttttttccacctcttctactttccccagctcttcccaccttgggggtgggg

SEQ ID NO: 167231 - DNA, 3062 bp, Homo sapiens
  Payload ID: 12906
  Gene Symbol: PCGF2
  Gene Name: polycomb group ring finger 2
  Uniprot ID: P35227
  ENST ID: ENST00000616199
  CDS Start-End: 703-1737
gtggctgcaggctcgagctggggtcactcggcggccagtgtgcgcaggtctcctggtcgccggccagagggcgaaagcattcacccgaggcccccagcttcgcggctgccttggctgcgagcaacgagggaagaggaggcaggcgctccaaaactgggcgaagattcctatcctaatttctaactcgagcctcccaccgtcagtgcgcttaatggcgctgctggccggatggataatcgagctctctggagggacagacgcggccgccatccctaataaatcgtgaataacgaatgagggaatcgaccatcctcatgaggcccacgggcgtccagtaacgcagtatcgattcgcttccccggcgtcggcctcaccgctactcccggcgtttccaagcctccctcctcgttctctccctcctgccggagccactgcggaccggagccccagcgccaggtttctcccctcccgccgcccgggcgagcgacacggctgcggcccccctcccctcccttccctccctccctcccatccccccctccccgagacccaccggaccccgaacccagatggccgaaacgggctccccgtcttaacgatttggcgtctccctcgaccaccacctctttgtgcagcagcccccgggcagaccctgttccgagggcaacgctccccagtccccccacccccgaccccggaatcatgcatcggactacacggatcaaaatcacagagctgaacccccacctcatgtgtgccctctgcggggggtacttcatcgacgccaccactatcgtggagtgcctgcattccttctgcaaaacctgcatcgtgcgctacctggagaccaacaaatactgccccatgtgtgacgtgcaggtccataaaacccggccgctgctgagcatcaggtctgacaaaacacttcaagacattgtctacaaattggtccctgggctttttaaagatgagatgaaacggcggcgggatttctatgcagcgtaccccctgacggaggtccccaacggctccaatgaggaccgcggcgaggtcttggagcaggagaagggggctctgagtgatgatgagattgtcagcctctccatcgaattctacgaaggtgccagggaccgggacgagaagaagggccccctggagaatggggatggggacaaagagaaaacaggggtgcgcttcctgcgatgcccagcagccatgaccgtcatgcatcttgccaagtttctccgcaacaagatggatgtgcccagcaagtacaaggtggaggttctgtacgaggacgagccactgaaggaatactacaccctcatggacatcgcctacatctacccctggcggcggaacgggcctctccccctcaagtaccgtgtccagccagcctgcaagcggctcaccctagccacggtgcccaccccctccgagggcaccaacaccagcggggcgtccgagtgtgagtcagtcagcgacaaggctcccagccctgccaccctgccagccacctcctcctccctgcccagcccagccaccccatcccatggctctcccagttcccatgggcctccagccacccaccctacctcccccactcccccttcgacagccagtggggccaccacagctgccaacgggggtagcttgaactgcctgcagacaccatcctccaccagcagggggcgcaagatgactgtcaacggcgctcccgtgccccccttaacttgaggccagggaccctctcccttcttccagccaagcctctccactccttccactttttctgggcccttttttccacctcttctactttccccagctcttcccaccttgggggtggggggcgggttttataaataaatatatatatatatgtacataggaaaaaccaaatatacatacttattttctatggaccaaccagattaatttaaatgccacaggaaacaaactttatgtgtgtgtgtatgtgtggaaaatggtgttcattttttttggggggggtcttgtgtaatttgctgtttttgggggtgcctggagatgaactggatgggccactggagtctcaataaagctctgcaccatcctcgctgtttcccaaggcaggtggtgtgttgggggccccttcagacccaaagctttaggcatgattccaactggctgcatataggagtcagttagaatcgtttctttctctccccgtttctctccccatcttggctgctgtcctgcctctgaccagtggccgccccccacgttgttgaatgtccagaaattgctaagaacagtgccttttacaaatgcagtttatccctggttctgaggagcaagtgcagggtggaggtggcacctgcatcacctcctcctcttgcagtggaaactttgtgcaaagaatagatagttctgcctctttttttttttttcctgtgtgtgtggcctttgcatcatttatcttgtggaaaagaagattcaggccctgagaggtctcagctcttggaggagggctaaggctttagcattgtgaagcgctgcacccccaccaaccttaccctcaccggggaaccctcactagcaggactggtggtggagtctcacctggggcctagagtggaagtgggggtgggttaacctcacacaagcacagatcccagactttgccagaggcaaacagccttccaattgcccctccacccccagctgaggcccggtcacctggtcaggacagagcaactgcatctaaaagcacaagaagacagaaacctgtaagctctgaccccacccccaccccttgagaggtcagcggaccacctccttagggacagaccctggcaggtcgctgcccaccgagatttcctcaagtgtgcatagatctgagaggagtcgggagtcgagactcgagattccatcatagcgtaggtgtgtggggttgggagccccctgatgggcttgtctgtgtttgcaccttgtcctgtgtctgaggtcctgtgactgtaccctcctttgccctgggacatctgtatctcttggctttgtaataaatgctgcatactttc

SEQ ID NO: 167232 - DNA, 2604 bp, Homo sapiens; identical to SEQ ID NO: 167228
  Payload ID: 12906
  Gene Symbol: PCGF2
  Gene Name: polycomb group ring finger 2
  Uniprot ID: P35227
  ENST ID: ENST00000620225
  CDS Start-End: 244-1278

SEQ ID NO: 167233 - DNA, 459 bp, Homo sapiens
  Payload ID: 12906
  Gene Symbol: PCGF2
  Gene Name: polycomb group ring finger 2
  ENST ID: ENST00000610747
  CDS Start-End: 1-200
ggcctctccccctcaagtaccgtgtccagccagcctgcaagcggctcaccctagccacggtgcccaccccctccgagggcaccaacaccagcggggcgtccgagtctgaggcccggtcacctggtcaggacagagcaactgcatctaaaagcacaagaagacagaaacctgtaagctctgaccccacccccaccccttgagaggtcagcggaccacctccttagggacagaccctggcaggtcgctgcccaccgagatttcctcaagtgtgcatagatctgagaggagtcgggagtcgagactcgagattccatcatagcgtaggtgtgtggggttgggagccccctgatgggcttgtctgtgtttgcaccttgtcctgtgtctgaggtcctgtgactgtaccctcctttgccctgggacatctgtatctcttggctttgtaataaatgctgcatactt

SEQ ID NO: 167234 - DNA, 1534 bp, Homo sapiens
  Payload ID: 12906
  Gene Symbol: PCGF2
  Gene Name: polycomb group ring finger 2
  ENST ID: ENST00000616129
  CDS Start-End: 317-1090
ccctcggtcccctcccctcccctctccctcccaccccaagccgctttcacaaactcctttcttaccgtaggtttctcccctcccgccgcccgggcgagcgacacggctgcggcccccctcccctcccttccctccctccctcccatccccccctccccgagacccaccggaccccgaacccagatggccgaaacgggctccccgtcttaacgatttggcgtctccctcgaccaccacctctttgtgcagcagcccccgggcagaccctgttccgagggcaacgctccccagtccccccacccccgaccccggaatcatgcatcggactacacggatcaaaatcacagagctgaacccccacctcatgtgtgccctctgcggggggtacttcatcgacgccaccactatcgtggagtgcctgcattccttctgcaaaacctgcatcgtgcgctacctggagaccaacaaatactgccccatgtgtgacgtgcaggtccataaaacccggccgctgctgagcatcaggtctgacaaaacacttcaagacattgtctacaaattggtccctgggctttttaaagatgagatgaaacggcggcgggatttctatgcagcgtaccccctgacggaggtccccaacggctccaatgaggaccgcggcgaggtcttggagcaggagaagggggctctgagtgatgatgagattgtcagcctctccatcgaattctacgaaggtgccaggcaaggaccgggacgagaagaagggccccctggagaatggggatggggacaaagagaaaacaggggtgcgcttcctgcgatgcccagcagccatgaccgtcatgcatcttgccaagtttctccgcaacaagatggatgtgcccagcaagtacaaggtggaggttctgtacgaggacgagccactgaaggaatactacaccctcatggacatcgcctacatctacccctggcggcggaacgggcctctccccctcaagtaccgtgtccagccagcctgcaagcggctcaccctagccacggtgcccaccccctccgagggcaccaacaccagcggggcgtccgagtgtgagtcagtcagcgacaaggctcccagccctgccaccctgccagccacctcctcctccctgcccagcccagccaccccatcccatggctctcccagttcccatgggcctccagccacccaccctacctcccccactcccccttcgacagccagtggggccaccacagctgccaacgggggtagcttgaactgcctgcagacaccatcctccaccagcagggggcgcaagatgactgtcaacggcgctcccgtgccccccttaacttgaggccagggaccctctcccttcttccagccaagcctctccactccttccactttttctgggcccttttttccacctcttctactttccccagctcttcccaccttgggggtggggggcgggttttataaataaatatatatatatatgtacataggaaaaaccaaatatacatacttatt

SEQ ID NO: 167235 - DNA, 1196 bp, Homo sapiens
  Payload ID: 12906
  Gene Symbol: PCGF2
  Gene Name: polycomb group ring finger 2
  ENST ID: ENST00000618506
  CDS Start-End: 209-820
ccctcccaccccaagccgctttcacaaactcctttcttaccgtaggtttctcccctcccgccgcccgggcgagcgacacggctgcggcccccctcccctcccttccctccctccctcccatccccccctccccgagacccaccggaccccgaacccagtctgcaaaacctgcatcgtgcgctacctggagaccaacaaatactgccccatgtgtgacgtgcaggtccataaaacccggccgctgctgagcatcaggtctgacaaaacacttcaagacattgtctacaaattggtccctgggctttttaaagatgagatgaaacggcggcgggatttctatgcagcgtaccccctgacggaggtccccaacggctccaatgaggaccgcggcgaggtcttggagcaggagaagggggctctgagtgatgatgagattgtcagcctctccatcgaattctacgaaggtgccaggcaaggaccgggacgagaagaagggccccctggagaatggggatggggacaaagagaaaacaggggtgcgcttcctgcgatgcccagcagccatgaccgtcatgcatcttgccaagtttctccgcaacaagatggatgtgcccagcaagtacaaggtggaggttctgtacgaggacgagccactgaaggaatactacaccctcatggacatcgcctacatctacccctggcggcggaacgggcctctccccctcaagtaccgtgtccagccagcctgcaagcggctcaccctagccacggtgcccaccccctccgagggcaccaacaccagcggggcgtccgagtgtgagtcagtcagcgacaaggctcccagccctgccaccctgccagccacctcctcctccctgcccagcccagccaccccatcccatggctctcccagttcccatgggcctccagccacccaccctacctcccccactcccccttcgacagccagtggggccaccacagctgccaacgggggtagcttgaactgcctgcagacaccatcctccaccagcagggggcgcaagatgactgtcaacggcgctcccgtgccccccttaacttgaggccagggaccctctcccttcttccagccaagcctctccactccttccactttttctgggcccttttttccacctcttctactttccccagctcttcccaccttgggggtg

SEQ ID NO: 167236 - DNA, 459 bp, Homo sapiens; identical to SEQ ID NO: 167233
  Payload ID: 12906
  Gene Symbol: PCGF2
  Gene Name: polycomb group ring finger 2
  ENST ID: ENST00000632316
  CDS Start-End: 1-200

SEQ ID NO: 167237 - DNA, 1196 bp, Homo sapiens; identical to SEQ ID NO: 167235
  Payload ID: 12906
  Gene Symbol: PCGF2
  Gene Name: polycomb group ring finger 2
  ENST ID: ENST00000633865
  CDS Start-End: 209-820

SEQ ID NO: 167238 - DNA, 1499 bp, Homo sapiens; identical to SEQ ID NO: 167230
  Payload ID: 12906
  Gene Symbol: PCGF2
  Gene Name: polycomb group ring finger 2
  ENST ID: ENST00000632068
  CDS Start-End: 347-1120

SEQ ID NO: 167239 - DNA, 1534 bp, Homo sapiens; identical to SEQ ID NO: 167234
  Payload ID: 12906
  Gene Symbol: PCGF2
  Gene Name: polycomb group ring finger 2
  ENST ID: ENST00000632510
  CDS Start-End: 317-1090

SEQ ID NO: 167240 - DNA, 2179 bp, Homo sapiens; identical to SEQ ID NO: 167229
  Payload ID: 12906
  Gene Symbol: PCGF2
  Gene Name: polycomb group ring finger 2
  ENST ID: ENST00000631610
  CDS Start-End: 202-1236

SEQ ID NO: 167241 - DNA, 3062 bp, Homo sapiens; identical to SEQ ID NO: 167231
  Payload ID: 12906
  Gene Symbol: PCGF2
  Gene Name: polycomb group ring finger 2
  ENST ID: ENST00000631566
  CDS Start-End: 703-1737

SEQ ID NO: 167242 - DNA, 5685 bp, Homo sapiens
  Payload ID: 12907
  Gene Symbol: PCGF3
  Gene Name: polycomb group ring finger 3
  Uniprot ID: Q3KNV8
  ENST ID: ENST00000362003
  CDS Start-End: 396-1124
gcccagacgcacaccgcgcatgctccgagcgcggcgcccccgacgcggcgctcggctcggctcgggcatttccgcctctttgttttaaactccggacgggcttttttctcctcctcttgggggggacccagagggagcggcgccccctcccccctccggcgcggaccccgcgtgcgccttgctcgcccgcagccccgagaccgcaggcgtcacaatgtagcagggaccccaggcgtcgtgctcagaaaatggaaaaagagccagggccggaaggagggtgcagaagcgagtccgcgtgcggagccaggaggcagcgtcgcgtgggagtgctggcctgaagcctccatgccccggcagagggacggacacgcggacgtctagcggagaagccaaagatgttgaccaggaagatcaagctgtgggacatcaacgcccacatcacctgccgcctgtgcagcgggtacctcatcgacgccaccacggtgaccgagtgtctgcacaccttctgcaggagctgcctggtgaagtacctggaggagaacaacacctgccccacctgcaggattgtgatccaccagagccaccccctgcagtacatcggtcatgacagaaccatgcaagatattgtttacaaattggtaccaggcctccaagaagcggaaatgagaaagcagagggagttctatcacaaattgggcatggaggtgccgggagacatcaagggggagacctgctctgcaaaacagcacttagattcccatcggaatggtgaaaccaaagcagacgacagttcaaacaaagaggccgcggaggagaagccggaggaggacaacgactaccaccgcagcgacgagcaggtgagcatctgcctggagtgtaacagcagcaaactgcgcgggctgaagcggaagtggatccgctgctcagcccaggcgaccgtcttgcatctgaagaagttcatcgccaaaaaactcaacctttcatcctttaacgagctggacattttatgcaacgaggagatcctgggcaaggaccacacactcaagttcgtggttgtcactaggtggagattcaagaaggcgccgctcctgctgcactacagacccaagatggacttgctgtgaatggtgccacacagcgcccacagactgggccctcgcacccttgggtgctcccggccgccgcgcttaagaacattgcctctgggtgtcatgtggaccagacttctgaatagagaatatttataacttttgtatgagagagaattcacactcaacaagacactaccagcaccacgtttacagaggatgaaaacacttcacagtctcccagagccgatcgtcctctcccccgccccaccccgtgcttcagccttgcagggagagtgatgctccaggcaacacggttctgagtcaccttctgacacgagctccctctgcttgctttccaggtcttgaaaatctgaattcacttcagtttagtttatgaattttaggtttcatgataagcctcaagtgtagttggacttttattgaatccttcctaagttattgaaaaaatgtcttttcatggtgaatgacaatatttatgttgcctttagcttcttgaagatttagaagttatataaaaaattaatttaaaagcaaaccaaaagaggtttccattaacattatgatttaaccattgtatttaatttcccaccttatgaaacacaacagcagctccctgactggttcgcctttcattgtgtgaggtcggcacttggactcactcagaactgtcgctcacctgtggctgacacacccagccctggaaacggggccccagacgccacgtcgggatttctgacatgctcagcaggtagaccagaggccgtgtgaccagctcagtgctggtttacggaacaactcttacttttaaaaattacttgttcccccaaattgttgagtgccgccgtttggtttcctatgttttctttccctgttttgattttgctgaagggagaggtggtggtggttaggatcagagctctcctggcatccgtggggaggatttgctggtggtggcttcgggctcatgcccagacacactcactgccccgtctgtccaaggcctccccttcccctttgctggtgggaggagctcgtgtgctccttggccgcttactggaagggcgtttttcagagctgcagggacagggtgagcagctgaagggctaggagggaagccggcccccgctctgcagaagctgcatttcagctgaatctgtgtttcagcctcagttggttgcaccgttagcccctctcctcccggatggtcatgtttttgtcacattagagaataaacagccacacacacatttttttttttcctttaaaacagtaacttggaaatatgaaaaggccagaaggaggagcaagggctgttttctggagtggttgaggtgttgtcctgcagttgtcattgtcttctccaccgggctgttcccatttatttcctgtggaactgaatccctcctccctccactccttgggagcccaggtggtccttggccaccattcaggctttccaagaagccaaccaccttggagattttttttcttgaatttcgctgttttcttctgcttcctttagataaaaagcagctcaagagaccttatcttagggatgagaaaaacatgcatattaattccatctgagtgattgtcagtgtaaggccttttaaaacaaaagcaagttctttgttaggaattggtcaaaattcatctctttctttaagcccatcaactcccaggacggtttgagttactcagttacctaagcttgctattcatccaaatcattttctagagtcactgtataagggtctatgagtagctgtgtatgaataaatattacctgtctacctcaaaatacacatactgctgaagcattctgtacaaccgtgtgttatcacagtgcagttttaagtgtaacgttagaacttaggcattttcctgtgtggcggaataagaaaggattaaacagttacaagcctccaaattcaaataaaattaaatcacagttcagatgaaactgaatatcattgtaataatctcataatatatatttgtaactttgtagctatctttgaaatcacttgactttgcaatggtgctaagctgatagatttaaatacacagacgggcgagtggcgcccgtgtcgatgtcttcagccagtggtgaccctgcttttgtaaccgcgttaacctgacaaaacctcagcagcagaagtccctatttttctaggagttcatcgtgcagacagtcttcactacaggactcggccctggggcctctgcctctcgtctgaccttgcagccttagtcgttggaggctggagcgcaatggccctgccgtctgtggagcctctgggcggccttctttcctttctgtcaacctctcatttcacagaaaaaggctgaatttcattttttccagcatgaaagccaggatcggttagtggttggattctattggttttttttttttaaacagatggagttactgtgaagaagttttcacaactatttatgctggtaaaacaaatgctgttaaatcaccttatgcgtcgttttcaacagcagtggggctaattacccggaatacggtctcaccgatgcagttttcatggacatagaaaattcaaatagaatatataatattgaatttaagatttggggggttaaaaaagaaaacttaactttataaaattatttattctattttaagccttctatcatattttcccatccaattgtttggtttcagtggtccagctttatttacaggcatataaaatgaaattgtgagatgttttgcaagcttctttttactttgagtagcttttaatttgtatgtttttatgtggatgaagagcattttttatgcttttgtgcaataggttccaatatgcatttattagacatctgtttaaatggtaatgtagcatttattttgctaaattgaaagggaacatagatggaattccaaaatatgtacattcagctgtttggtttttcgtttttcattgttattattgtgagaatgctgttattggggttgtgtgtgagtgcccgtcagccagtgatgcctcgggccacgctgtggggccacctcagtcctgcctgggtcctggtgccttggaccccacgtgcttgtggccaggctgcccctgggcagggccatgtggcctcagaccacaagagcggagctgccctggcccaagcactgcagctgcctgcacccccgggcttcgcagccttgcttgttttctctgaacagcaacagaacagtgttcacagcgattcaaagggtggcattgggttggacgttctgggtacaagccaacctagtcccacgttgtacgtgaatgtttaatgtgctctcaaaacatggaaaataagtttagtgcacatagctaaatcacaaaacatccaatttctctgtttcctcaggaagtcattactgcgccaccacatcacatgaccttaacatgatcaatgtatttctctgccttgacatttaaatacataaattgagataagtagattagaaaatcattcaaatgataccataatttgtacgggacagggtgcgggcaatggccacgtggccaaggccctgcaggaacgcgccgaggtctccctcaccctccaggtgtccttcgcacccaacagtgcgtctgaggaacgagctgcagtttgagcgttcccctgagatgtgcgtagcctccgtgtaaatgtccactcccatggcttaattgcctatcagacgcattttcccagacgaaagcaatgttgggttggggaagacagtgcagccacccagcctttaccagcagcgtacggcagacgaaggcagtcgaggtgtggaggtgatcacgaagatacatgtgtttgactgtttaatttgaaagtttacattttttatgctttgtgttggtgtgtaatttttgtactcttggtggctagtttttgtcaaatcttttttggaatattgcttaaatgttttgattttatgatagtgaagcttgtattcagtgttttgccaattaatattatatgcttgtaataaaagcaaaagaaaagcttaagtgaaagtgtttctggctggaaatgtattacataaatcatttgtatgagcatgagagatgacttgctcatgggatgagcaatgctgtgggtattggatggaccactcaggcagcctggccgcacacacacacatgcatgctacatatgtgtacgctcagaccacatgcctgcacatatgtccacacaccagcccacggctcccttcctcaccccagccctccccactcccaggttaaccaatgtctcgatttgcttcaggcggcatttgtaaactgtcaccctgcttgcaaaccctcatttaaattggtccagcatttgctaccagagtttaggccacaaactttgtaaagctcagtttgtctccttgcagaaagaggttgctgcagtttggagctggttatgccaaggaaaatacggctaaaaaagaacttactgattcccataggtgtgtcaactgacaaatgaatgttccatctccctacgacaatttgctgcccctccccaaaaaaagcactatggccaaaatttcagtttttaaaggttaagtaaa

SEQ ID NO: 167243 - DNA, 1175 bp, Homo sapiens
  Payload ID: 12907
  Gene Symbol: PCGF3
  Gene Name: polycomb group ring finger 3
  ENST ID: ENST00000400151
  CDS Start-End: 377-898
atgctccgagcgcggcgcccccgacgcggcgctcggctcggctcgggcatttccgcctctttgttttaaactccggacgggcttttttctcctcctcttgggggggacccagagggagcggcgccccctcccccctccggcgcggaccccgcgtgcgccttgctcgcccgcagccccgagaccgcaggcgtcacaatgtagcagggaccccaggcgtcgtgctcagaaaatggaaaaagagccagggccggaaggagggtgcagaagcgagtccgcgtgcggagccaggaggcagcgtcgcgtgggagtgctggcctgaagcctccatgccccggcagagggacggacacgcggacgtctagcggagaagccaaagatgttgaccaggaagatcaagctgtgggacatcaacgcccacatcacctgccgcctgtgcagcgggtacctcatcgacgccaccacggtgaccgagtgtctgcacacctgtacgtgccctgcccgcgccacccagggagggcgcgcccttcccagctctgtgctcttcagaaccttggcttttgtgttaccacacgcttttagctcaagcccgacaaaagcaggaaccaggaccaggggcagagacgatcttgaagataagtcagaaaagtcatttcacgctaaaggtcctgtgggtggtgtcagagcagatgaggcctcgcttaggagagcgaaacacaggagagaccccacattcctcccacggagcagcaaggccagtagccgctgtgacagtgctcactgctggcagtttccaaatctccagaggagttccttagatccttcaaaggggaaccttccagtgtgttcttcacacctgatgtgcgtcctcacacctgatgagtctgtgctttggtgttagaggactcacacctggggctggacctgagtgtttttctaagtgtggctaccgctgacgggcaggtgccatccatcaggctgaggctcggctcttatgctaacctgaggccccatggctggcggccctgctggtgtggacgaccgctgtgtgcgtctcttgatggctggggagcattttgtttaaacaggatctttaaaatgaagtgtacgcttataatacaagtgatgcttgtgtatttctcactttaggaaataaaatatttgccaatttgatagaa

SEQ ID NO: 167244 - DNA, 639 bp, Homo sapiens
  Payload ID: 12907
  Gene Symbol: PCGF3
  Gene Name: polycomb group ring finger 3
  ENST ID: ENST00000433814
  CDS Start-End: 313-639
agatgcgggcacaggagggagcttcccacactgttcaggtcaccagagcctgcgcttctgtggttggttttgatgaggactcgtatttcagctcctgtctctccttgtcagaggccgtgtgaggcgtcacaatgtagcagggaccccaggcgtcgtgctcagaaaatggaaaaagagccagggccggaaggagggtgcagaagcgagtccgcgtgcggagccaggaggcagcgtcgcgtgggagtgctggcctgaagcctccatgccccggcagagggacggacacgcggacgtctagcggagaagccaaagatgttgaccaggaagatcaagctgtgggacatcaacgcccacatcacctgccgcctgtgcagcgggtacctcatcgacgccaccacggtgaccgagtgtctgcacaccttctgcaggagctgcctggtgaagtacctggaggagaacaacacctgccccacctgcaggattgtgatccaccagagccaccccctgcagtacatcggtcatgacagaaccatgcaagatattgtttacaaattggtaccaggcctccaagaagcggaaatgagaaagcagagggagttctatcacaaattgggcatggaggtgccgggagacatcaag

SEQ ID NO: 167245 - DNA, 582 bp, Homo sapiens
  Payload ID: 12907
  Gene Symbol: PCGF3
  Gene Name: polycomb group ring finger 3
  ENST ID: ENST00000427463
  CDS Start-End: 395-582
atgctccgagcgcggcgcccccgacgcggcgctcggctcggctcgggcatttccgcctctttgttttaaactccggacgggcttttttctcctcctcttgggggggacccagagggagcggcgccccctcccccctccggcgcggaccccgcgtgcgccttgctcgcccgcagccccgagaccgcaggcgtcacaatgtagcagggaccccaggcgtcgtgctcaggtgccgtttctgtgctagaaaatggaaaaagagccagggccggaaggagggtgcagaagcgagtccgcgtgcggagccaggaggcagcgtcgcgtgggagtgctggcctgaagcctccatgccccggcagagggacggacacgcggacgtctagcggagaagccaaagatgttgaccaggaagatcaagctgtgggacatcaacgcccacatcacctgccgcctgtgcagcgggtacctcatcgacgccaccacggtgaccgagtgtctgcacaccttctgcaggagctgcctggtgaagtacctggaggagaacaacacctgccccacctgcaggattgtgatccaccagagcca

SEQ ID NO: 167246 - DNA, 2621 bp, Homo sapiens
  Payload ID: 12907
  Gene Symbol: PCGF3
  Gene Name: polycomb group ring finger 3
  ENST ID: ENST00000430644
  CDS Start-End: 329-673
atttccgcctctttgttttaaactccggacgggcttttttctcctcctcttgggggggacccagagggagcggcgccccctcccccctccggcgcggaccccgcgtgcgccttgctcgcccgcagccccgagaccgcaggcgtcacaatgtagcagggaccccaggcgtcgtgctcagaaaatggaaaaagagccagggccggaaggagggtgcagaagcgagtccgcgtgcggagccaggaggcagcgtcgcgtgggagtgctggcctgaagcctccatgccccggcagagggacggacacgcggacgtctagcggagaagccaaagatgttgaccaggaagatcaagctgtgggacatcaacgcccacatcacctgccgcctgtgcagcgggtacctcatcgacgccaccacggtgaccgagtgtctgcacacctctcaagcccgacaaaagcaggaaccaggaccaggggcagagacgatcttgaagataagtcagaaaagtcatttcacgctaaaggtcctgtgggtggtgtcagagcagatgaggcctcgcttaggagagcgaaacacaggagagaccccacattcctcccacggagcagcaaggccagtagccgctgtgacagtgctcactgctggcagtttccaaatctccagaggagttccttagatccttcaaaggggaaccttccagtgtgttcttcacacctgatgtgcgtcctcacacctgatgagtctgtgctttggtgttagaggactcacacctggggctggacctgagtgtttttctaagtgtggctaccgctgacgggcaggtgccatccatcaggctgaggctcggctcttatgctaacctgaggccccatggctggcggccctgctggtgtggacgaccgctgtgtgcgtctcttgatggctggggagcattttgtttaaacaggatctttaaaatgaagtgtacgcttataatacaagtgatgcttgtgtatttctcactttaggaaataaaatatttgccaatttgatagaattttgactttaacgttaatcgtatttttagatattggttagcatattttatgttaggttattttcatttgattttatctagttgtacgtagaagatactgtcatcttttaggacaaagtattgtaaaattatctgttttagcccatgttctgatgacccacagctctgtcacctttgagcatcatctccccattctaagtttttttcccacttaattcctaaccctgcctctttgaggaagcccattgacggggcaattaaaaccttctcattgctcctgagaccagaacggcaagatgtttcctttcagaagctgagagccacaaggaggacagcagtgagcatctgcacagaaacgagctcagagacgcccgtgttcagtggagcacgccgatggggtgggcgccctggctctagacgctctcctaacacacctgtgctttgatgacagtctgcaggagctgcctggtgaagtacctggaggagaacaacacctgccccacctgcaggattgtgatccaccagagccaccccctgcagtacatcggtcatgacagaaccatgcaagatattgtttacaaattggtaccaggcctccaagaagcggaaatgagaaagcagagggagttctatcacaaattgggcatggaggtgccgggagacatcaagggggagacctgctctgcaaaacagcacttagattcccatcggaatggtgaaaccaaagcagacgacagttcaaacaaagaggccgcggaggagaagccggaggaggacaacgactaccaccgcagcgacgagcaggtgagcatctgcctggagtgtaacagcagcaaactgcgcgggctgaagcggaagtggatccgctgctcagcccaggcgaccgtcttgcatctgaagaagttcatcgccaaaaaactcaacctttcatcctttaacgagctggacattttatgcaacgaggagatcctgggcaaggaccacacactcaagttcgtggttgtcactaggtggagattcaaggcgccgctcctgctgcactacagacccaagatggacttgctgtgaatggtgccacacagcgcccacagactgggccctcgcacccttgggtgctcccggccgccgcgcttaagaacattgcctctgggtgtcatgtggaccagacttctgaatagagaatatttataacttttgtatgagagagaattcacactcaacaagacactaccagcaccacgtttacagaggatgaaaacacttcacagtctcccagagccgatcgtcctctcccccgccccaccccgtgcttcagccttgcagggagagtgatgctccaggcaacacggttctgagtcaccttctgacacgagctccctctgcttgctttccaggtcttgaaaatctgaattcacttcagtttagtttatgaattttaggtttcatgataagcctcaagtgtagttggacttttattgaatccttcctaagttattgaaaaaatgtcttttcatggtgaatgacaatatttatgttgcctttagcttcttgaagatttagaagttatataaaaaattaatttaaaagc

SEQ ID NO: 167247 - DNA, 3609 bp, Homo sapiens
  Payload ID: 12907
  Gene Symbol: PCGF3
  Gene Name: polycomb group ring finger 3
  ENST ID: ENST00000440452
  CDS Start-End: 317-661
ttgctcgcccgcagccccgagaccgcaggcgtcacaatgtagcagggaccccaggcgtcgtgctcagaaaatggaaaaagagccagggccggaaggagggtgcagaagcgagtccgcgtgcggagccaggaggcagcgtcgcgtgggagtgctggcctgaagcctccatgccccggcagagggacggacacgcggacgtctagcggaggctcccgtgtcctcagtatgcatcaggtctcccgaacctcacagccccgcagggaggaggagaaggggaggatttgactttggaagtctctgtgaccagaagccaaagatgttgaccaggaagatcaagctgtgggacatcaacgcccacatcacctgccgcctgtgcagcgggtacctcatcgacgccaccacggtgaccgagtgtctgcacacctctcaagcccgacaaaagcaggaaccaggaccaggggcagagacgatcttgaagataagtcagaaaagtcatttcacgctaaaggtcctgtgggtggtgtcagagcagatgaggcctcgcttaggagagcgaaacacaggagagaccccacattcctcccacggagcagcaaggccagtagccgctgtgacagtgctcactgctggcagtttccaaatctccagaggagttccttagatccttcaaaggggaaccttccagtgtgttcttcacacctgatgtgcgtcctcacacctgatgagtctgtgctttggtgttagaggactcacacctggggctggacctgagtgtttttctaagtgtggctaccgctgacgggcaggtgccatccatcaggctgaggctcggctcttatgctaacctgaggccccatggctggcggccctgctggtgtggacgaccgctgtgtgcgtctcttgatggctggggagcattttgtttaaacaggatctttaaaatgaagtgtacgcttataatacaagtgatgcttgtgtatttctcactttaggaaataaaatatttgccaatttgatagaattttgactttaacgttaatcgtatttttagatattggttagcatattttatgttaggttattttcatttgattttatctagttgtacgtagaagatactgtcatcttttaggacaaagtattgtaaaattatctgttttagcccatgttctgatgacccacagctctgtcacctttgagcatcatctccccattctaagtttttttcccacttaattcctaaccctgcctctttgaggaagcccattgacggggcaattaaaaccttctcattgctcctgagaccagaacggcaagatgtttcctttcagaagctgagagccacaaggaggacagcagtgagcatctgcacagaaacgagctcagagacgcccgtgttcagtggagcacgccgatggggtgggcgccctggctctagacgctctcctaacacacctgtgctttgatgacagtctgcaggagctgcctggtgaagtacctggaggagaacaacacctgccccacctgcaggattgtgatccaccagagccaccccctgcagtacatcggtcatgacagaaccatgcaagatattgtttacaaattggtaccaggcctccaagaagcggaaatgagaaagcagagggagttctatcacaaattgggcatggaggtgccgggagacatcaagggggagacctgctctgcaaaacagcacttagattcccatcggaatggtgaaaccaaagcagacgacagttcaaacaaagaggccgcggaggagaagccggaggaggacaacgactaccaccgcagcgacgagcaggtgagcatctgcctggagtgtaacagcagcaaactgcgcgggctgaagcggaagtggatccgctgctcagcccaggcgaccgtcttgcatctgaagaagttcatcgccaaaaaactcaacctttcatcctttaacgagctggacattttatgcaacgaggagatcctgggcaaggaccacacactcaagttcgtggttgtcactaggtggagattcaagaaggcgccgctcctgctgcactacagacccaagatggacttgctgtgaatggtgccacacagcgcccacagactgggccctcgcacccttgggtgctcccggccgccgcgcttaagaacattgcctctgggtgtcatgtggaccagacttctgaatagagaatatttataacttttgtatgagagagaattcacactcaacaagacactaccagcaccacgtttacagaggatgaaaacacttcacagtctcccagagccgatcgtcctctcccccgccccaccccgtgcttcagccttgcagggagagtgatgctccaggcaacacggttctgagtcaccttctgacacgagctccctctgcttgctttccagcagctccctgactggttcgcctttcattgtgtgaggtcggcacttggactcactcagaactgtcgctcacctgtggctgacacacccagccctggaaacggggccccagacgccacgtcgggatttctgacatgctcagcaggtagaccagaggccgtgtgaccagctcagtgctggtttacggaacaactcttacttttaaaaattacttgttcccccaaattgttgagtgccgccgtttggtttcctatgttttctttccctgttttgattttgctgaagggagaggtggtggtggttaggatcagagctctcctggcatccgtggggaggatttgctggtggtggcttcgggctcatgcccagacacactcactgccccgtctgtccaaggcctccccttcccctttgctggtgggaggagctcgtgtgctccttggccgcttactggaagggcgtttttcagagctgcagggacagggtgagcagctgaagggctaggagggaagccggcccccgctctgcagaagctgcatttcagctgaatctgtgtttcagcctcagttggttgcaccgttagcccctctcctcccggatggtcatgtttttgtcacattagagaataaacagccacacacacatttttttttttcctttaaaacagtaacttggaaatatgaaaaggccagaaggaggagcaagggctgttttctggagtggttgaggtgttgtcctgcagttgtcattgtcttctccaccgggctgttcccatttatttcctgtggaactgaatccctcctccctccactccttgggagcccaggtggtccttggccaccattcaggctttccaagaagccaaccaccttggagattttttttcttgaatttcgctgttttcttctgcttcctttagataaaaagcagctcaagagaccttatcttagggatgagaaaaacatgcatattaattccatctgagtgattgtcagtgtaaggccttttaaaacaaaagcaagttctttgttaggaattggtcaaaattcatctctttctttaagcccatcaactcccaggacggtttgagttactcagttacctaagcttgctattcatccaaatcattttctagagtcactgtataagggtctatgagtagctgtgtatgaataaatattacctgtctacctc

SEQ ID NO: 167248 - DNA, 589 bp, Homo sapiens
  Payload ID: 12907
  Gene Symbol: PCGF3
  Gene Name: polycomb group ring finger 3
  ENST ID: ENST00000419774
  CDS Start-End: 468-589
cttgccgcggggtgggagcccagacgcacaccgcgcatgctccgagcgcggcgcccccgacgcggcgctcggctcggctcgggcatttccgcctctttgttttaaactccggacgggcttttttctcctcctcttgggggggacccagagggagcggcgccccctcccccctccggcgcggaccccgcgtgcgccttgctcgcccgcagccccgagaccgcaggcgtcacaatgtagcagggaccccaggcgtcgtgctcagaaaatggaaaaagagccagggccggaaggagggtgcagaagcgagtccgcgtgcggagccaggaggcagcgtcgcgtgggagtgctggcctgaagcctccatgccccggcagagggacggacacgcggacgtctagcggagccccgcagggaggaggagaaggggaggatttgactttggaagtctctgtgaccagaagccaaagatgttgaccaggaagatcaagctgtgggacatcaacgcccacatcacctgccgcctgtgcagcgggtacctcatcgacgccaccacggtgaccgagtgtctgcacaccttctgcaggagctg

SEQ ID NO: 167249 - DNA, 1652 bp, Homo sapiens
  Payload ID: 12907
  Gene Symbol: PCGF3
  Gene Name: polycomb group ring finger 3
  Uniprot ID: Q3KNV8
  ENST ID: ENST00000470161
  CDS Start-End: 395-1123
atgctccgagcgcggcgcccccgacgcggcgctcggctcggctcgggcatttccgcctctttgttttaaactccggacgggcttttttctcctcctcttgggggggacccagagggagcggcgccccctcccccctccggcgcggaccccgcgtgcgccttgctcgcccgcagccccgagaccgcaggcgtcacaatgtagcagggaccccaggcgtcgtgctcaggtgccgtttctgtgctagaaaatggaaaaagagccagggccggaaggagggtgcagaagcgagtccgcgtgcggagccaggaggcagcgtcgcgtgggagtgctggcctgaagcctccatgccccggcagagggacggacacgcggacgtctagcggagaagccaaagatgttgaccaggaagatcaagctgtgggacatcaacgcccacatcacctgccgcctgtgcagcgggtacctcatcgacgccaccacggtgaccgagtgtctgcacaccttctgcaggagctgcctggtgaagtacctggaggagaacaacacctgccccacctgcaggattgtgatccaccagagccaccccctgcagtacatcggtcatgacagaaccatgcaagatattgtttacaaattggtaccaggcctccaagaagcggaaatgagaaagcagagggagttctatcacaaattgggcatggaggtgccgggagacatcaagggggagacctgctctgcaaaacagcacttagattcccatcggaatggtgaaaccaaagcagacgacagttcaaacaaagaggccgcggaggagaagccggaggaggacaacgactaccaccgcagcgacgagcaggtgagcatctgcctggagtgtaacagcagcaaactgcgcgggctgaagcggaagtggatccgctgctcagcccaggcgaccgtcttgcatctgaagaagttcatcgccaaaaaactcaacctttcatcctttaacgagctggacattttatgcaacgaggagatcctgggcaaggaccacacactcaagttcgtggttgtcactaggtggagattcaagaaggcgccgctcctgctgcactacagacccaagatggacttgctgtgaatggtgccacacagcgcccacagactgggccctcgcacccttgggtgctcccggccgccgcgcttaagaacattgcctctgggtgtcatgtggaccagacttctgaatagagaatatttataacttttgtatgagagagaattcacactcaacaagacactaccagcaccacgtttacagaggatgaaaacacttcacagtctcccagagccgatcgtcctctcccccgccccaccccgtgcttcagccttgcagggagagtgatgctccaggcaacacggttctgagtcaccttctgacacgagctccctctgcttgctttccaggtcttgaaaatctgaattcacttcagtttagtttatgaattttaggtttcatgataagcctcaagtgtagttggacttttattgaatccttcctaagttattgaaaaaatgtcttttcatggtgaatgacaatatttatgttgcctttagcttcttgaagatttagaagttatataaaaaattaatttaaaagcaaaccaaaa

SEQ ID NO: 167250 - DNA, 1725 bp, Homo sapiens
  Payload ID: 12907
  Gene Symbol: PCGF3
  Gene Name: polycomb group ring finger 3
  Uniprot ID: Q3KNV8
  ENST ID: ENST00000505655
  CDS Start-End: 45-773
cggcagagggacggacacgcggacgtctagcggagaagccaaagatgttgaccaggaagatcaagctgtgggacatcaacgcccacatcacctgccgcctgtgcagcgggtacctcatcgacgccaccacggtgaccgagtgtctgcacaccttctgcaggagctgcctggtgaagtacctggaggagaacaacacctgccccacctgcaggattgtgatccaccagagccaccccctgcagtacatcggtcatgacagaaccatgcaagatattgtttacaaattggtaccaggcctccaagaagcggaaatgagaaagcagagggagttctatcacaaattgggcatggaggtgccgggagacatcaagggggagacctgctctgcaaaacagcacttagattcccatcggaatggtgaaaccaaagcagacgacagttcaaacaaagaggccgcggaggagaagccggaggaggacaacgactaccaccgcagcgacgagcaggtgagcatctgcctggagtgtaacagcagcaaactgcgcgggctgaagcggaagtggatccgctgctcagcccaggcgaccgtcttgcatctgaagaagttcatcgccaaaaaactcaacctttcatcctttaacgagctggacattttatgcaacgaggagatcctgggcaaggaccacacactcaagttcgtggttgtcactaggtggagattcaagaaggcgccgctcctgctgcactacagacccaagatggacttgctgtgaatggtgccacacagcgcccacagactgggccctcgcacccttgggtgctcccggccgccgcgcttaagaacattgcctctgggtgtcatgtggaccagacttctgaatagagaatatttataacttttgtatgagagagaattcacactcaacaagacactaccagcaccacgtttacagaggatgaaaacacttcacagtctcccagagccgatcgtcctctcccccgccccaccccgtgcttcagccttgcagggagagtgatgctccaggcaacacggttctgagtcaccttctgacacgagctccctctgcttgctttccaggtcttgaaaatctgaattcacttcagtttagtttatgaattttaggtttcatgataagcctcaagtgtagttggacttttattgaatccttcctaagttattgaaaaaatgtcttttcatggtgaatgacaatatttatgttgcctttagcttcttgaagatttagaagttatataaaaaattaatttaaaagcaaaccaaaagaggtttccattaacattatgatttaaccattgtatttaatttcccaccttatgaaacacaacagcagctccctgactggttcgcctttcattgtgtgaggtcggcacttggactcactcagaactgtcgctcacctgtggctgacacacccagccctggaaacggggccccagacgccacgtcgggatttctgacatgctcagcaggtagaccagaggccgtgtgaccagctcagtgctggtttacggaacaactcttacttttaaaaattacttgttcccccaaattgttgagtgccgccgtttggtttcctatgttttctttccctgttttgattttgctgaagggagaggtggtggtggttaggatcagagctctcctggcatccgtggggaggatttgctggtggtggcttcgggctc

SEQ ID NO: 167251 - DNA, 1899 bp, Homo sapiens
  Payload ID: 12907
  Gene Symbol: PCGF3
  Gene Name: polycomb group ring finger 3
  ENST ID: ENST00000620529
  CDS Start-End: 788-1186
ttgtaaccgcgttaacctgacaaaacctcagcagcagaagtccctatttttctaggagttcatcgtgcagacagtcttcactacaggactcggccctggggcctctgcctctcgtctgaccttgcagccttagtcgttggaggctggagcgcaatggccctgccgtctgtggagcctctgggcggccttctttcctttctgtcaacctctcatttcacagaaaaaggctgaatttcattttttccagcatgaaagccaggatcggttagtggttggattctattggttttttttttttaaacagatggagttactgtgaagaagttttcacaactatttatgctggtaaaacaaatgctgttaaatcaccttatgcgtcgttttcaacagcagtggggctaattacccggaatacggtctcaccgatgcagttttcatggacatagaaaattcaaatagaatatataatattgaatttaagatttggggggttaaaaaagaaaacttaactttataaaattatttattctattttaagccttctatcatattttcccatccaattgtttggtttcagtggtccagctttatttacaggcatataaaatgaaattgtgagatgttttgcaagcttctttttactttgagtagcttttaatttgtatgtttttatgtggatgaagagcattttttatgcttttgtgcaataggttccaatatgcatttattagacatctgtttaaatggtaatgtagcatttattttgctaaattgaaagggaacatagatggaattccaaaatatgtacattcagctgtttggtttttcgtttttcattgttattattgtgagaatgctgttattggggttgtgtgtgagtgcccgtcagccagtgatgcctcgggccacgctgtggggccacctcagtcctgcctgggtcctggtgccttggaccccacgtgcttgtggccaggctgcccctgggcagggccatgtggcctcagaccacaagagcggagctgccctggcccaagcactgcagctgcctgcacccccgggcttcgcagccttgcttgttttctctgaacagcaacagaacagtgttcacagcgattcaaagggtggcattgggttggacgttctgggtacaagccaacctagtcccacgttgtacgtgaatgtttaatgtgctctcaaaacatggaaaataagtttagtgcacatagctaaatcacaaaacatccaatttctctgtttcctcaggaagtcattactgcgccaccacatcacatgaccttaacatgatcaatgtatttctctgccttgacatttaaatacataaattgagataagtagattagaaaatcattcaaatgataccataatttgtacgggacagggtgcgggcaatggccacgtggccaaggccctgcaggaacgcgccgaggtctccctcaccctccaggtgtccttcgcacccaacagtgcgtctgaggaacgagctgcagtttgagcgttcccctgagatgtgcgtagcctccgtgtaaatgtccactcccatggcttaattgcctatcagacgcattttcccagacgaaagcaatgttgggttggggaagacagtgcagccacccagcctttaccagcagcgtacggcagacgaaggcagtcgaggtgtggaggtgatcacgaagatacatgtgtttgactgtttaatttgaaagtttacattttttatgctttgtgttggtgtgtaatttttgtactcttggtggctagtttttgtcaaatcttttttggaatattgcttaaatgttttgattttatgatagtgaagcttgtattcagtgttttgccaattaatattatatgcttgtaataaaagcaaaagaaaagctt

SEQ ID NO: 167252 - DNA, 7018 bp, Homo sapiens
  Payload ID: 12908
  Gene Symbol: PCGF5
  Gene Name: polycomb group ring finger 5
  Uniprot ID: Q86SE9
  ENST ID: ENST00000336126
  CDS Start-End: 233-1003
gaggccggcgcgctggcgggcgaggagcggcggcggtggcggccgctggacatgggaaagcggaaccaccaaaaggagtgatgatcaacgatctcatgataaatctggatgctagttctcatgcctcaggacatcctactgggaacgacacaccagctcctgggatcagactttcatctacttaggacccctctttgcccagactactaaagccagtcttcactagccacgaatggctacccaaaggaaacacttggtgaaagattttaatccttacattacctgctatatctgtaaagggtatctgatcaagccaacaacagtgacggaatgcctccatacattctgtaagacttgtattgttcagcactttgaagatagcaatgattgcccaaggtgtggcaaccaagttcatgagacaaatccattagaaatgttgaggttggacaatacattagaggaaattatatttaagctggtccctggactacgagaacaagaacttgagcgtgaatctgaattttggaagaaaaataagcctcaagaaaatggacaagatgatacttcaaaagctgacaaaccgaaagtagatgaagaaggtgatgaaaatgaagatgataaagattatcacagaagtgacccacaaattgctatctgtctagattgtttacgaaataatgggcaatcaggggacaatgtagtaaagggtttaatgaagaaattcattcgatgttctacacgtgtaactgtgggaactattaaaaaatttctaagtttaaaactaaaacttccaagttcttatgagttggatgtgctgtgcaatggtgaaattatggggaaggatcatactatggaattcatctacatgacaagatggcgactaagaggcgaaaactttcggtgtctgaactgctcagcttcgcaagtctgctctcaggatggccctttgtatcagtcataccctatggtactgcagtatcgaccaagaattgatttcggttagaccaaggggcccagacctcactgagatgaatcctgcactatttgtttactcgtcaacagattgcacagttaacggtgtgtggactagaggaacacaaccagattttcagcatgcaaataaggccattgtctatctctaaattgtcagttgcattcatgttgtttctattaggagcaaaccaagtgccattctgctactgaaccatctgcataaggtatttgtgttgtctcaaagtgtgcaagtcatggtaaaaatcagttagctgtgccgccatgattcacccttctgaatattttgcttgcctgttccaagattgttctaatgtttaattacactagtaaaatggctcaatttttgtggtgttgcagttttcacatacttactcttttattcttgtttaaatagcgtactctacaagaaactaataattatatcttgaaattattttgtatggaagtatatttagaaaagtggtttttgagccactgtcttgttcttgataagctttttgtgtgaaaaaaagttcattcttgagtgtgcaagtccttttgccaagaattccaattattctgtaacattagagcacaatataattgtagacattctaagcatctgtccgtgtagtctaccaattgcacaaggaaggcatgttagccctccagattgaaaatgtatgtgacctcttgaactgaagttagattcccaaccattcaaaatgttggcagctgatcacatttacttctgataaaagtaatgtgtaagtaaggttaatcttctttcataatgccttatgacaagcaggtgctgcttcatgaaacgtcattgtatagcccatttcatgtatcattacattgttgctgttatttaatgagtgcattatttctctttttaagttggccttaggtatatgtcattgtggcatgcagagggttatgacgattttaaatattaggatttttagagcacataacattagctattttatggatttcaaaagtctcaaaacagttgtagattaaaactgttagttacctttcacatttccaaactatgtgcataaaatagaataaatgcagtatagaactatgctaaccaaaattaataggttaagggtattttattttaaatcctgtagtaattggggaaatgagaagattattattttatacatgagttcattaagatcagaaatacaaaatgtcctgtattttgcagttttgttaagtcttccattcgttttaggattagtctgcaagtcaaagaaagtcttgttaccttaaattatatgaaaactgtcattttaaatcttttaatatttacagttttcaaaaaccttacttggaaattgctttgaaacaaacaagctaacctttgaaacttaggaaaaaatcttgaaagttaggaaaaatatttgagaaatatgacgagcacaatctgtgtgttacacacatttagtttttatactgcatatgtggtaaatgtgtcacattttccagtaaaatgtatcagaaatcaatgccttctgaatttcaaaatgattcttagaaataagatattgtacaactctagcaaacatacaaagtacagctaaatcttaatatatttcactatgtaaaaggctgaaacttcataattatctgttccttctatctttttttgagtcaaaaagtctattaaatttttctgttgttgttccaactttggtgaaaaaggttatggcaatactttaactttgttttgttacattgtttttgttcttggaatggctcacaagcagaatttaaaaggcagattttcattaactataaatggctgaaaaaactgaatttactatctagctacagaaattatttttctatggtgtgaaactgttcccagacatccctaagaacttttacaaattattataaatttgtcacacctaggtcagcgattaaaatagtgttttgcaaatggaattttaattaactcaaaatgaattaagagtgcattttaaaaatcacaagtgagactttgatgttttggccccccagccaaaacttaatggtcataaatgaattttatctacaaaatctctttaaatttggctggttgccttgtcatatgtaatttcactattttccaaggaaatatataggaagcaattatgaaactgagaatagttttatatagaattcttttatttactgataatgcattaacatttttattgaaatgcaatggaatatgtgccaaaacacgtgaaaagcttacataaagaaaggcatcagttgtcgtttggagaaaggtacacatttttttgatggtcctaagtgatatggtattactactagaatcacagatttcttcaactgacttattttggtatattcaactacagctttctaaggataggactactttcatgtctagtaatacactgtattccccgttaattatcccttaagtcagattgtagaatttgcaagaaactaggtatagaaaaaatgtacaggcaacttttgtggttagctttataaatttagggtgcttataaaatgataaaatgaattctttaaataacctataggaatcatctgaatctgtaacatcagagactaaaactaaaagttttctttaatctgttgtttcttaagcaataaactgaaagacctttacttccataaaagattttgttatctcttttatctgccttagaaattataagtataaaagggtcaagggaacttagatataaagaatgactgtggtttataaacattactttaattgaagtaatcacatcagttaatagagaaatcaaaatatgtatggccttttctctagattagcaaaacagctttacaaagtatgaaaaaataaactaaaatgctcattgatgaggtaatactcagtctggagtacaggtaacttgggtaatgccttttaactactcttagaggagtatattatttctttatacattaaacatctatcccatagtaatgtgccacattttataaacgtaatgactttgctcaactacattacacactcaaatgtaatctaaatttaaactgattatttaaggaaaaaaagtgtgttatataatattgtgaactgtttagctttactgaaatatttaagagaaagtgcctcattactaaagtgcatttctgttttaaatttactgcataaagtttgagttatctgtacctgtctcttatgaatggtttcatatctaaataggctcttgtaagttaatttttttggaagattttcataagaatatagatatcaccaaagacattttacagtaaattaataaccatgttggagagacggttttaacagtttggaggttggaaatttttagattgcaatttaattttatatagttaggcaataaccttgattaattgctaaaatatcaccaaagaaaggctttaaactgaattttcttggtgagatcagtcaaatgcaggcttttcttgcaataatcagaacacacttcctttcaaatatgttcattgtttttcagcatcatctaacagatcttagtaaatctaaatcctcaaagatgagaaagaggtaaacacaacaaatagccttcctctgcatgaaaagtgagagaaatacatactttgaaaagaaagttcagatttttaatttgagagggtttttatttcatggaggcagtgttaactaaaattaagcttagatttagctcctgtattattcataatatgagaaattttattaaaggcagactttggtaaaagtgccaacacacttacttgtatagaaaagacttcattctatgggatttatataagtaagtgctttctctatattcaaaatatttcataaggacctgtggtttttttccccttaaaaagcaactctaggccgggcacagtggctcatgcctgtaatcccagcactttgggaggccaaggcaggtggatcacttgaggtcaggagttcgagaccagctggttaacatggtgaaaccccatctctactaaaaatacaaaaattagccaggtgtggtggcacgcgcctgtaatcccagctacatgggaggttgaggcaggagaatctcttgaacccaggaggtggaggttgcagtgagccgcaattacaccactgcactccagcctgggtgacacagcgagtctccatctccaaaaaaaattcaactcttggtcttgtttctcagcacttagtttattgttattagaatttagccatacagccaactttgacaaaatgggtcacagaacaagcatgtacatcaagaggaagttccatatcccccttgtaccatttctccttgggaactcatgctatgggctaccttaaaggtaaaactcatcttatggagtctttctgataggtcactaggtaaaactccttggatagggtgaaaatggatgcacactctattacatactctggtttatcataaggaattttccagaaagctaagctttatactaataagatattggttggtagtaggaacttcaaaaatgaatgagtttgccataactttaattttctggattagaaacacaaaacttgaaatgcaattatcaatattttgtaatatatattcctacagtttgggtagaaataaggaacatgtctgctagatctggtttatgaaaaagtgaaaaatattaaatacaccagagactcaaaccctttcaaggcacacaataactgttctggatttacctgacaaacctagttgagtagcattttgacagaaaatatcagactgaaagttcattcaaatgtacttaaatgtacaatacagtgttcaatagtttttattgcagtgatgtttttccaataatttaagtaattctcttcctagtataatacagttttcataaataatgtttacttgctttctttatattttcaaataaaattaaaatgctcgagcacttcctttcagaaagttataaaattaaaaataattattttaaatgctcattcaaatgtgtctgtatacttgctatgcccctttttctataattccaaactgagactgatttttcagagatttttaactttaataattttaaatctagaatcaagtgaaacagatatgttaaatactgagtctagttttcttccatcttatggagcttcatggaataagaaactaatctagtgcaaatgaagattaaatatttctgggtgatggagagatagtcaacaaatttatttatccatcctctgcacatcagtccactggagcaggagttctacacattaaaaatgtaatgggatcagcctagcattgtttggtgttcttttgttgtattttttagaatgggggtgggggcctaagtgtccttatgaagctgtggtccacgacaggagcttgttgggggagtaccagggttctgctgctttcctgcatctgagcaacacaacagagatcatcagttttaaatagagtagccctcacaatcaaaatatcatagaatatattgtaaagttatgttgctaattttcctttgaaatataaaatattttaagctttttgtcaaaagtggtaacatcttaatacaaataaaaacctttttgtggttgtaagatttagcttataaatcattcaaattgaagtgaaagaattaccaggtcattgttaatgacttagtctattaagaatatatgtatttttgtaaaggaaaagcacttgtagatatttaatcagtacaagatatgtcttttgcagaaataaaatgctgcttagagattctccttaaatattttttatttttgtgctcaaatgtattttctgttgatctatggaatgttctgtacaaagctgtataattgtactgttgggctagatactttttttttttaatctggacttagccaagtatatttcaccatgttaaaatacagtatctttgttattaaaaattaaattgcataatttattattgtttgtcatctttaatattagtcactgtagattgcagccttcattaaaaatatctcctttaa

SEQ ID NO: 167253 - DNA, 7144 bp, Homo sapiens
  Payload ID: 12908
  Gene Symbol: PCGF5
  Gene Name: polycomb group ring finger 5
  Uniprot ID: Q86SE9
  ENST ID: ENST00000543648
  CDS Start-End: 361-1131
cacaacgttcccgtttgcttatagttgtcaacgaccatgatctctggacccacactacagtaacaagtttgtcagtcattttcagataaggtgcaaatcaagggatggctttgtccccacttcggcgcaggtgggacagacttggggaagacgcagctgaagagacaaattctcaggacatgggaaagcggaaccaccaaaaggagtgatgatcaacgatctcatgataaatctggatgctagttctcatgcctcaggacatcctactgggaacgacacaccagctcctgggatcagactttcatctacttaggacccctctttgcccagactactaaagccagtcttcactagccacgaatggctacccaaaggaaacacttggtgaaagattttaatccttacattacctgctatatctgtaaagggtatctgatcaagccaacaacagtgacggaatgcctccatacattctgtaagacttgtattgttcagcactttgaagatagcaatgattgcccaaggtgtggcaaccaagttcatgagacaaatccattagaaatgttgaggttggacaatacattagaggaaattatatttaagctggtccctggactacgagaacaagaacttgagcgtgaatctgaattttggaagaaaaataagcctcaagaaaatggacaagatgatacttcaaaagctgacaaaccgaaagtagatgaagaaggtgatgaaaatgaagatgataaagattatcacagaagtgacccacaaattgctatctgtctagattgtttacgaaataatgggcaatcaggggacaatgtagtaaagggtttaatgaagaaattcattcgatgttctacacgtgtaactgtgggaactattaaaaaatttctaagtttaaaactaaaacttccaagttcttatgagttggatgtgctgtgcaatggtgaaattatggggaaggatcatactatggaattcatctacatgacaagatggcgactaagaggcgaaaactttcggtgtctgaactgctcagcttcgcaagtctgctctcaggatggccctttgtatcagtcataccctatggtactgcagtatcgaccaagaattgatttcggttagaccaaggggcccagacctcactgagatgaatcctgcactatttgtttactcgtcaacagattgcacagttaacggtgtgtggactagaggaacacaaccagattttcagcatgcaaataaggccattgtctatctctaaattgtcagttgcattcatgttgtttctattaggagcaaaccaagtgccattctgctactgaaccatctgcataaggtatttgtgttgtctcaaagtgtgcaagtcatggtaaaaatcagttagctgtgccgccatgattcacccttctgaatattttgcttgcctgttccaagattgttctaatgtttaattacactagtaaaatggctcaatttttgtggtgttgcagttttcacatacttactcttttattcttgtttaaatagcgtactctacaagaaactaataattatatcttgaaattattttgtatggaagtatatttagaaaagtggtttttgagccactgtcttgttcttgataagctttttgtgtgaaaaaaagttcattcttgagtgtgcaagtccttttgccaagaattccaattattctgtaacattagagcacaatataattgtagacattctaagcatctgtccgtgtagtctaccaattgcacaaggaaggcatgttagccctccagattgaaaatgtatgtgacctcttgaactgaagttagattcccaaccattcaaaatgttggcagctgatcacatttacttctgataaaagtaatgtgtaagtaaggttaatcttctttcataatgccttatgacaagcaggtgctgcttcatgaaacgtcattgtatagcccatttcatgtatcattacattgttgctgttatttaatgagtgcattatttctctttttaagttggccttaggtatatgtcattgtggcatgcagagggttatgacgattttaaatattaggatttttagagcacataacattagctattttatggatttcaaaagtctcaaaacagttgtagattaaaactgttagttacctttcacatttccaaactatgtgcataaaatagaataaatgcagtatagaactatgctaaccaaaattaataggttaagggtattttattttaaatcctgtagtaattggggaaatgagaagattattattttatacatgagttcattaagatcagaaatacaaaatgtcctgtattttgcagttttgttaagtcttccattcgttttaggattagtctgcaagtcaaagaaagtcttgttaccttaaattatatgaaaactgtcattttaaatcttttaatatttacagttttcaaaaaccttacttggaaattgctttgaaacaaacaagctaacctttgaaacttaggaaaaaatcttgaaagttaggaaaaatatttgagaaatatgacgagcacaatctgtgtgttacacacatttagtttttatactgcatatgtggtaaatgtgtcacattttccagtaaaatgtatcagaaatcaatgccttctgaatttcaaaatgattcttagaaataagatattgtacaactctagcaaacatacaaagtacagctaaatcttaatatatttcactatgtaaaaggctgaaacttcataattatctgttccttctatctttttttgagtcaaaaagtctattaaatttttctgttgttgttccaactttggtgaaaaaggttatggcaatactttaactttgttttgttacattgtttttgttcttggaatggctcacaagcagaatttaaaaggcagattttcattaactataaatggctgaaaaaactgaatttactatctagctacagaaattatttttctatggtgtgaaactgttcccagacatccctaagaacttttacaaattattataaatttgtcacacctaggtcagcgattaaaatagtgttttgcaaatggaattttaattaactcaaaatgaattaagagtgcattttaaaaatcacaagtgagactttgatgttttggccccccagccaaaacttaatggtcataaatgaattttatctacaaaatctctttaaatttggctggttgccttgtcatatgtaatttcactattttccaaggaaatatataggaagcaattatgaaactgagaatagttttatatagaattcttttatttactgataatgcattaacatttttattgaaatgcaatggaatatgtgccaaaacacgtgaaaagcttacataaagaaaggcatcagttgtcgtttggagaaaggtacacatttttttgatggtcctaagtgatatggtattactactagaatcacagatttcttcaactgacttattttggtatattcaactacagctttctaaggataggactactttcatgtctagtaatacactgtattccccgttaattatcccttaagtcagattgtagaatttgcaagaaactaggtatagaaaaaatgtacaggcaacttttgtggttagctttataaatttagggtgcttataaaatgataaaatgaattctttaaataacctataggaatcatctgaatctgtaacatcagagactaaaactaaaagttttctttaatctgttgtttcttaagcaataaactgaaagacctttacttccataaaagattttgttatctcttttatctgccttagaaattataagtataaaagggtcaagggaacttagatataaagaatgactgtggtttataaacattactttaattgaagtaatcacatcagttaatagagaaatcaaaatatgtatggccttttctctagattagcaaaacagctttacaaagtatgaaaaaataaactaaaatgctcattgatgaggtaatactcagtctggagtacaggtaacttgggtaatgccttttaactactcttagaggagtatattatttctttatacattaaacatctatcccatagtaatgtgccacattttataaacgtaatgactttgctcaactacattacacactcaaatgtaatctaaatttaaactgattatttaaggaaaaaaagtgtgttatataatattgtgaactgtttagctttactgaaatatttaagagaaagtgcctcattactaaagtgcatttctgttttaaatttactgcataaagtttgagttatctgtacctgtctcttatgaatggtttcatatctaaataggctcttgtaagttaatttttttggaagattttcataagaatatagatatcaccaaagacattttacagtaaattaataaccatgttggagagacggttttaacagtttggaggttggaaatttttagattgcaatttaattttatatagttaggcaataaccttgattaattgctaaaatatcaccaaagaaaggctttaaactgaattttcttggtgagatcagtcaaatgcaggcttttcttgcaataatcagaacacacttcctttcaaatatgttcattgtttttcagcatcatctaacagatcttagtaaatctaaatcctcaaagatgagaaagaggtaaacacaacaaatagccttcctctgcatgaaaagtgagagaaatacatactttgaaaagaaagttcagatttttaatttgagagggtttttatttcatggaggcagtgttaactaaaattaagcttagatttagctcctgtattattcataatatgagaaattttattaaaggcagactttggtaaaagtgccaacacacttacttgtatagaaaagacttcattctatgggatttatataagtaagtgctttctctatattcaaaatatttcataaggacctgtggtttttttccccttaaaaagcaactctaggccgggcacagtggctcatgcctgtaatcccagcactttgggaggccaaggcaggtggatcacttgaggtcaggagttcgagaccagctggttaacatggtgaaaccccatctctactaaaaatacaaaaattagccaggtgtggtggcacgcgcctgtaatcccagctacatgggaggttgaggcaggagaatctcttgaacccaggaggtggaggttgcagtgagccgcaattacaccactgcactccagcctgggtgacacagcgagtctccatctccaaaaaaaattcaactcttggtcttgtttctcagcacttagtttattgttattagaatttagccatacagccaactttgacaaaatgggtcacagaacaagcatgtacatcaagaggaagttccatatcccccttgtaccatttctccttgggaactcatgctatgggctaccttaaaggtaaaactcatcttatggagtctttctgataggtcactaggtaaaactccttggatagggtgaaaatggatgcacactctattacatactctggtttatcataaggaattttccagaaagctaagctttatactaataagatattggttggtagtaggaacttcaaaaatgaatgagtttgccataactttaattttctggattagaaacacaaaacttgaaatgcaattatcaatattttgtaatatatattcctacagtttgggtagaaataaggaacatgtctgctagatctggtttatgaaaaagtgaaaaatattaaatacaccagagactcaaaccctttcaaggcacacaataactgttctggatttacctgacaaacctagttgagtagcattttgacagaaaatatcagactgaaagttcattcaaatgtacttaaatgtacaatacagtgttcaatagtttttattgcagtgatgtttttccaataatttaagtaattctcttcctagtataatacagttttcataaataatgtttacttgctttctttatattttcaaataaaattaaaatgctcgagcacttcctttcagaaagttataaaattaaaaataattattttaaatgctcattcaaatgtgtctgtatacttgctatgcccctttttctataattccaaactgagactgatttttcagagatttttaactttaataattttaaatctagaatcaagtgaaacagatatgttaaatactgagtctagttttcttccatcttatggagcttcatggaataagaaactaatctagtgcaaatgaagattaaatatttctgggtgatggagagatagtcaacaaatttatttatccatcctctgcacatcagtccactggagcaggagttctacacattaaaaatgtaatgggatcagcctagcattgtttggtgttcttttgttgtattttttagaatgggggtgggggcctaagtgtccttatgaagctgtggtccacgacaggagcttgttgggggagtaccagggttctgctgctttcctgcatctgagcaacacaacagagatcatcagttttaaatagagtagccctcacaatcaaaatatcatagaatatattgtaaagttatgttgctaattttcctttgaaatataaaatattttaagctttttgtcaaaagtggtaacatcttaatacaaataaaaacctttttgtggttgtaagatttagcttataaatcattcaaattgaagtgaaagaattaccaggtcattgttaatgacttagtctattaagaatatatgtatttttgtaaaggaaaagcacttgtagatatttaatcagtacaagatatgtcttttgcagaaataaaatgctgcttagagattctccttaaatattttttatttttgtgctcaaatgtattttctgttgatctatggaatgttctgtacaaagctgtataattgtactgttgggctagatactttttttttttaatctggacttagccaagtatatttcaccatgttaaaatacagtatctttgttattaaaaattaaattgcataatttattattgtttgtcatctttaatattagtcactgtagattgcagccttcattaaaaatatctccttt

SEQ ID NO: 167254 - DNA, 7037 bp, Homo sapiens
  Payload ID: 12908
  Gene Symbol: PCGF5
  Gene Name: polycomb group ring finger 5
  Uniprot ID: Q86SE9
  ENST ID: ENST00000614189
  CDS Start-End: 254-1024
cccacgcgcgcgcgctcgcgcaccacgcgccccgcgcggcccgcccggatcgtggcctctcgagagcaagacatgggaaagcggaaccaccaaaaggagtgatgatcaacgatctcatgataaatctggatgctagttctcatgcctcaggacatcctactgggaacgacacaccagctcctgggatcagactttcatctacttaggacccctctttgcccagactactaaagccagtcttcactagccacgaatggctacccaaaggaaacacttggtgaaagattttaatccttacattacctgctatatctgtaaagggtatctgatcaagccaacaacagtgacggaatgcctccatacattctgtaagacttgtattgttcagcactttgaagatagcaatgattgcccaaggtgtggcaaccaagttcatgagacaaatccattagaaatgttgaggttggacaatacattagaggaaattatatttaagctggtccctggactacgagaacaagaacttgagcgtgaatctgaattttggaagaaaaataagcctcaagaaaatggacaagatgatacttcaaaagctgacaaaccgaaagtagatgaagaaggtgatgaaaatgaagatgataaagattatcacagaagtgacccacaaattgctatctgtctagattgtttacgaaataatgggcaatcaggggacaatgtagtaaagggtttaatgaagaaattcattcgatgttctacacgtgtaactgtgggaactattaaaaaatttctaagtttaaaactaaaacttccaagttcttatgagttggatgtgctgtgcaatggtgaaattatggggaaggatcatactatggaattcatctacatgacaagatggcgactaagaggcgaaaactttcggtgtctgaactgctcagcttcgcaagtctgctctcaggatggccctttgtatcagtcataccctatggtactgcagtatcgaccaagaattgatttcggttagaccaaggggcccagacctcactgagatgaatcctgcactatttgtttactcgtcaacagattgcacagttaacggtgtgtggactagaggaacacaaccagattttcagcatgcaaataaggccattgtctatctctaaattgtcagttgcattcatgttgtttctattaggagcaaaccaagtgccattctgctactgaaccatctgcataaggtatttgtgttgtctcaaagtgtgcaagtcatggtaaaaatcagttagctgtgccgccatgattcacccttctgaatattttgcttgcctgttccaagattgttctaatgtttaattacactagtaaaatggctcaatttttgtggtgttgcagttttcacatacttactcttttattcttgtttaaatagcgtactctacaagaaactaataattatatcttgaaattattttgtatggaagtatatttagaaaagtggtttttgagccactgtcttgttcttgataagctttttgtgtgaaaaaaagttcattcttgagtgtgcaagtccttttgccaagaattccaattattctgtaacattagagcacaatataattgtagacattctaagcatctgtccgtgtagtctaccaattgcacaaggaaggcatgttagccctccagattgaaaatgtatgtgacctcttgaactgaagttagattcccaaccattcaaaatgttggcagctgatcacatttacttctgataaaagtaatgtgtaagtaaggttaatcttctttcataatgccttatgacaagcaggtgctgcttcatgaaacgtcattgtatagcccatttcatgtatcattacattgttgctgttatttaatgagtgcattatttctctttttaagttggccttaggtatatgtcattgtggcatgcagagggttatgacgattttaaatattaggatttttagagcacataacattagctattttatggatttcaaaagtctcaaaacagttgtagattaaaactgttagttacctttcacatttccaaactatgtgcataaaatagaataaatgcagtatagaactatgctaaccaaaattaataggttaagggtattttattttaaatcctgtagtaattggggaaatgagaagattattattttatacatgagttcattaagatcagaaatacaaaatgtcctgtattttgcagttttgttaagtcttccattcgttttaggattagtctgcaagtcaaagaaagtcttgttaccttaaattatatgaaaactgtcattttaaatcttttaatatttacagttttcaaaaaccttacttggaaattgctttgaaacaaacaagctaacctttgaaacttaggaaaaaatcttgaaagttaggaaaaatatttgagaaatatgacgagcacaatctgtgtgttacacacatttagtttttatactgcatatgtggtaaatgtgtcacattttccagtaaaatgtatcagaaatcaatgccttctgaatttcaaaatgattcttagaaataagatattgtacaactctagcaaacatacaaagtacagctaaatcttaatatatttcactatgtaaaaggctgaaacttcataattatctgttccttctatctttttttgagtcaaaaagtctattaaatttttctgttgttgttccaactttggtgaaaaaggttatggcaatactttaactttgttttgttacattgtttttgttcttggaatggctcacaagcagaatttaaaaggcagattttcattaactataaatggctgaaaaaactgaatttactatctagctacagaaattatttttctatggtgtgaaactgttcccagacatccctaagaacttttacaaattattataaatttgtcacacctaggtcagcgattaaaatagtgttttgcaaatggaattttaattaactcaaaatgaattaagagtgcattttaaaaatcacaagtgagactttgatgttttggccccccagccaaaacttaatggtcataaatgaattttatctacaaaatctctttaaatttggctggttgccttgtcatatgtaatttcactattttccaaggaaatatataggaagcaattatgaaactgagaatagttttatatagaattcttttatttactgataatgcattaacatttttattgaaatgcaatggaatatgtgccaaaacacgtgaaaagcttacataaagaaaggcatcagttgtcgtttggagaaaggtacacatttttttgatggtcctaagtgatatggtattactactagaatcacagatttcttcaactgacttattttggtatattcaactacagctttctaaggataggactactttcatgtctagtaatacactgtattccccgttaattatcccttaagtcagattgtagaatttgcaagaaactaggtatagaaaaaatgtacaggcaacttttgtggttagctttataaatttagggtgcttataaaatgataaaatgaattctttaaataacctataggaatcatctgaatctgtaacatcagagactaaaactaaaagttttctttaatctgttgtttcttaagcaataaactgaaagacctttacttccataaaagattttgttatctcttttatctgccttagaaattataagtataaaagggtcaagggaacttagatataaagaatgactgtggtttataaacattactttaattgaagtaatcacatcagttaatagagaaatcaaaatatgtatggccttttctctagattagcaaaacagctttacaaagtatgaaaaaataaactaaaatgctcattgatgaggtaatactcagtctggagtacaggtaacttgggtaatgccttttaactactcttagaggagtatattatttctttatacattaaacatctatcccatagtaatgtgccacattttataaacgtaatgactttgctcaactacattacacactcaaatgtaatctaaatttaaactgattatttaaggaaaaaaagtgtgttatataatattgtgaactgtttagctttactgaaatatttaagagaaagtgcctcattactaaagtgcatttctgttttaaatttactgcataaagtttgagttatctgtacctgtctcttatgaatggtttcatatctaaataggctcttgtaagttaatttttttggaagattttcataagaatatagatatcaccaaagacattttacagtaaattaataaccatgttggagagacggttttaacagtttggaggttggaaatttttagattgcaatttaattttatatagttaggcaataaccttgattaattgctaaaatatcaccaaagaaaggctttaaactgaattttcttggtgagatcagtcaaatgcaggcttttcttgcaataatcagaacacacttcctttcaaatatgttcattgtttttcagcatcatctaacagatcttagtaaatctaaatcctcaaagatgagaaagaggtaaacacaacaaatagccttcctctgcatgaaaagtgagagaaatacatactttgaaaagaaagttcagatttttaatttgagagggtttttatttcatggaggcagtgttaactaaaattaagcttagatttagctcctgtattattcataatatgagaaattttattaaaggcagactttggtaaaagtgccaacacacttacttgtatagaaaagacttcattctatgggatttatataagtaagtgctttctctatattcaaaatatttcataaggacctgtggtttttttccccttaaaaagcaactctaggccgggcacagtggctcatgcctgtaatcccagcactttgggaggccaaggcaggtggatcacttgaggtcaggagttcgagaccagctggttaacatggtgaaaccccatctctactaaaaatacaaaaattagccaggtgtggtggcacgcgcctgtaatcccagctacatgggaggttgaggcaggagaatctcttgaacccaggaggtggaggttgcagtgagccgcaattacaccactgcactccagcctgggtgacacagcgagtctccatctccaaaaaaaattcaactcttggtcttgtttctcagcacttagtttattgttattagaatttagccatacagccaactttgacaaaatgggtcacagaacaagcatgtacatcaagaggaagttccatatcccccttgtaccatttctccttgggaactcatgctatgggctaccttaaaggtaaaactcatcttatggagtctttctgataggtcactaggtaaaactccttggatagggtgaaaatggatgcacactctattacatactctggtttatcataaggaattttccagaaagctaagctttatactaataagatattggttggtagtaggaacttcaaaaatgaatgagtttgccataactttaattttctggattagaaacacaaaacttgaaatgcaattatcaatattttgtaatatatattcctacagtttgggtagaaataaggaacatgtctgctagatctggtttatgaaaaagtgaaaaatattaaatacaccagagactcaaaccctttcaaggcacacaataactgttctggatttacctgacaaacctagttgagtagcattttgacagaaaatatcagactgaaagttcattcaaatgtacttaaatgtacaatacagtgttcaatagtttttattgcagtgatgtttttccaataatttaagtaattctcttcctagtataatacagttttcataaataatgtttacttgctttctttatattttcaaataaaattaaaatgctcgagcacttcctttcagaaagttataaaattaaaaataattattttaaatgctcattcaaatgtgtctgtatacttgctatgcccctttttctataattccaaactgagactgatttttcagagatttttaactttaataattttaaatctagaatcaagtgaaacagatatgttaaatactgagtctagttttcttccatcttatggagcttcatggaataagaaactaatctagtgcaaatgaagattaaatatttctgggtgatggagagatagtcaacaaatttatttatccatcctctgcacatcagtccactggagcaggagttctacacattaaaaatgtaatgggatcagcctagcattgtttggtgttcttttgttgtattttttagaatgggggtgggggcctaagtgtccttatgaagctgtggtccacgacaggagcttgttgggggagtaccagggttctgctgctttcctgcatctgagcaacacaacagagatcatcagttttaaatagagtagccctcacaatcaaaatatcatagaatatattgtaaagttatgttgctaattttcctttgaaatataaaatattttaagctttttgtcaaaagtggtaacatcttaatacaaataaaaacctttttgtggttgtaagatttagcttataaatcattcaaattgaagtgaaagaattaccaggtcattgttaatgacttagtctattaagaatatatgtatttttgtaaaggaaaagcacttgtagatatttaatcagtacaagatatgtcttttgcagaaataaaatgctgcttagagattctccttaaatattttttatttttgtgctcaaatgtattttctgttgatctatggaatgttctgtacaaagctgtataattgtactgttgggctagatactttttttttttaatctggacttagccaagtatatttcaccatgttaaaatacagtatctttgttattaaaaattaaattgcataatttattattgtttgtcatctttaatattagtcactgtagattgcagccttcattaaaaatatctccttt

SEQ ID NO: 167255 - DNA, 1950 bp, Homo sapiens
  Payload ID: 12909
  Gene Symbol: PCGF6
  Gene Name: polycomb group ring finger 6
  Uniprot ID: Q9BYE7
  ENST ID: ENST00000337211
  CDS Start-End: 14-841
gtctctcccgaccatggagggggtcgcggtggtgacggcgggcagcgtaggcgctgccaaaaccgagggagctgcagccttgccgcctccgcctcctgtctccccgcccgccctcacccctgcacccgcagcgggtgaggagggaccggcgcctctgtctgagacgggggctcccggctgctccggctcccggccccctgagctggagccggagcgcagcctgggccgcttcagaggccgcttcgaggacgaggacgaggagttggaagaagaagaggagctggaggaggaagaagaggaggaggaggaggacatgagtcacttctcgttgaggctggagggaggccggcaggactcggaggacgaggaggagcgcctgattaatctctctgagctgaccccatacatcttgtgttccatttgcaaaggttacttaatagatgcaactaccatcacagaatgtcttcataccttttgtaaaagctgcatcgtaagacatttttactacagcaacagatgtccaaaatgcaatatagtagtacatcagacacaacctctttataacataagtgctaatgaaggcacgggacattttaagccattggaaaagaagtttgttcgagtttcaggagaagcaactattggacatgtagaaaaattcctcagaagaaaaatgggtcttgatccagcttgtcaggtagatataatctgtggtgatcacctgttggagcagtatcaaactctaagggaaatccgacgtgcaataggtgatgcagcaatgcaggatggtctgcttgtccttcattatggtcttgtggtttctcctctgaagataacttgaagattctaggcacattatgaggagggaaacaaaggaggcttctgcaggactgcatctcaccaaagatttccatgaaatgtaattgctaccactttgctgttcaagacataacttacctatttttagcaccaagaattatagcgtttataagtacaacttggaacgatggaatgcatctgttactagagactgtatataaaaagcagccaaagctcaggggaaatttttcaaaaattgaattttaaaatttcttatgattttaaataccttgacattgattttgcttcccatctttgaagtaattggttagttttctttgttcagccatttcaagttggtggttgggatatctgctctctgggatggcatcagttgggcagtcatctttttggaagagaagtgtgcttttgagtggaagattcaaagccagtctttgttaaactgcagggtgtactctcaaagaccaaaactattggccacttttgtatgttgccagcatattttgaacttgtacctttttttatactagcaacactacaaaggagaagttactcatttcaaaatggatgaattgttattatgtgtgaagagactctgagtttatgatctgtgccataaaatttcagtgtaataagacttcttcaatacatcttccaataaggggtgcttctttgtgacagtatttttatttctgacattcattttatttgggtacatagtgtggttgttgataccttgcaatagtattgcttctgaaagtaataaaaaattttaggagaatttgagaagtttacagaattacttattcattgttttcttagtaagtcagtttaatgtttatttttctcattatttcatcactgcaataaagaataagggtgtttgagctcacctccatgcaaagacttcagttttaaaacattatttgcctaaaattagcattgtgatgctttctgaaagaaatattttataaatcctgtttaacagcagaatttctgaatgtgtagagactactacaaaattggaaaaagattggcaattctttgtaaagaatttgtgaattgtgtataaatttattctaacatttaataaaaatgtattttaaccta

SEQ ID NO: 167256 - DNA, 2230 bp, Homo sapiens
  Payload ID: 12909
  Gene Symbol: PCGF6
  Gene Name: polycomb group ring finger 6
  Uniprot ID: Q9BYE7
  ENST ID: ENST00000369847
  CDS Start-End: 69-1121
ggcgtccgaggccggccgaactcccgcgctctcccgccgcctcgcctcgcctggtgtctctcccgaccatggagggggtcgcggtggtgacggcgggcagcgtaggcgctgccaaaaccgagggagctgcagccttgccgcctccgcctcctgtctccccgcccgccctcacccctgcacccgcagcgggtgaggagggaccggcgcctctgtctgagacgggggctcccggctgctccggctcccggccccctgagctggagccggagcgcagcctgggccgcttcagaggccgcttcgaggacgaggacgaggagttggaagaagaagaggagctggaggaggaagaagaggaggaggaggaggacatgagtcacttctcgttgaggctggagggaggccggcaggactcggaggacgaggaggagcgcctgattaatctctctgagctgaccccatacatcttgtgttccatttgcaaaggttacttaatagatgcaactaccatcacagaatgtcttcataccttttgtaaaagctgcatcgtaagacatttttactacagcaacagatgtccaaaatgcaatatagtagtacatcagacacaacctctttataacataaggttggaccgacagttacaagacatagtgtacaaattagtgatcaatctagaggaaagagaaaaaaagcaaatgcatgatttctataaagaaagaggtctagaagtacctaaacctgctgttccacagccagtcccttcaagcaaaggaagatctaaaaaagtcctagaatcagtgtttcgtattccacctgaacttgatatgtctttattactggagttcattggtgctaatgaaggcacgggacattttaagccattggaaaagaagtttgttcgagtttcaggagaagcaactattggacatgtagaaaaattcctcagaagaaaaatgggtcttgatccagcttgtcaggtagatataatctgtggtgatcacctgttggagcagtatcaaactctaagggaaatccgacgtgcaataggtgatgcagcaatgcaggatggtctgcttgtccttcattatggtcttgtggtttctcctctgaagataacttgaagattctaggcacattatgaggagggaaacaaaggaggcttctgcaggactgcatctcaccaaagatttccatgaaatgtaattgctaccactttgctgttcaagacataacttacctatttttagcaccaagaattatagcgtttataagtacaacttggaacgatggaatgcatctgttactagagactgtatataaaaagcagccaaagctcaggggaaatttttcaaaaattgaattttaaaatttcttatgattttaaataccttgacattgattttgcttcccatctttgaagtaattggttagttttctttgttcagccatttcaagttggtggttgggatatctgctctctgggatggcatcagttgggcagtcatctttttggaagagaagtgtgcttttgagtggaagattcaaagccagtctttgttaaactgcagggtgtactctcaaagaccaaaactattggccacttttgtatgttgccagcatattttgaacttgtacctttttttatactagcaacactacaaaggagaagttactcatttcaaaatggatgaattgttattatgtgtgaagagactctgagtttatgatctgtgccataaaatttcagtgtaataagacttcttcaatacatcttccaataaggggtgcttctttgtgacagtatttttatttctgacattcattttatttgggtacatagtgtggttgttgataccttgcaatagtattgcttctgaaagtaataaaaaattttaggagaatttgagaagtttacagaattacttattcattgttttcttagtaagtcagtttaatgtttatttttctcattatttcatcactgcaataaagaataagggtgtttgagctcacctccatgcaaagacttcagttttaaaacattatttgcctaaaattagcattgtgatgctttctgaaagaaatattttataaatcctgtttaacagcagaatttctgaatgtgtagagactactacaaaattggaaaaagattggcaattctttgtaaagaatttgtgaattgtgtataaatttattctaacatttaataaaaatgtattttaaccta

SEQ ID NO: 167257 - DNA, 11589 bp, Homo sapiens
  Payload ID: 12910
  Gene Symbol: PKHD1
  Gene Name: polycystic kidney and hepatic disease 1 (autosomal recessive)
  Uniprot ID: P08F94
  ENST ID: ENST00000340994
  CDS Start-End: 262-10452
acaaacgagttaggtgagttatagtctaacgtgagtgagttacctgcgtggtggctgcaggctgagctctaaccagataacatgtccacggattcttgacagagagaaataagatcacttagaaagaaaggatcatttctcccttgagtcacaaggagacagaaacagaaaaaaaagcacaaaagctatgctgctccaatcaaaactgaaaatgcttttaatgtctgagcaatcttaagagtattgatttaagtggacagaatgactgcctggctgatctctctgatgagtattgaagtactacttttggcagtacgtcacctgagtttacatattgaacctgaagaaggtagccttgcagggggaacgtggatcacagtcatttttgatggtttggagttgggtgttctttaccccaacaatggctctcaattggagatacacctggtgaacgtgaacatggtggtgcccgcactgcggagtgttccctgtgacgtctttcctgttttcttggatttgcctgtggtgacatgccggaccagatctgtgctgtctgaagcacatgagggtctgtacttcctggaagcatacttcgggggacagctggtaagcagtccaaatccaggaccacgagatagctgtactttcaagttttccaaggcgcagacacccatcgttcaccaagtttatccaccaagtggtgttccaggaaaactaatacatgtatatggctggattatcactggaagattggaaacttttgattttgatgctgagtacattgatagcccagtgatcttggaagctcaaggagacaaatgggttactccttgctctcttataaataggcagatgggaagctgttatcctattcaggaggaccatggtcttgggactctgcagtgccatgtggaaggcgactacatcggctcccagaatgttagcttctcagtatttaacaaaggaaagtcaatggtccacaagaaggcatggctgatcagtgctaaacaggatcttttcctataccagacacactcagaaatattatctgtgtttccagaaactgggagccttgggggaagaacaaacatcacaattacaggagacttttttgacaattctgcccaggttaccattgcaggcattccatgtgatattagacacgtgtctcccaggaagattgagtgcaccactcgggctccaggaaaagatgtgaggctcaccacccctcagccaggcaatcgagggcttctttttgaagttggagatgctgttgagggactggaactgactgaagccaccccagggtacaggtggcagattgtccctaatgccagttctccatttgggttttggtcacaggaaggacaacctttcagagcacggctcagtgggttctttgtggctccagagacaaataattacactttctggattcaggcagatagccaagcttccttgcatttcagttggtcagaggaaccaaggactaaggtgaaagtggcctccatcagcgtcggcactgctgactggtttgactcctgggagcagaatagggatgaagggacctggcagcagaagactcccaagttggagctgttgggtggagccatgtactacctggaagcagagcatcatgggatagccccaagcagggggatgaggattggtgtccagattcacaacacctggctgaatcctgatgtggtcaccacttacctacgggagaagcaccagatccgagtccgagcccagaggcttccagaagtacaggtgctgaatgtatcaggcagaggaaacttcttccttacttgggacaatgtctctagtcagccaatccctgcaaatgccacagcccatctgattcaaacaaccattgaggagttacttgcagtaaaatgcaaactggaacccctttggtctaacatccttctccggcttggatttgaacgaggcccagaagtttccaactctgatggggacctcaccagtgggacggagcccttctgtggcaggttcagcctccgtcagcctcgacaccttgtccttactcccccggctgcccagaagggctatcggctagatcagtatacacacctgtgtcttgcatacaaaggccacatgaacaagatcctgaagatgattgtgtccttcacaatcggctttcaaaacatggtaaagaataccacctgtgactggagtctcacgaggaccagccccgagagctggcagttcgattgcactgacctctgggagacttgtgtgcgttgcttcggggatctccagccccctccggcaaactccccagtgctggttcatcagatcaaccttctccctctggcccaggagacgggcctgttctatgtggatgaaattattattgcagacacaaacgtaacagtttctcaagctgattctggaacggctcgcccagggggcaatctggtggaatcagtctctgtggtgggatcccctccggtctacagtgtcacctcctggctggcggggtgtggcacggagctcccgctcatcactgcacgctctgtgcccactgaaggaacagaagagggatctggactggtcctggtgacgacacagagacgacagcggacaagtccacctctaggaggacactttcgcatccagcttcctaatacagtgatttctgatgtccctgtacaaatttctgctcatcaccttcaccagctcttacagaataatgccgatgacttcacatccaggtacctcaatgccagtgacttcactgtgaaggaggatctatacacttgctacgaacacgtgtggaccttgtcctggtccactcagattggggatttgcccaattttatcagggtctctgatgaaaaccttactggagtgaatcctgctgcagccacgcgtgtggtatatgatggtggagtttttcttggacccatatttggagacatgttggctactgccaaccagcatactcaggtggttgtgcgagtgaatgatgtaccagctcattgcccaggttcctgctctttccagtacctccaagggtcaactccctgtgtccattctgtgtggtactccattgatggtgacatcaacctaatgatttacattaccggaactggtttctctggtgactcccagttcttgcaggttacagtgaacaaaacgagttgcaaagttattttctcaaaccagaccaatgtagtctgtcagacagatttgctacctgttggaatgcatcggatcttgatgttggtgagaccctctggtcttgccatcagtgccactggagaagacctcttcctaaatgtgaaacctagactggatatggtggagccttccagagctgcggatattggagggctctgggccaccatccgaggctctagtttggaaggtgttagcctgatattatttggatcttactcgtgtgccatcaatgtcgctacaagcaattcaagcagaattcagtgcaaagttccacccagggggaaagatggacgcattgtgaatgtgactgtgatcagaggggactattctgcagttcttcccagagcatttacatatgtctcttccttaaatccagttattgtgactctgagcagaaacataagcaatatagcaggcggtgagaccctggtcattggagtggcgaggctgatgaactatacggatttggatgtggaagtccacgtccaggatgccttggctccggttcacacacagtcggcttggggcctggaggtggcactgcccccactgccagctggtctccacagaatttccgtctctatcaatggggtcagcattcactcacaaggggttgatctccacatccagtacctcacagaagttttcagcatcgagccttgctgtgggtccctgctgggagggaccatcctcagcatctcaggaataggcttcagcagggacccagctttggtttgggtacttgtgggcaatcggtcctgtgacattgtgaacttaacggaggcgagcatctggtgtgaaaccctgccagccccccagatacccgatgcgggcgctcccactgttccagctgccgtggaggtctgggctggcaacaggttcttcgcccgtggtccttcaccaagcttggtggggaaaggcttcaccttcatgtatgaagcggcagcaacaccagtagtcactgccatgcaaggagaaatcacaaatagcagcctgagcctgcatgtgggaggaagtaacctctccaactcagtcatccttctggggaacctgaactgtgatgttgagacacagtccttccagggcaacgtgagcctgtctggatgctccatccctcttcacagtctggaggctggcatctatcctctccaagtacgtcagaagcagatgggatttgctaatatgtctgtggtgctccagcaatttgcagtgatgcctcggataatggccatcttcccatcgcagggttcggcatgtggtgggaccatacttactgtgagggggttgcttcttaactctagaaggaggtcagttcgggttgacctctcgggtccttttacttgtgtgattttgagtttgggagaccacaccattctctgccaggttagcctggagggtgaccccttgcctggagcttccttctccctgaacgtcacagtcctggtcaatgggctaaccagcgagtgtcaggggaattgcactcttttcataagggaagaggcaagtcctgtcatggatgccttgtccacaaacaccagtgggtctctgaccactgtgctgattaggggtcagaggttagccaccacagctgatgagccgatggtatttgtggatgatcaacttccttgcaatgtaactttttttaatgcaagccacgttgtgtgccagacaagagacttggccccaggaccccactacctgtcagttttttatacaagaaatgggtatgcttgttctggtaatgtttccagacacttctacattatgccccaagtgtttcattattttcctaagaatttcagcttacatggtggaagcctcttgaccatagagggcacaggcctgagaggacagaacaccacgtcagtctatattgaccagcagacctgcctgacggtgaacatcggtgctgagctcatccggtgcattgttcccacagggaatggctctgttgccctggaaatagaggtagatggactttggtatcacataggagtcattggttataacaaggcctttaccccagaattgatctctatttctcagagcgatgacatcttaacctttgcagtggcccagatctcaggagctgcaaacattgacatttttataggaatgtcaccctgtgtgggtgtctctggtaaccacaccgttcttcagtgcgtggtcccttcccttccggccggggagtaccacgtcagaggctatgactgcatcagagggtgggcctcatctgccctggtgttcacctcaagagttattattacagcagtgacggagaacttcggctgcctgggtggaaggctggtgcatgtgtttggagcgggattttctccagggaatgtctcagctgctgtgtgtggtgctccctgccgagtcctggctaatgctacagtgtctgccttcagctgcttggttctgcccctggatgtgtccttggccttcctgtgtggcctgaagcgtgaggaggacagctgtgaggctgccagacacacctatgtgcagtgtgatttgacagttgccatggcgacagagcaactgcttgaatcgtggccttacctctacatttgcgaggaaagttcccaatgcctctttgtgccagatcattgggcagagtcaatgtttccatcattctcgggcctctttatcagccctaaattggaaagagatgaagttctcatctataatagctcctgtaacattaccatggaaactgaggcagagatggagtgtgagacgcccaatcagccaattaccgtcaagattactgagatacggaaacgctggggccagaacactcagggcaacttttctttacagttctgccggagatggtccaggactcacagctggtttcctgaaaggctgccacaagatggcgacaacgtcacagtggagaatggccaattgcttctgctggacactaacacaagcatcctcaacttactgcacattaaagggggcaagctgattttcatggccccaggacccatcgagctcagggcacacgccatccttgtttctgatggtggagagctccggattggatccgaagacaagcccttccaaggcagagctcagatcacactctacgggagttcctactcaactcccttctttccctatggagtcaagttcctggctgtgaggaatggaactctttctctgcacggttcactaccagaagtaattgtcacctgtcttagagcaactgcccatgccctagacacagtgctggctttagaagatgctgtggactggaaccctggggatgaagttgtcatcatcagtggaacaggtgttaaaggtgccaaaccgatggaagagattgtcactgtggaaactgtgcaggatacagacctctatcttaagtcacctttgagatattctcacaactttacagagaattgggtggctggagagcaccatattttaaaggccactgtggctctgctcagcaggagtattaccatacaaggaaatctcactaatgagagggagaagctgcttgtttcatgccaggaggccaatgctccagaaggtaatctgcagcactgtttgtattccatgagtgagaagatgctaggatccagggatatgggagccagagtgatcgttcagtccttcccagaagagcccagccaggtccagttgaagggagtgcagtttcaagtcttggggcaagccttccataagcatctgagctcactcactctggtgggagctatgagagagtctttcatacagggctgcacagtgaggaactccttcagtagaggcctcagcatgtgcgggaccttgggcctgaaggtggacagtaatgtattctacaatattttaggtcatgcgctgctagttgggacatgcacggagatgagatatatctcctgggaggcaattcatggaaggaaagatgactggtcaggacatggaaatataataagaaacaacgtgatcatccaggtttctggtgccgagggactctccaatcctgaaatgttgacaccatctggcatctatatctgcagtcccaccaatgttatagaggggaacagagtgtgtggtgctggctatggctactttttccatctcatgaccaaccaaacatcacaagctccgcttctttccttcactcagaacattgcacattcttgtaccaggtatggtctctttgtataccctaaatttcagccaccttgggataatgtcactggcaccactctgttccagagcttcacagtttgggaaagtgcaggtggtgcccagatttttagaagtagcaatcttcgcctgaaaaacttcaaagtttattcatgcagagattttggaattgacgtcttggaaagtgatgcaaatacttcagttactgacagcttattacttggtcattttgcccacaagggaagtctgtgtatgtcatctgggattaaaactcctaaaagatgggaactgatggtgtctaacacaacctttgttaattttgatctcatcaactgtgtggccattagaacctgttcagactgttcccaaggacaaggtggatttactgtgaagaccagccagttgaagtttacaaactcttcaaacttagtggcatttccatttcctcatgcagcaattttggaagacttggatgggtctctgtctgggaaaaacagaagtcacattcttgcttctatggaaaccctttcagcttcttgtttggtcaattcaagctttggtcgggttgtccatggcagtgcctgtggaggaggtgttctttttcatcgtatgtctattggtttagcgaatactcctgaagtttcttatgatttaaccatgactgacagcagaaataaaacaaccactgtcaattatgtacgtgatacattgtctaaccctcgtggctggatggctctgctcttggaccaagagacctactcattgcaatctgagaacctttggatcaacagatctctgcagtactcagcaacctttgacaactttgctcctggtaattacctactgctggtgcacacagatttgccgccttaccctgacatcctcctaagatgtgggagtcgagtgggtctgtcttttccatttcttccatcaccaggtcagaaccaaggctgtgactggttcttcaatagccagctgaggcaactcacctatctggtttcaggtgaaggccaagttcaagtcattctccgggtgaaggaaggtatgcccccaactatttcagcttctacctctgcccctgaatcagctttaaaatggtccctccctgaaacatggcaaggtgttgaagaaggctggggaggatacaacaataccattccaggccctggggatgacgttctcattttacccaacagaactgtccttgtggatacagatcttccattcttcaaagggctgtatgtgatggggaccttagacttccctgtggacagaagcaatgttctgagtgtggcatgcatggtcattgcaggcggggagctgaaagttggtactttagaaaatcccttagaaaaggaacaaaagcttctgattctccttagagcctcagagggagtcttttgtgaccgtatgaatggaattcatattgacccaggaacaattggggtttatgggaaagttcatctttacagtgcttatcctaagaactcctggacacatcttggagctgatattgcctcaggaaatgagagaattatagtagaagatgcagtggattggcgcccccatgacaaaatagtccttagctcctcttcttatgagcctcatgaagcagaggtcctcactgtgaaagaagtcaagggccaccatgtgaggatctatgaacggctcaaacaccggcatattggaagtgtacatgtcacggaggatggccgacacattcgtttggctgctgaggttggactgttgacccgaaatatacaaattcagcctgacgtatcatgtagggggagactgtttgtggggtccttcaggaagtccagccgagaagaattttcaggtgtccttcaacttcttaatgtggaaattcagaacttcgggtcaccattgtactcatctgttgaattcagtaatgtgtcagcaggatcctggatcatatcatctactctgcaccagagctgtggcgggggcattcatgcagctgccagtcatggagtacttttaaatgacaatattgtgtttggcacagctggccatggcatagatttagagggtcaggcctatactgtcactaataaccttgtggttctgatgacacagccagcgtggtccaccatttgggtggcgggaatcaaagtgaaccaggtaaaggacatcaacctccatggcaacgttgtggcaggatcagagagacttggctttcacatccgaggccacaagtgctcctcttgtgaactgctttggtctgacaatgtggcgcattcaagtcttcatggccttcatctctataaggaaagtggacttgacaactgtaccagaatctctggcttcttggctttcaagaactttgactatggtgccatgttacatgtagagaacagcgtggagatagagaacattactctggtagacaatactattggtcttttggcagtagtgtatgtattttctgctccacaaaattccgtcaaaaaagtgcagattgtgcttaggaattcagtcattgtggccaccagctcttcttttgactgcattcaggacaaagtgaagccgcactcagccaacttgacatcaacagatagagctccctccaatccaagaggaggtcgaattggtattctgtggcctgtattcacctcagaaccaaatcagtggcctcaggagccatggcacaaagtgaggaatgatcattcaatttcaggaatcatgaaacttcaagatgttaccttttctagttttgtgaagagttgctatagcgatgacctggatgtctgcattctaccaaatgcagagaacagtggaattatgcacccaataacagcagagaggaccaggatgctaaagataaaagataaaaacaagttctactttccttcattacaacccaggaaagatttaggaaaagtagtctgtcctgaattagactgtgcaagtccaagaaaatatctcttcaaggatctggatgggagagccctgggtctgcctccaccagtttctgtatttcctaaaacagaggcagaatggactgcatccttcttcaacgcagtaaccactgagcaggctttgaagatttcagaatagaggaggagcctgcaggaagctgaactttgaaagattaatgaggcagcaggaagcagggtgaagaatgggttggagcatggaccaaatggaaagacttgttaagacactgtttcaattgttcaaattgagaagaaattgattgaggactgggaggagattgatggcagccagaatggagaggatggtacagatcaaagaaatacaaaagagaggaaatagagtttgcttactcctgactttggggactgtggagagggtgtcaacagtgacaccattgtccgtagtcaggatatctttgggaatggaagttccagtagcagatatgggggagtaggaaagaagaggatggttgcttaagctttgcctttagtgagtttggggtacccactatatgagagaggagcaattcagatattaaattggtggtgttgaaatctttggaattagagctttggagataaattgcagctagatataaattatctggaataaagtgataggtgaaataatatggtagagaagccttattttatttctctcttctttaccaattatattgagatattattattattggcatattaatatattattattggtatattaataatataataatataggtatattatcaataatatactaatactaatataccaataatagtgggttattgttaataatattggtaaagaaagaacataaatgtaagtttattaccaagaatattggtgtggtaaagataacccatttatgctggaggttgcaattttttgaattgcaaaatcagaccttggccatgaccttaagcagtaggatataaataactcccatgtgcccagtgttccattattggaacagtgtgccattcttgtgcactgatggaggaaatagttacagatacagtgtgatttgaggaattggttcccccagagccttattgaccctcaaatacttcccttacccatgttatcatttcctttctatcctaaaattgctacctttgctgccagatcttttccttcataaagtcaatgtgacatttactcatttattaactcatttcttcaacagatacttattgggcatttactgtatgccaagtattgtaataaatgctgtatgtacaaaatgaca

SEQ ID NO: 167258 - DNA, 16282 bp, Homo sapiens
  Payload ID: 12910
  Gene Symbol: PKHD1
  Gene Name: polycystic kidney and hepatic disease 1 (autosomal recessive)
  Uniprot ID: P08F94
  ENST ID: ENST00000371117
  CDS Start-End: 277-12501
acatttggctgggacacaaacgagttaggtgagttatagtctaacgtgagtgagttacctgcgtggtggctgcaggctgagctctaaccagataacatgtccacggattcttgacagagagaaataagatcacttagaaagaaaggatcatttctcccttgagtcacaaggagacagaaacagaaaaaaaagcacaaaagctatgctgctccaatcaaaactgaaaatgcttttaatgtctgagcaatcttaagagtattgatttaagtggacagaatgactgcctggctgatctctctgatgagtattgaagtactacttttggcagtacgtcacctgagtttacatattgaacctgaagaaggtagccttgcagggggaacgtggatcacagtcatttttgatggtttggagttgggtgttctttaccccaacaatggctctcaattggagatacacctggtgaacgtgaacatggtggtgcccgcactgcggagtgttccctgtgacgtctttcctgttttcttggatttgcctgtggtgacatgccggaccagatctgtgctgtctgaagcacatgagggtctgtacttcctggaagcatacttcgggggacagctggtaagcagtccaaatccaggaccacgagatagctgtactttcaagttttccaaggcgcagacacccatcgttcaccaagtttatccaccaagtggtgttccaggaaaactaatacatgtatatggctggattatcactggaagattggaaacttttgattttgatgctgagtacattgatagcccagtgatcttggaagctcaaggagacaaatgggttactccttgctctcttataaataggcagatgggaagctgttatcctattcaggaggaccatggtcttgggactctgcagtgccatgtggaaggcgactacatcggctcccagaatgttagcttctcagtatttaacaaaggaaagtcaatggtccacaagaaggcatggctgatcagtgctaaacaggatcttttcctataccagacacactcagaaatattatctgtgtttccagaaactgggagccttgggggaagaacaaacatcacaattacaggagacttttttgacaattctgcccaggttaccattgcaggcattccatgtgatattagacacgtgtctcccaggaagattgagtgcaccactcgggctccaggaaaagatgtgaggctcaccacccctcagccaggcaatcgagggcttctttttgaagttggagatgctgttgagggactggaactgactgaagccaccccagggtacaggtggcagattgtccctaatgccagttctccatttgggttttggtcacaggaaggacaacctttcagagcacggctcagtgggttctttgtggctccagagacaaataattacactttctggattcaggcagatagccaagcttccttgcatttcagttggtcagaggaaccaaggactaaggtgaaagtggcctccatcagcgtcggcactgctgactggtttgactcctgggagcagaatagggatgaagggacctggcagcagaagactcccaagttggagctgttgggtggagccatgtactacctggaagcagagcatcatgggatagccccaagcagggggatgaggattggtgtccagattcacaacacctggctgaatcctgatgtggtcaccacttacctacgggagaagcaccagatccgagtccgagcccagaggcttccagaagtacaggtgctgaatgtatcaggcagaggaaacttcttccttacttgggacaatgtctctagtcagccaatccctgcaaatgccacagcccatctgattcaaacaaccattgaggagttacttgcagtaaaatgcaaactggaacccctttggtctaacatccttctccggcttggatttgaacgaggcccagaagtttccaactctgatggggacctcaccagtgggacggagcccttctgtggcaggttcagcctccgtcagcctcgacaccttgtccttactcccccggctgcccagaagggctatcggctagatcagtatacacacctgtgtcttgcatacaaaggccacatgaacaagatcctgaagatgattgtgtccttcacaatcggctttcaaaacatggtaaagaataccacctgtgactggagtctcacgaggaccagccccgagagctggcagttcgattgcactgacctctgggagacttgtgtgcgttgcttcggggatctccagccccctccggcaaactccccagtgctggttcatcagatcaaccttctccctctggcccaggagacgggcctgttctatgtggatgaaattattattgcagacacaaacgtaacagtttctcaagctgattctggaacggctcgcccagggggcaatctggtggaatcagtctctgtggtgggatcccctccggtctacagtgtcacctcctggctggcggggtgtggcacggagctcccgctcatcactgcacgctctgtgcccactgaaggaacagaagagggatctggactggtcctggtgacgacacagagacgacagcggacaagtccacctctaggaggacactttcgcatccagcttcctaatacagtgatttctgatgtccctgtacaaatttctgctcatcaccttcaccagctcttacagaataatgccgatgacttcacatccaggtacctcaatgccagtgacttcactgtgaaggaggatctatacacttgctacgaacacgtgtggaccttgtcctggtccactcagattggggatttgcccaattttatcagggtctctgatgaaaaccttactggagtgaatcctgctgcagccacgcgtgtggtatatgatggtggagtttttcttggacccatatttggagacatgttggctactgccaaccagcatactcaggtggttgtgcgagtgaatgatgtaccagctcattgcccaggttcctgctctttccagtacctccaagggtcaactccctgtgtccattctgtgtggtactccattgatggtgacatcaacctaatgatttacattaccggaactggtttctctggtgactcccagttcttgcaggttacagtgaacaaaacgagttgcaaagttattttctcaaaccagaccaatgtagtctgtcagacagatttgctacctgttggaatgcatcggatcttgatgttggtgagaccctctggtcttgccatcagtgccactggagaagacctcttcctaaatgtgaaacctagactggatatggtggagccttccagagctgcggatattggagggctctgggccaccatccgaggctctagtttggaaggtgttagcctgatattatttggatcttactcgtgtgccatcaatgtcgctacaagcaattcaagcagaattcagtgcaaagttccacccagggggaaagatggacgcattgtgaatgtgactgtgatcagaggggactattctgcagttcttcccagagcatttacatatgtctcttccttaaatccagttattgtgactctgagcagaaacataagcaatatagcaggcggtgagaccctggtcattggagtggcgaggctgatgaactatacggatttggatgtggaagtccacgtccaggatgccttggctccggttcacacacagtcggcttggggcctggaggtggcactgcccccactgccagctggtctccacagaatttccgtctctatcaatggggtcagcattcactcacaaggggttgatctccacatccagtacctcacagaagttttcagcatcgagccttgctgtgggtccctgctgggagggaccatcctcagcatctcaggaataggcttcagcagggacccagctttggtttgggtacttgtgggcaatcggtcctgtgacattgtgaacttaacggaggcgagcatctggtgtgaaaccctgccagccccccagatacccgatgcgggcgctcccactgttccagctgccgtggaggtctgggctggcaacaggttcttcgcccgtggtccttcaccaagcttggtggggaaaggcttcaccttcatgtatgaagcggcagcaacaccagtagtcactgccatgcaaggagaaatcacaaatagcagcctgagcctgcatgtgggaggaagtaacctctccaactcagtcatccttctggggaacctgaactgtgatgttgagacacagtccttccagggcaacgtgagcctgtctggatgctccatccctcttcacagtctggaggctggcatctatcctctccaagtacgtcagaagcagatgggatttgctaatatgtctgtggtgctccagcaatttgcagtgatgcctcggataatggccatcttcccatcgcagggttcggcatgtggtgggaccatacttactgtgagggggttgcttcttaactctagaaggaggtcagttcgggttgacctctcgggtccttttacttgtgtgattttgagtttgggagaccacaccattctctgccaggttagcctggagggtgaccccttgcctggagcttccttctccctgaacgtcacagtcctggtcaatgggctaaccagcgagtgtcaggggaattgcactcttttcataagggaagaggcaagtcctgtcatggatgccttgtccacaaacaccagtgggtctctgaccactgtgctgattaggggtcagaggttagccaccacagctgatgagccgatggtatttgtggatgatcaacttccttgcaatgtaactttttttaatgcaagccacgttgtgtgccagacaagagacttggccccaggaccccactacctgtcagttttttatacaagaaatgggtatgcttgttctggtaatgtttccagacacttctacattatgccccaagtgtttcattattttcctaagaatttcagcttacatggtggaagcctcttgaccatagagggcacaggcctgagaggacagaacaccacgtcagtctatattgaccagcagacctgcctgacggtgaacatcggtgctgagctcatccggtgcattgttcccacagggaatggctctgttgccctggaaatagaggtagatggactttggtatcacataggagtcattggttataacaaggcctttaccccagaattgatctctatttctcagagcgatgacatcttaacctttgcagtggcccagatctcaggagctgcaaacattgacatttttataggaatgtcaccctgtgtgggtgtctctggtaaccacaccgttcttcagtgcgtggtcccttcccttccggccggggagtaccacgtcagaggctatgactgcatcagagggtgggcctcatctgccctggtgttcacctcaagagttattattacagcagtgacggagaacttcggctgcctgggtggaaggctggtgcatgtgtttggagcgggattttctccagggaatgtctcagctgctgtgtgtggtgctccctgccgagtcctggctaatgctacagtgtctgccttcagctgcttggttctgcccctggatgtgtccttggccttcctgtgtggcctgaagcgtgaggaggacagctgtgaggctgccagacacacctatgtgcagtgtgatttgacagttgccatggcgacagagcaactgcttgaatcgtggccttacctctacatttgcgaggaaagttcccaatgcctctttgtgccagatcattgggcagagtcaatgtttccatcattctcgggcctctttatcagccctaaattggaaagagatgaagttctcatctataatagctcctgtaacattaccatggaaactgaggcagagatggagtgtgagacgcccaatcagccaattaccgtcaagattactgagatacggaaacgctggggccagaacactcagggcaacttttctttacagttctgccggagatggtccaggactcacagctggtttcctgaaaggctgccacaagatggcgacaacgtcacagtggagaatggccaattgcttctgctggacactaacacaagcatcctcaacttactgcacattaaagggggcaagctgattttcatggccccaggacccatcgagctcagggcacacgccatccttgtttctgatggtggagagctccggattggatccgaagacaagcccttccaaggcagagctcagatcacactctacgggagttcctactcaactcccttctttccctatggagtcaagttcctggctgtgaggaatggaactctttctctgcacggttcactaccagaagtaattgtcacctgtcttagagcaactgcccatgccctagacacagtgctggctttagaagatgctgtggactggaaccctggggatgaagttgtcatcatcagtggaacaggtgttaaaggtgccaaaccgatggaagagattgtcactgtggaaactgtgcaggatacagacctctatcttaagtcacctttgagatattctcacaactttacagagaattgggtggctggagagcaccatattttaaaggccactgtggctctgctcagcaggagtattaccatacaaggaaatctcactaatgagagggagaagctgcttgtttcatgccaggaggccaatgctccagaaggtaatctgcagcactgtttgtattccatgagtgagaagatgctaggatccagggatatgggagccagagtgatcgttcagtccttcccagaagagcccagccaggtccagttgaagggagtgcagtttcaagtcttggggcaagccttccataagcatctgagctcactcactctggtgggagctatgagagagtctttcatacagggctgcacagtgaggaactccttcagtagaggcctcagcatgtgcgggaccttgggcctgaaggtggacagtaatgtattctacaatattttaggtcatgcgctgctagttgggacatgcacggagatgagatatatctcctgggaggcaattcatggaaggaaagatgactggtcaggacatggaaatataataagaaacaacgtgatcatccaggtttctggtgccgagggactctccaatcctgaaatgttgacaccatctggcatctatatctgcagtcccaccaatgttatagaggggaacagagtgtgtggtgctggctatggctactttttccatctcatgaccaaccaaacatcacaagctccgcttctttccttcactcagaacattgcacattcttgtaccaggtatggtctctttgtataccctaaatttcagccaccttgggataatgtcactggcaccactctgttccagagcttcacagtttgggaaagtgcaggtggtgcccagatttttagaagtagcaatcttcgcctgaaaaacttcaaagtttattcatgcagagattttggaattgacgtcttggaaagtgatgcaaatacttcagttactgacagcttattacttggtcattttgcccacaagggaagtctgtgtatgtcatctgggattaaaactcctaaaagatgggaactgatggtgtctaacacaacctttgttaattttgatctcatcaactgtgtggccattagaacctgttcagactgttcccaaggacaaggtggatttactgtgaagaccagccagttgaagtttacaaactcttcaaacttagtggcatttccatttcctcatgcagcaattttggaagacttggatgggtctctgtctgggaaaaacagaagtcacattcttgcttctatggaaaccctttcagcttcttgtttggtcaattcaagctttggtcgggttgtccatggcagtgcctgtggaggaggtgttctttttcatcgtatgtctattggtttagcgaatactcctgaagtttcttatgatttaaccatgactgacagcagaaataaaacaaccactgtcaattatgtacgtgatacattgtctaaccctcgtggctggatggctctgctcttggaccaagagacctactcattgcaatctgagaacctttggatcaacagatctctgcagtactcagcaacctttgacaactttgctcctggtaattacctactgctggtgcacacagatttgccgccttaccctgacatcctcctaagatgtgggagtcgagtgggtctgtcttttccatttcttccatcaccaggtcagaaccaaggctgtgactggttcttcaatagccagctgaggcaactcacctatctggtttcaggtgaaggccaagttcaagtcattctccgggtgaaggaaggtatgcccccaactatttcagcttctacctctgcccctgaatcagctttaaaatggtccctccctgaaacatggcaaggtgttgaagaaggctggggaggatacaacaataccattccaggccctggggatgacgttctcattttacccaacagaactgtccttgtggatacagatcttccattcttcaaagggctgtatgtgatggggaccttagacttccctgtggacagaagcaatgttctgagtgtggcatgcatggtcattgcaggcggggagctgaaagttggtactttagaaaatcccttagaaaaggaacaaaagcttctgattctccttagagcctcagagggagtcttttgtgaccgtatgaatggaattcatattgacccaggaacaattggggtttatgggaaagttcatctttacagtgcttatcctaagaactcctggacacatcttggagctgatattgcctcaggaaatgagagaattatagtagaagatgcagtggattggcgcccccatgacaaaatagtccttagctcctcttcttatgagcctcatgaagcagaggtcctcactgtgaaagaagtcaagggccaccatgtgaggatctatgaacggctcaaacaccggcatattggaagtgtacatgtcacggaggatggccgacacattcgtttggctgctgaggttggactgttgacccgaaatatacaaattcagcctgacgtatcatgtagggggagactgtttgtggggtccttcaggaagtccagccgagaagaattttcaggtgtccttcaacttcttaatgtggaaattcagaacttcgggtcaccattgtactcatctgttgaattcagtaatgtgtcagcaggatcctggatcatatcatctactctgcaccagagctgtggcgggggcattcatgcagctgccagtcatggagtacttttaaatgacaatattgtgtttggcacagctggccatggcatagatttagagggtcaggcctatactgtcactaataaccttgtggttctgatgacacagccagcgtggtccaccatttgggtggcgggaatcaaagtgaaccaggtaaaggacatcaacctccatggcaacgttgtggcaggatcagagagacttggctttcacatccgaggccacaagtgctcctcttgtgaactgctttggtctgacaatgtggcgcattcaagtcttcatggccttcatctctataaggaaagtggacttgacaactgtaccagaatctctggcttcttggctttcaagaactttgactatggtgccatgttacatgtagagaacagcgtggagatagagaacattactctggtagacaatactattggtcttttggcagtagtgtatgtattttctgctccacaaaattccgtcaaaaaagtgcagattgtgcttaggaattcagtcattgtggccaccagctcttcttttgactgcattcaggacaaagtgaagccgcactcagccaacttgacatcaacagatagagctccctccaatccaagaggaggtcgaattggtattctgtggcctgtattcacctcagaaccaaatcagtggcctcaggagccatggcacaaagtgaggaatgatcattcaatttcaggaatcatgaaacttcaagatgttaccttttctagttttgtgaagagttgctatagcgatgacctggatgtctgcattctaccaaatgcagagaacagtggaattatgcacccaataacagcagagaggaccaggatgctaaagataaaagataaaaacaagttctactttccttcattacaacccaggaaagatttaggaaaagtagtctgtcctgaattagactgtgcaagtccaagaaaatatctcttcaaggatctggatgggagagccctgggtctgcctccaccagtttctgtatttcctaaaacagaggcagaatggactgcatccttcttcaacgcaggtacatttagagaagaacagaaatgtacataccaatttctgatgcaaggattcatctgcaaacagactgaccaagtggtcctaattcttgatagcgctgatgccatttgggcaattcagaagttatatccagttgtatctgtgactagtggttttgttgatgtctttagcagtgtaaatgccaatattccctgctctacttctgggtcagtgtctactttctattctatcttacccatcaggcaaatcaccaaagtctgcttcatggatcaaactcctcaagttttgcgcttttttctattggggaacaaaagtacctccaagcttctcttggctgtattctaccatgagctccagagcccccacgtcttcttaggggaaagttttattccacccactctggttcagtcagcttccttattgctgaatgaatctattggtgccaactatttcaacatcatggataacctcttgtatgttgtcctacaaggagaggagcccattgaaatacgctcaggtgtttccattcacttggccctcactgtgatggtttcagtcttagaaaaaggctgggaaatagtaatactcgaaagactaactaacttcttacagattggccaaaaccaaatcaggtttattcacgagatgcctggccatgaagagaccttaaaggccattgctgacagtagagcaaaaagaaagcgcaattgccctactgtgacttgcactagtcattatagaagagttggtcaacgtaggcctctcatgatggaaatgaactcacatagggcttcacccccaatgactgtggaaactatctcaaaagtgattgtcattgaaattggtgattcgccaacagtaaggagcactggaatgatttcatccttatcaagtaacaaattacagaatttggctcatcgagtcatcactgctcaacagactggggtactagagaatgttctgaatatgactatcggggccttactagttactcagtcaaagggagtcattggctatggaaatacaagcagttttaaaactgggaacttgatatatattcggccctatgcactttccatcctagtccagccttcagatggagaagtgggaaatgagcttccagtgcagccacaattggtatttttggatgagcagaatcgaagagtagagtccctgggacctccttcagagccatggacaatttcagcttccctggaaggagcatcagactcagtgctaaaagggtgcacccaggcagaaactcaagatggttatgttagcttctacaacttggcagtcttgatctctgggtcaaactggcactttatttttactgtcacttctcctccaggagtcaattttacagctcgatccaagccatttgctgtcttgcctgtgactaggaaggagaagtcgaccatcatcctggctgcttccctgtcctctgtggcctcatggctggctctgagctgtctggtgtgctgttggcttaaaagaagcaaaagcagaaaaacaaaacctgaagagattcctgaatcccagactaataatcaaaatattcatatccacatctcatccaaacgccgagaatcacaagggcccaaaaaagaagacactgtggtgggagaagatatgagaatgaaggtcatgctgggcaaggtgaaccagtgcccccaccagttgatgaatggagtgtccagaaggaaagttagccgccacattgtccgagaggaagaggctgctgtgcctgctcctggtactactggcatcacatcccatgggcacatctgtgctccaggtgctcctgctcagcaggtgtacctgcaagagactgggaactggaaggagggccaagagcagttgctcagataccagctggcaggccaaaatcagctgctgctgctatgcccagacttcagacaagagaggcagcagttgccagggcaaagtcggctgagtaagcaaagtggcagcttggggctttcccaagagaagaaagcctcctgcggggccactgaggcattctgccttcattcagtacacccggaaactattcaggagcaactgtgatcagggaagttgggggcatttggcctgaaaggcagaatgttcccagtatttctggataataagctggggaagtgaggactgtcctgctgggacaactaagaagagagaatgtggactctgaatccctttttcaactttaaaatggaaaacagtcatataaatgcttacagactgaaaaatgtctcatacatattttgcagctatcatgatcctagttcaatgctaggcaaataatggcacttgttaattatttaccagtttttaacttaagcctgattttaacaacttgataatggtgtaatactgacttataccagcaggggttattattaagcattctctggattgaccacccacaatgctttgagcttcttttatagaagggatcatgaaaaggtctggtcagctacagtttaattccacactgttacagaaaagcatttctttatcctgtagtagcatttgaagggacagttcaacaccctgctccctgatctgtcagagcttaccttccaaccacaaggcaacttcctggctttttacaagtggattttatttcatggtttaaattcaatcattattgagaacctacagtagtgtgagcgtatcaaatttgcacttcatgaggatttacacatgaaaattgatattctcatgggctttgctgagagtttagttaaggacaaagatgtaaaaatgccaaatttgggaaaggaaattttgtatgaccactgttctatttttcagtgattctctctgttagtagctgggtcacatttacaactggaaaagaactacattgggagatcagagaaagccaagtggccaagtcctttatcaaaaagctgctttttggagaagatgatgcataaagctgtgatactaaggagaggagagattatgtcatatgcaactgctctaggctgtgcagggggtttaaatggagatcagaacaaaggctcacctggtattgatacatttggtaaggttgttaaaggcaatttcaccaaattcacacatttgtacggggcccatttcttttcaaactgaagaatactttaaacagcctgactgtgtccttggctctggatccagaaggccttatgctccaagcatgtaaagaaaagatcgcaggaatgtggagagcttccaaaaagagattgctctcagattttcctgaaaatcctgaaaaccaggattttccaatctctacaatgttaaggggttgttgtgtagttgcattggaagagagaaaggaaacacactctttcattgctgaattctaaataatgatgccctgaattagttctatgagaagtactggcagacagctgttatgtctgcagggcatcaaggggcaggtgtgtctcaccctactaagaattggcagaaatgttttaacctcttctttaggcatctggtgagtattgcagatcttcaggctgtccctaaaaggaggtaggtagccttctctgtggtcactgtgttggatttggaagaaaatataagtagatgttaaggtcagtgctctccaggagatttcaatccaggctatctgtgttcagggaatgatttgcaagaagttggtttatagacgtttactctggaggcacaagctggctgccatgctgagtaagtcctctttgtagatgatgtattttgcttgggcaccaacagaattaaaaacgaaaaacaaaaaaaaactcgaatgacttaggcagaacatgccttccctagtttaattagtccctgttataaccagttatttatctttttttgtagattctcggtcttgaagtcatttgcctttgcaatctctactttagtatactcattggatcctcaaagagccgtaagctttttggaaaaaaacatttcagaagtgaaggcttttgaggtttataaaatggtagcagtcttagtccttgccctgcctcagtttacctgcacatgctttctttcatttcctcggattctttcaccactttttaagttttttttccacaggtatttttcctgagctctataccatgcatttagctgcctagtgagaatatccagtaggttatcctatagttactatgaagttaacacagcccaaaaacctacttctccttgtgtttttttccaactcaatgaatgacatcactgcactcagaccagaaatctagaagtcagtcatgactcttcattctatttcgcccttcacaaagagttagctgccagctctgttatttctgccccttctttacccttcttccaatttttattatcttcttatttatcctctatgtgtcacaagaccagtctttctgggaggcatgttttatcctatccctctgcgtaggaataaccataattatcttactaattccatcccagaaaagcctgtgatccctgaggccagaattgactctttgggcctaaatagcagctataaacatcttcagtaacttgccaggctctagcatgtggcatggaattttggcatctagctaaaattcctcaacccatagttaagctactcctctttctcctaaaaaaaaaaaaaaatgagagaattagggaaacaccaaaagcaaagagagcagctctatgttcattcatgtctggagatgagccaatttgagcaccactgtaggccaactctaaatttattcagatcgttaacatgggtaacccagcaaatatttcccagcagtgacaatctacaccctttatctaaataaatattgagatgtgcttttttcctgtgttagttcaaagaatctcttcttgcctcccattgctgattttctgtattgatggactcatttctctcaagagattggacaagctaaaattctagagagttcaaaagtgtttgaaagtacattttaagtgttctcaccacaaaaaatgctagtgtgtgaggtgatacatatgttaattagttcaactgatccattccacaatgtatacatatttcaaactatcgagttgtacatgataaatatatacaatttttatttgtcaaataaagaacatctataaatatttatagatttcaaaattgagaaagaagtatatatggagccacggttgttttgaccatttctccatgctttttgtttggggagggggacattttttggggggcagggactgtgttcagggaaagtacctgaccaacagaacttcaagtctcttccagagtgcgagactcagcttatctgatcaaggtgaacttgcccttcaatagacttgcccttgttactgcccagtgaggccaccaaggaccaagaacagttgagctctctcagggccttcccctttcaacaatttagttgaatgactcccttccatctatcagtcttactccaaatatatgaaattactatacattgaaatgcctgcaaactatatgcaaaaatgagtatgaggaaatcaaatgtaaatcatatgcaaatattattcaaccaagcttctataaaattgtacgtgtcaataacagtaaagaattttaattaattctgtcatttaaaattcatgcattccatattttgctttcagaacttatagtctatgccaattttgaaaaaactataagcacaaggaattaaatactattgagtatagaactgttgatttcaacatacactatagcactttgactaattacagatatatttgatagaaaagtcacatttctacaaggtaattttcaaaaagaaataaaacatttctgtaaacttaaatgtggattaagtggcagaatacagagatttgaatgtttacaaat

SEQ ID NO: 167259 - DNA, 13076 bp, Homo sapiens
  Payload ID: 12911
  Gene Symbol: PKHD1L1
  Gene Name: polycystic kidney and hepatic disease 1 (autosomal recessive)-like 1
  Uniprot ID: Q86WI1
  ENST ID: ENST00000378402
  CDS Start-End: 105-12836
gggacgaagcgggcccgccagcgagtcgcagtcccaggagccgagctccagcactagagccagctgcgagcggagggcaccaactccgcagaactggcttttcaatgggacacctgtggctcctgggtatttggggcctctgtgggctgctcctgtgtgccgcggatcccagcacagatggctctcaaataatccccaaagtcacagaaataatacctaaatatggcagtataaatggagcaacaaggctgactataagaggggaaggtttttctcaagcaaaccagtttaactatggagttgataacgctgagttgggaaacagtgtgcaattaatttcttctttccagtcaattacttgtgatgtagaaaaagatgcaagtcattcaactcaaattacatgctatactagagcaatgccggaagattcctacactgttagagtcagtgtggacggggttcctgttacggaaaataacacctgcaaaggtcacatcaacagctgggaatgtaccttcaacgcaaaaagttttagaaccccaacaataagaagcatcacacctttatctggaactccaggtacactaataacaatccaaggcagaatcttcactgatgtctatggaagtaatattgcactaagctcaaatgggaaaaatgttaggattttgagagtttacattggaggaatgccctgtgagcttctcataccacaatctgataatttatatggtctaaaactggatcatccaaatggagatatgggttctatggtttgtaagacgactggaacttttattggtcatcacaatgtcagcttcatcttagataatgattatggaaggagttttccacagaaaatggcatattttgtttcttctctcaataaaattgcaatgtttcaaacatatgcagaggtcaccatgattttcccttcacaaggaagcattcgaggtggcaccacgctgacaataagtgggcgtttctttgatcagacagatttccccgtcagagttctagttggaggtgaaccttgtgatattttgaatgtcacagaaaatagtatatgttgcaagacaccccccaaacctcatattctcaaaactgtatatccaggagggagaggcctgaagcttgaggtgtggaataatagccgtccaatacgtttggaagagatactggaatacaatgaaaaaacgcctgggtacatgggtgccagttgggtagattcagcttcctatatttggctcatggaacaagacacatttgttgcacgctttagtggatttttggtggctccagattctgatgtttatagattctacatcaagggtgatgaccgttatgctatttattttagccagactggacttccagaagataaggtgaggattgcatatcattctgctaatgccaacagttatttttccagtccaacacaaagatcagatgatattcatctgcagaaaggaaaagaatactatattgaaatcttgctgcaggagtacagattaagtgcatttgttgatgttggactgtaccagtatcgaaatgtttatactgaacaacaaacaggagatgcagtgaatgaagaacaagttatcaaatcccagtcgacaatcctccaggaagtacaggttataacattggaaaactgggaaacaactaatgcaattaatgaggttcagaagatcaaggtaaccagcccatgtgtggaagctaattcatgttcactttaccaatatagattaatctataatatggaaaaaactgtcttcctacctgctgatgcttctgaattcatactgcaatcagccttgaatgacctctggtctataaaaccggacacagttcaagtaataagaacacaaaatccccagagctatgtctacatggtaacattcatatcaactagaggagactttgatctgcttggttatgaagtagttgaagggaataatgtcacactggatattacagaacaaaccaaaggaaaacccaacttggagacattcacactgaattgggatgggatcgcttctaagccactcactctatggtcatcagaagctgaatttcagggagcagtggaagaaatggttagcactaagtgtccaccacaaattgcaaattttgaagaaggatttgttgtgaaatatttcagagactatgaaactgattttaatctggaacatattaacagagggcagaagacagctgaaaccgatgcttactgtggtcgttattccctgaaaaacccagctgttctttttgactcagcagatgttaaaccaaacagacgaccatatggagatattttattgtttccttataatcagttatgtttagcatacaaaggattcctggcaaattatattggtctaaaatttcagtaccaagacaatagcaagattactagaagcactgatacacagtttacatacaactttgcttatggaaacaactggacttacacttgcatagaccttctggatctcgtaagaacgaaatacactgggacaaatgtttctcttcagaggattagcttacataaagcatcagaatcacagtccttctatgtggatgtagtgtacattggacacacatctacaatctcaacattggatgaaatgcccaagagaagacttcctgcattagcaaataaaggaatattcttagagcactttcaggtgaatcagaccaaaacaaatgggccaactatgacaaaccaatattctgttaccatgacttcatacaattgcagttacaatatacccatgatggctgtgagctttgggcagataatcacacatgagacagagaacgagtttgtctacagaggaaataattggccaggcgagtcaaaaattcatattcaaagaattcaagctgcatctccacctctaagtggcagctttgacattcaagcttatggacatattcttaaaggcctccccgctgctgtgtcagctgcagatctgcagtttgcactccagagtctggagggaatgggaagaatctcagttacacgagagggaacctgtgctggctacgcgtggaacatcaaatggagaagcacctgcggaaagcagaatcttctacagattaatgattccaacattattggagaaaaggctaatatgacagttacaaggataaaggaaggtggcttattcagacaacatgtacttggagacctacttcgtacacccagtcaacagccacaggttgaagtctatgtcaatggaattccagctaaatgttcaggtgactgtggatttacatgggattccaacattactcccctagtcttggcgataagcccttctcaagggtcctatgaagaaggcacaattctaaccatagtgggttctggattttctcctagttcagctgtaacagtctcagttggaccagtaggttgttctcttctttctgtggatgaaaaagagctcaagtgccagattctgaatggaagtgctggacatgcccccgttgctgtgtccatggctgatgttggactagcacagaatgtagggggtgaagagttctactttgtttatcagagtcagatctcacatatctggcctgattctggaagcatagcaggtggtactctactgactttatctggatttggctttaatgaaaattcaaaggtattagttggaaatgaaacctgcaatgtgattgaaggggatttgaataggataacctgcaggacaccaaaaaaaactgagggtacagttgatatttcagttactaccaatggatttcaagccacagcaagggatgcttttagttataattgtttacagacaccaattataactgattttagtccaaaagtacgaacaatactaggagaagttaatttaacaattaagggctataattttggaaatgaactcacacaaaacatggcggtgtatgttggaggaaaaacctgccagattcttcactggaacttcacagatattagatgccttttgcccaagttgtctcctggaaaacatgatatctatgtagaagtcagaaactggggttttgcatcaacaagagacaaattaaattcttcaatacagtatgttttagaagtgaccagcatgtttccacaaagaggctccttgtttggtggaactgaaatcaccataaggggttttggattcagcacaataccagctgagaataccgtgctgttagggtccatcccttgcaatgttacatcatcatcagaaaatgtcataaaatgtattcttcattcaactgggaatatattcaggattaccaacaatgggaaagattcagtacatggattaggttatgcctggtcaccaccagtcctaaatgtgtctgtgggggacacagtggcatggcattggcaaacacatccgtttcttagagggataggatataggattttttctgtctccagtcctggaagtgtaatttatgatggcaaaggattcacaagtggaagacaaaaatctacatcaggttcattttcttaccaatttacttctcctggaatccattattatagcagcgggtatgttgatgaggctcactccatttttctccaaggagtcattaatgttttaccagctgaaaccagacacattcccttgcacctgtttgtgggtcgctctgaagccacatatgcttatggaggacctgagaatttgcacttgggaagctctgtggcaggctgcctagcaacagaacccctgtgcagcctgaacaataccagggttaaaaattcaaaaagattgctatttgaggtttcaagttgtttttcaccatctataagcaacattactccgtccactggaacagtaaatgaactaataacaattattggacatggctttagtaatctcccatgggctaataaggttacaattggtagctacccctgtgtcgtagaagaaagtagtgaggattcaattacatgtcatattgaccctcaaaactcaatggatgttggtatcagggaaactgtcactttgactgtctacaacctgggcactgctatcaatacgttgtccaatgaatttgataggcgatttgtacttttgccaaacattgacctggtgttgccaaatgcaggatcaactacaggaatgacaagcgtgaccataaaaggctctggatttgccgtttcttctgcaggtgtaaaagtccttatgggtcatttcccatgtaaagttctatcagtgaattatacggccattgaatgtgaaacatcccctgctgcccaacagcttgtggatgtagatcttctaatacatggagtgcctgcccagtgccagggaaactgcaccttttcatacttagaaagcatcactccttacataacaggagtcttcccaaactctgtcataggatctgtaaaagttcttattgaaggagaaggtttggggactgttttggaggacattgctgttttcattggaaatcaacagttcagagcaatagaggttaatgaaaacaacatcactgctcttgtgactcctctcccagttggacatcattctgttagtgttgtggtgggaagtaaaggcttggctctgggaaacctgactgtcagcagccccccagtagcatctctatcaccaacttctggaagcattggtggtggaactacactggtgatcacaggaaatggcttctatccaggcaacactacagtcactattggggatgaaccttgtcaaattatttccatcaaccccaatgaagtctactgccgcactcccgctgggaccactggaatggtcgatgttaaaatctttgttaatacaattgcttatccacctttgctttttacatatgccctggaggatactccatttctcagaggaattatcccaagcagaggtccaccaggaactgaaattgagatcactggatccaactttggctttgagatcttggaaatctccgtgatgataaataacattcagtgtaatgtaaccatggccaatgatagtgtggtgcagtgcatcgtgggagatcatgctgggggcacatttcctgttatgatgcatcataagacaaaaggctcagccatgtccacagttgtatttgagtacccgcttaatattcaaaatattaatccaagccaagggagctttggtgggggtcaaaccatgactgtgacaggcaccggatttaatccacaaaattcaattatattagtttgtggctcagaatgtgcaattgacaggcttagatctgattacacaacactattatgtgaaattccatctaataatggcacgggagctgagcaagcctgtgaagtgagtgtggttaatgggaaagatttgtcacagtccatgactccgtttacgtacgcagtgtcactgactccactcatcactgcagtatctcctaagagaggcagtacagcagggggcaccagactgacagtcgtgggatcaggattcagtgaaaatatggaggatgttcatatcaccatagctgaagccaaatgtgatgttgagtattccaacaagacacacatcatctgcatgacagatgcccatactctatcagggtgggctccagtttgtgtccacatcagaggtgtcggcatggccaaactggataatgctgactttctttatgttgatgcctggtcctccaatttctcatgggggggaaaatctcccccagaagaaggatctcttgttgttattacaaaaggacagaccattctgctggatcaaagcacccctattttgaaaatgttgcttattcagggtgggactctaatatttgatgaagctgacattgaactccaggcagaaaatattctaattacagatggaggtgttcttcagattggaacagagacatccccattccaacacaaggctgtcattaccttgcatggtcacctgcgatctcctgagctccctgtctatggtgccaaaacactggctgtgcgggagggaatcctggatctgcacggtgtgcctgttcctgtgacctggactcgcttggctcatactgcaaaggcaggggaaagaattttaattttacaagaagcagtaacatggaaaccaggagataacattgtaattgcaagcacaggacacagacacagtcaaggagagaatgaaaaaatgaccattgcatctgtgtctgctgatggcataaacataacactaagtaacccactaaattacacacacttaggaattacggtcacactccctgatggaactctgtttgaagcaagagcagaagttggaattcttacaagaaatattttaataagaggatctgataatgttgagtggaataacaaaattcctgcatgtcctgatggatttgacacaggagaatttgctacacagacctgtctccaaggaaagtttggagaagaaataggaagtgaccaatttggaggctgcgttatgtttcatgctcctgtacctggtgctaacatggtaactgggagaatagaatatgtagaggtattccatgctggccaggctttccggttggggcgatatccaatacattggcacctgcttggagacttacagtttaaatcttatgtaagaggctgtgcaattcaccaggcctataacagagctgttactattcataacacacaccatcttctggttgagaggaatattatatatgatattaagggaggagcattttttatagaagatggtattgaacatggcaatatcctccagtataacttggcagtatttgtacagcaaagtaccagtcttctgaatgatgatgtgaccccggctgcattttgggtcaccaacccgaacaataccatacgacacaatgctgttgctggtggcactcactttggcttttggtaccggatgaacaaccaccctgatgggccatcctatgacagaaacatttgtcaaaaaagagttccccttggcgaattttttaacaatactgtccattctcaaggttggtttggaatgtggatctttgaggaatatttccccatgcaaacgggatcttgtacatctacagtgcctgcacctgcaatatttaactcacttactacttggaattgtcaaaaaggagctgaatgggtcaatggaggtgcccttcagttccataactttgtgatggtgaataactatgaggctggaattgagactaagaggatcctggctccttatgttggagggtggggtgaaaccaatggagcggtgattaaaaatgccaaaatagtcggccatcttgatgaactgggaatggggtctgcattttgcacagcaaaaggcctggttctcccatttagtgaaggcttgactgtctcttctgtgcactttatgaactttgaccgtcccaactgtgtagctttgggagtgacatccatctctggagtttgtaatgacagatgtgggggttggagtgcaaagtttgttgacgtccagtattctcacacaccgaacaaggctggctttcgctgggaacatgaaatggtaatgattgatgttgatggctcacttacagggcacaaaggacataccgtcattccacacagctcattgctagacccttctcattgtactcaggaagctgagtggagcattgggttccctggatcagtctgtgatgcttcagtcagctttcaccgtttagcgttcaaccagccttctccagtatctctgcttgaaaaggatgtggttctttcagactcttttggcacaagcattattccatttcagaagaaacgactgactcatatgtctggatggatggctctgattccaaatgcaaatcacattaactggtattttaaaggtgtggatcacataaccaacatttcatatacatcgacattctatggattcaaggaagaagactatgtaattatatcacataacttcactcaaaatcctgacatgtttaatattattgatatgaggaatggttcctcaaatccattgaattggaatactagcaagaatggggactggcaccttgaagcaaacactagtactctatattacttggtgtcaggaagaaatgaccttcatcagagtcagctcatttctgggaacctggatcctgatgtgaaagacgttgttattaatttccaagcttactgttgtattctccaggattgctttcctgtacatccgccatcaagaaaaccaattcccaagaagcgaccagccacatataatttatggtcaaatgattctttttggcaatcatcacgagaaaataattatactgtacctcacccaggggcaaatgtgattatacctgaaggaacatggattgtagctgacatagatatgccatcaatggaaagactcattatttggggggttctagaactggaagataaatacaatgtaggagctgcagaatcttcttacagagaagttgttttgaatgctacctacatatcactgcagggaggtagattaatcggtggctgggaagataacccttttaaaggagacttaaagattgttcttagaggaaatcatactacacaagactgggctcttccagaaggaccaaatcaaggggcaaaggtcttaggggtgtttggtgagctggatcttcatggaattccacattcaatatataaaactaagctctcagaaactgcatttgcaggttccaaagtcctgtctctgatggatgctgtggattggcaggagggagaagagattgtgataacaaccacaagctacgatttccaccagacagaaacaagaagtatcgttaaaatcctgcatgatcataaaattctcattcttaatgatagcctttcctatactcactttgctgaaaaataccatgtccctggaactggtgagagctacacgttagcagctgatgttgggatactgagtaggaacatcaaaatagttggtgaagattaccccggttggtctgaggactcttttggagcacgcgtactggttggctcattcactgaaaatatgatgacatttaaaggaaatgcaagaataagtaatgtggaattttatcacagtggtcaagaaggcttcagggatagcacagatccaagatatgctgtaacgtttcttaacctaggacagattcaagaacatggctcatcttatattcgaggctgtgcttttcaccatggcttctctccagcaattggtgtatttgggacagatggattggacatagatgacaacatcattcactttacagtgggggaaggcataagaatatgggggaatgccaaccgagtccgagggaatttgattgcactttcggtttggccaggaacctatcagaacagaaaagatttaagttcaactctctggcatgcagcaattgagataaatagagggaccaatacagttttacagaataatgtagtggctggatttggaagagcaggataccgcattgatggtgaaccttgcccaggccagtttaatcctgtggaaaagtggtttgacaatgaagcccatggaggtttatatgggatctatatgaaccaagatggccttcctggatgttctcttatacaaggatttaccatttggacatgctgggattatggaatttattttcagaccacagagagtgtgcacatttataatgtgaccctggttgacaatggaatggccatttttccaatgatttacatgccagctgctatatcacacaaaatttccagtaaaaatgtacaaattaagagctcattaattgttggaagtagccctgggtttaattgctctgatgtcctaactaatgatgatcctaatattgaactcactgctgctcatcggagtcctagatctccatcaggtgggagaagtgggatttgttggcctacctttgcttcagctcataacatggcaccccgaaagccccatgcaggaatcatgagttacaatgccatcagtggccttttggacatctcaggttcaacatttgttggatttaagaatgtttgttcaggggaaactaatgttatattcattactaaccctttaaatgaggatttacagcatccaatccatgtgaagaatataaaactggttgataccactgaacaatcaaaaatatttatacataggcctgatataagtaaggtcaatccatctgattgtgtagacatggtttgtgatgccaagaggaaatcttttcttagagacatagatggctcctttctggggaatgctggttctgtgatacctcaagcagaatatgaatgggacggaaacagccaagtaggaattggagactacagaattcctaaggcgatgctcacattcttgaatggaagtagaattcctgtcactgagaaagcacctcataaaggaattattagagattcaacctgtaagtaccttccagagtggcagagctatcagtgctttgggatggaatatgcaatgatggttattgaaagtctggatcctgacacagaaactcgaagactttccccagtggctataatgggcaacggttatgttgatcttattaatggcccacaggatcatggctggtgtgctggatatacatgccagagaaggctgtccctgtttcacagcattgtggctctgaacaaatcttatgaagtttacttcactggcaccagtcctcagaatcttcgactgatgttgcttaatgttgatcataacaaggctgttctagtaggaattttcttttccacacttcaacgtttggatgtctatgtgaacaacttattggtctgtccaaaaactacaatatggaatgcccagcagaaacactgtgaacttaataaccatctgtacaaagaccaattccttcctaacctggattccactgtccttggtgaaaactactttgatggaacctaccagatgctttatcttttggttaaaggaactatacctgttgaaattcacactgccacagtgatatttgtttctttccaattatctgttgcaacagaagatgacttttatacctctcacaatctggttaaaaatcttgccttgttcctaaagataccaagtgacaaaatccgtatcagcaaaataagagggaagagtctgaggaggaagagatccatgggattcataattgaaatagagattggagaccctcctattcagttcataagcaatggcaccacaggtcagatgcagttatctgaactccaggaaattgctggttctcttggacaagctgtaattttaggaaacatcagtagtatccttggatttaacatttcgtccatgtctattactaatcccctccccagcccaagtgactctgggtggattaaggtgactgcccagccagttgaaaggtctgcatttcctgttcatcacgtggccttcgtgtcctcactcttagtgatcactcagccggtggcagcacagccaggacagccatttcctcagcagccttcggtaaaggcaacagattctgacggtaactgtgtatcagttggaattactgcactaactttgagggccatactcaaggactccaataataaccaagtcaatggccttagtggaaatacaacaattccgtttagcagctgttgggccaactacacagaccttactccccttagaacaggaaaaaattataagattgaatttatactggataatgttgttggggtagaatccagaactttcagcctgctggcagagtctgtctctagcagtggcagcagcagcagcagcaacagcaaagcatcaactgtgggtacatatgcccagataatgactgtagtaattagctgtctggttggaagaatgtggctcttggaaatatttatggctgcagtttcaactttgaatataactttaagaagctactaaagtgctgttccgaagaataggctgaaacaaaaatataagaattattagctactttgttgggcaataggcaaaagtctatagcattttcatgaaaatatactaaaaatatttttatgatatataaaatgtactaattagctttaaacactaaaatcagatttcttcaaaatataaatttgttttgattctttatatttatatgtttttatttcatttcaataaacttccagaaatttgtca

SEQ ID NO: 167260 - DNA, 3686 bp, Homo sapiens
  Payload ID: 12911
  Gene Symbol: PKHD1L1
  Gene Name: polycystic kidney and hepatic disease 1 (autosomal recessive)-like 1
  ENST ID: ENST00000526472
  CDS Start-End: 1-3516
aagcaagagaaaataaatcaaaatgttacagttattcggaacaatccccacattccttgtaaaccccagatggtcttgaacctgtaccagcttaatcagctcgattgtcctggaggtagattaatcggtggctgggaagataacccttttaaaggagacttaaagattgttcttagaggaaatcatactacacaagactgggctcttccagaaggaccaaatcaaggggcaaaggtcttaggggtgtttggtgagctggatcttcatggaattccacattcaatatataaaactaagctctcagaaactgcatttgcaggttccaaagtcctgtctctgatggatgctgtggattggcaggagggagaagagattgtgataacaaccacaagctacgatttccaccagacagaaacaagaagtatcgttaaaatcctgcatgatcataaaattctcattcttaatgatagcctttcctatactcactttgctgaaaaataccatgtccctggaactggtgagagctacacgttagcagctgatgttgggatactgagtaggaacatcaaaatagttggtgaagattaccccggttggtctgaggactcttttggagcacgcgtactggttggctcattcactgaaaatatgatgacatttaaaggaaatgcaagaataagtaatgtggaattttatcacagtggtcaagaaggcttcagggatagcacagatccaagatatgctgtaacgtttcttaacctaggacagattcaagaacatggctcatcttatattcgaggctgtgcttttcaccatggcttctctccagcaattggtgtatttgggacagatggattggacatagatgacaacatcattcactttacagtgggggaaggcataagaatatgggggaatgccaaccgagtccgagggaatttgattgcactttcggtttggccaggaacctatcagaacagaaaagatttaagttcaactctctggcatgcagcaattgagataaatagagggaccaatacagttttacagaataatgtagtggctggatttggaagagcaggataccgcattgatggtgaaccttgcccaggccagtttaatcctgtggaaaagtggtttgacaatgaagcccatggaggtttatatgggatctatatgaaccaagatggccttcctggatgttctcttatacaaggatttaccatttggacatgctgggattatggaatttattttcagaccacagagagtgtgcacatttataatgtgaccctggttgacaatggaatggccatttttccaatgatttacatgccagctgctatatcacacaaaatttccagtaaaaatgtacaaattaagagctcattaattgttggaagtagccctgggtttaattgctctgatgtcctaactaatgatgatcctaatattgaactcactgctgctcatcggagtcctagatctccatcaggtgggagaagtgggatttgttggcctacctttgcttcagctcataacatggcaccccgaaagccccatgcaggaatcatgagttacaatgccatcagtggccttttggacatctcaggttcaacatttgttggatttaagaatgtttgttcaggggaaactaatgttatattcattactaaccctttaaatgaggatttacagcatccaatccatgtgaagaatataaaactggttgataccactgaacaatcaaaaatatttatacataggcctgatataagtaaggtcaatccatctgattgtgtagacatggtttgtgatgccaagaggaaatcttttcttagagacatagatggctcctttctggggaatgctggttctgtgatacctcaagcagaatatgaatgggacggaaacagccaagtaggaattggagactacagaattcctaaggcgatgctcacattcttgaatggaagtagaattcctgtcactgagaaagcacctcataaaggaattattagagattcaacctgtaagtaccttccagagtggcagagctatcagtgctttgggatggaatatgcaatgatggttattgaaagtctggatcctgacacagaaactcgaagactttccccagtggctataatgggcaacggttatgttgatcttattaatggcccacaggatcatggctggtgtgctggatatacatgccagagaaggctgtccctgtttcacagcattgtggctctgaacaaatcttatgaagtttacttcactggcaccagtcctcagaatcttcgactgatgttgcttaatgttgatcataacaaggctgttctagtaggaattttcttttccacacttcaacgtttggatgtctatgtgaacaacttattggtctgtccaaaaactacaatatggaatgcccagcagaaacactgtgaacttaataaccatctgtacaaagaccaattccttcctaacctggattccactgtccttggtgaaaactactttgatggaacctaccagatgctttatcttttggttaaaggaactatacctgttgaaattcacactgccacagtgatatttgtttctttccaattatctgttgcaacagaagatgacttttatacctctcacaatctggttaaaaatcttgccttgttcctaaagataccaagtgacaaaatccgtatcagcaaaataagagggaagagtctgaggaggaagagatccatgggattcataattgaaatagagattggagaccctcctattcagttcataagcaatggcaccacaggtcagatgcagttatctgaactccaggaaattgctggttctcttggacaagctgtaattttaggaaacatcagtagtatccttggatttaacatttcgtccatgtctattactaatcccctccccagcccaagtgactctgggtggattaaggtgactgcccagccagttgaaaggtctgcatttcctgttcatcacgtggccttcgtgtcctcactcttagtgatcactcagccggtggcagcacagccaggacagccatttcctcagcagccttcggtaaaggcaacagattctgacggtaactgtgtatcagttggaattactgcactaactttgagggccatactcaaggactccaataataaccaagtcaatggccttagtggaaatacaacaattccgtttagcagctgttgggccaactacacagaccttactccccttagaacaggaaaaaattataagattgaatttatactggataatgttgttggggtagaatccagaactttcagcctgctggcagagtctgtctctagcagtggcagcagcagcagcagcaacagcaaagcatcaactgtgggtacatatgcccagataatgactgtagtaattagctgtctggttggaagaatgtggctcttggaaatatttatggctgcagtttcaactttgaatataactttaagaagctactaaagtgctgttccgaagaataggctgaaacaaaaatataagaattattagctactttgttgggcaataggcaaaagtctatagcattttcatgaaaatatactaaaaatatttttatgatatataaaatgtactaattagctttaaacactaaaatcagatttcttcaaaat

SEQ ID NO: 167261 - DNA, 14138 bp, Homo sapiens
  Payload ID: 12912
  Gene Symbol: PKD1
  Gene Name: polycystic kidney disease 1 (autosomal dominant)
  Uniprot ID: P98161
  ENST ID: ENST00000262304
  CDS Start-End: 210-13121
gcactgcagcgccagcgtccgagcgggcggccgagctcccggagcggcctggccccgagccccgagcgggcgtcgctcagcagcaggtcgcggccgcagccccatccagccccgcgcccgccatgccgtccgcgggccccgcctgagctgcggcctccgcgcgcgggcgggcctggggacggcggggccatgcgcgcgctgccctaacgatgccgcccgccgcgcccgcccgcctggcgctggccctgggcctgggcctgtggctcggggcgctggcggggggccccgggcgcggctgcgggccctgcgagcccccctgcctctgcggcccagcgcccggcgccgcctgccgcgtcaactgctcgggccgcgggctgcggacgctcggtcccgcgctgcgcatccccgcggacgccacagcgctagacgtctcccacaacctgctccgggcgctggacgttgggctcctggcgaacctctcggcgctggcagagctggatataagcaacaacaagatttctacgttagaagaaggaatatttgctaatttatttaatttaagtgaaataaacctgagtgggaacccgtttgagtgtgactgtggcctggcgtggctgccgcgatgggcggaggagcagcaggtgcgggtggtgcagcccgaggcagccacgtgtgctgggcctggctccctggctggccagcctctgcttggcatccccttgctggacagtggctgtggtgaggagtatgtcgcctgcctccctgacaacagctcaggcaccgtggcagcagtgtccttttcagctgcccacgaaggcctgcttcagccagaggcctgcagcgccttctgcttctccaccggccagggcctcgcagccctctcggagcagggctggtgcctgtgtggggcggcccagccctccagtgcctcctttgcctgcctgtccctctgctccggccccccgccacctcctgcccccacctgtaggggccccaccctcctccagcacgtcttccctgcctccccaggggccaccctggtggggccccacggacctctggcctctggccagctagcagccttccacatcgctgccccgctccctgtcactgccacacgctgggacttcggagacggctccgccgaggtggatgccgctgggccggctgcctcgcatcgctatgtgctgcctgggcgctatcacgtgacggccgtgctggccctgggggccggctcagccctgctggggacagacgtgcaggtggaagcggcacctgccgccctggagctcgtgtgcccgtcctcggtgcagagtgacgagagcctcgacctcagcatccagaaccgcggtggttcaggcctggaggccgcctacagcatcgtggccctgggcgaggagccggcccgagcggtgcacccgctctgcccctcggacacggagatcttccctggcaacgggcactgctaccgcctggtggtggagaaggcggcctggctgcaggcgcaggagcagtgtcaggcctgggccggggccgccctggcaatggtggacagtcccgccgtgcagcgcttcctggtctcccgggtcaccaggagcctagacgtgtggatcggcttctcgactgtgcagggggtggaggtgggcccagcgccgcagggcgaggccttcagcctggagagctgccagaactggctgcccggggagccacacccagccacagccgagcactgcgtccggctcgggcccaccgggtggtgtaacaccgacctgtgctcagcgccgcacagctacgtctgcgagctgcagcccggaggcccagtgcaggatgccgagaacctcctcgtgggagcgcccagtggggacctgcagggacccctgacgcctctggcacagcaggacggcctctcagccccgcacgagcccgtggaggtcatggtattcccgggcctgcgtctgagccgtgaagccttcctcaccacggccgaatttgggacccaggagctccggcggcccgcccagctgcggctgcaggtgtaccggctcctcagcacagcagggaccccggagaacggcagcgagcctgagagcaggtccccggacaacaggacccagctggcccccgcgtgcatgccagggggacgctggtgccctggagccaacatctgcttgccgctggacgcctcctgccacccccaggcctgcgccaatggctgcacgtcagggccagggctacccggggccccctatgcgctatggagagagttcctcttctccgttcccgcggggccccccgcgcagtactcggtcaccctccacggccaggatgtcctcatgctccctggtgacctcgttggcttgcagcacgacgctggccctggcgccctcctgcactgctcgccggctcccggccaccctggtccccgggccccgtacctctccgccaacgcctcgtcatggctgccccacttgccagcccagctggagggcacttgggcctgccctgcctgtgccctgcggctgcttgcagccacggaacagctcaccgtgctgctgggcttgaggcccaaccctggactgcggctgcctgggcgctatgaggtccgggcagaggtgggcaatggcgtgtccaggcacaacctctcctgcagctttgacgtggtctccccagtggctgggctgcgggtcatctaccctgccccccgcgacggccgcctctacgtgcccaccaacggctcagccttggtgctccaggtggactctggtgccaacgccacggccacggctcgctggcctgggggcagtgtcagcgcccgctttgagaatgtctgccctgccctggtggccaccttcgtgcccggctgcccctgggagaccaacgataccctgttctcagtggtagcactgccgtggctcagtgagggggagcacgtggtggacgtggtggtggaaaacagcgccagccgggccaacctcagcctgcgggtgacggcggaggagcccatctgtggcctccgcgccacgcccagccccgaggcccgtgtactgcagggagtcctagtgaggtacagccccgtggtggaggccggctcggacatggtcttccggtggaccatcaacgacaagcagtccctgaccttccagaacgtggtcttcaatgtcatttatcagagcgcggcggtcttcaagctctcactgacggcctccaaccacgtgagcaacgtcaccgtgaactacaacgtaaccgtggagcggatgaacaggatgcagggtctgcaggtctccacagtgccggccgtgctgtcccccaatgccacgctagcactgacggcgggcgtgctggtggactcggccgtggaggtggccttcctgtggacctttggggatggggagcaggccctccaccagttccagcctccgtacaacgagtccttcccggttccagacccctcggtggcccaggtgctggtggagcacaatgtcatgcacacctacgctgccccaggtgagtacctcctgaccgtgctggcatctaatgccttcgagaacctgacgcagcaggtgcctgtgagcgtgcgcgcctccctgccctccgtggctgtgggtgtgagtgacggcgtcctggtggccggccggcccgtcaccttctacccgcacccgctgccctcgcctgggggtgttctttacacgtgggacttcggggacggctcccctgtcctgacccagagccagccggctgccaaccacacctatgcctcgaggggcacctaccacgtgcgcctggaggtcaacaacacggtgagcggtgcggcggcccaggcggatgtgcgcgtctttgaggagctccgcggactcagcgtggacatgagcctggccgtggagcagggcgcccccgtggtggtcagcgccgcggtgcagacgggcgacaacatcacgtggaccttcgacatgggggacggcaccgtgctgtcgggcccggaggcaacagtggagcatgtgtacctgcgggcacagaactgcacagtgaccgtgggtgcggccagccccgccggccacctggcccggagcctgcacgtgctggtcttcgtcctggaggtgctgcgcgttgaacccgccgcctgcatccccacgcagcctgacgcgcggctcacggcctacgtcaccgggaacccggcccactacctcttcgactggaccttcggggatggctcctccaacacgaccgtgcgggggtgcccgacggtgacacacaacttcacgcggagcggcacgttccccctggcgctggtgctgtccagccgcgtgaacagggcgcattacttcaccagcatctgcgtggagccagaggtgggcaacgtcaccctgcagccagagaggcagtttgtgcagctcggggacgaggcctggctggtggcatgtgcctggcccccgttcccctaccgctacacctgggactttggcaccgaggaagccgcccccacccgtgccaggggccctgaggtgacgttcatctaccgagacccaggctcctatcttgtgacagtcaccgcgtccaacaacatctctgctgccaatgactcagccctggtggaggtgcaggagcccgtgctggtcaccagcatcaaggtcaatggctcccttgggctggagctgcagcagccgtacctgttctctgctgtgggccgtgggcgccccgccagctacctgtgggatctgggggacggtgggtggctcgagggtccggaggtcacccacgcttacaacagcacaggtgacttcaccgttagggtggccggctggaatgaggtgagccgcagcgaggcctggctcaatgtgacggtgaagcggcgcgtgcgggggctcgtcgtcaatgcaagccgcacggtggtgcccctgaatgggagcgtgagcttcagcacgtcgctggaggccggcagtgatgtgcgctattcctgggtgctctgtgaccgctgcacgcccatccctgggggtcctaccatctcttacaccttccgctccgtgggcaccttcaatatcatcgtcacggctgagaacgaggtgggctccgcccaggacagcatcttcgtctatgtcctgcagctcatagaggggctgcaggtggtgggcggtggccgctacttccccaccaaccacacggtacagctgcaggccgtggttagggatggcaccaacgtctcctacagctggactgcctggagggacaggggcccggccctggccggcagcggcaaaggcttctcgctcaccgtgctcgaggccggcacctaccatgtgcagctgcgggccaccaacatgctgggcagcgcctgggccgactgcaccatggacttcgtggagcctgtggggtggctgatggtggccgcctccccgaacccagctgccgtcaacacaagcgtcaccctcagtgccgagctggctggtggcagtggtgtcgtatacacttggtccttggaggaggggctgagctgggagacctccgagccatttaccacccatagcttccccacacccggcctgcacttggtcaccatgacggcagggaacccgctgggctcagccaacgccaccgtggaagtggatgtgcaggtgcctgtgagtggcctcagcatcagggccagcgagcccggaggcagcttcgtggcggccgggtcctctgtgcccttttgggggcagctggccacgggcaccaatgtgagctggtgctgggctgtgcccggcggcagcagcaagcgtggccctcatgtcaccatggtcttcccggatgctggcaccttctccatccggctcaatgcctccaacgcagtcagctgggtctcagccacgtacaacctcacggcggaggagcccatcgtgggcctggtgctgtgggccagcagcaaggtggtggcgcccgggcagctggtccattttcagatcctgctggctgccggctcagctgtcaccttccgcctgcaggtcggcggggccaaccccgaggtgctccccgggccccgtttctcccacagcttcccccgcgtcggagaccacgtggtgagcgtgcggggcaaaaaccacgtgagctgggcccaggcgcaggtgcgcatcgtggtgctggaggccgtgagtgggctgcaggtgcccaactgctgcgagcctggcatcgccacgggcactgagaggaacttcacagcccgcgtgcagcgcggctctcgggtcgcctacgcctggtacttctcgctgcagaaggtccagggcgactcgctggtcatcctgtcgggccgcgacgtcacctacacgcccgtggccgcggggctgttggagatccaggtgcgcgccttcaacgccctgggcagtgagaaccgcacgctggtgctggaggttcaggacgccgtccagtatgtggccctgcagagcggcccctgcttcaccaaccgctcggcgcagtttgaggccgccaccagccccagcccccggcgtgtggcctaccactgggactttggggatgggtcgccagggcaggacacagatgagcccagggccgagcactcctacctgaggcctggggactaccgcgtgcaggtgaacgcctccaacctggtgagcttcttcgtggcgcaggccacggtgaccgtccaggtgctggcctgccgggagccggaggtggacgtggtcctgcccctgcaggtgctgatgcggcgatcacagcgcaactacttggaggcccacgttgacctgcgcgactgcgtcacctaccagactgagtaccgctgggaggtgtatcgcaccgccagctgccagcggccggggcgcccagcgcgtgtggccctgcccggcgtggacgtgagccggcctcggctggtgctgccgcggctggcgctgcctgtggggcactactgctttgtgtttgtcgtgtcatttggggacacgccactgacacagagcatccaggccaatgtgacggtggcccccgagcgcctggtgcccatcattgagggtggctcataccgcgtgtggtcagacacacgggacctggtgctggatgggagcgagtcctacgaccccaacctggaggacggcgaccagacgccgctcagtttccactgggcctgtgtggcttcgacacagagggaggctggcgggtgtgcgctgaactttgggccccgcgggagcagcacggtcaccattccacgggagcggctggcggctggcgtggagtacaccttcagcctgaccgtgtggaaggccggccgcaaggaggaggccaccaaccagacggtgctgatccggagtggccgggtgcccattgtgtccttggagtgtgtgtcctgcaaggcacaggccgtgtacgaagtgagccgcagctcctacgtgtacttggagggccgctgcctcaattgcagcagcggctccaagcgagggcggtgggctgcacgtacgttcagcaacaagacgctggtgctggatgagaccaccacatccacgggcagtgcaggcatgcgactggtgctgcggcggggcgtgctgcgggacggcgagggatacaccttcacgctcacggtgctgggccgctctggcgaggaggagggctgcgcctccatccgcctgtcccccaaccgcccgccgctggggggctcttgccgcctcttcccactgggcgctgtgcacgccctcaccaccaaggtgcacttcgaatgcacgggctggcatgacgcggaggatgctggcgccccgctggtgtacgccctgctgctgcggcgctgtcgccagggccactgcgaggagttctgtgtctacaagggcagcctctccagctacggagccgtgctgcccccgggtttcaggccacacttcgaggtgggcctggccgtggtggtgcaggaccagctgggagccgctgtggtcgccctcaacaggtctttggccatcaccctcccagagcccaacggcagcgcaacggggctcacagtctggctgcacgggctcaccgctagtgtgctcccagggctgctgcggcaggccgatccccagcacgtcatcgagtactcgttggccctggtcaccgtgctgaacgagtacgagcgggccctggacgtggcggcagagcccaagcacgagcggcagcaccgagcccagatacgcaagaacatcacggagactctggtgtccctgagggtccacactgtggatgacatccagcagatcgctgctgcgctggcccagtgcatggggcccagcagggagctcgtatgccgctcgtgcctgaagcagacgctgcacaagctggaggccatgatgctcatcctgcaggcagagaccaccgcgggcaccgtgacgcccaccgccatcggagacagcatcctcaacatcacaggagacctcatccacctggccagctcggacgtgcgggcaccacagccctcagagctgggagccgagtcaccatctcggatggtggcgtcccaggcctacaacctgacctctgccctcatgcgcatcctcatgcgctcccgcgtgctcaacgaggagcccctgacgctggcgggcgaggagatcgtggcccagggcaagcgctcggacccgcggagcctgctgtgctatggcggcgccccagggcctggctgccacttctccatccccgaggctttcagcggggccctggccaacctcagtgacgtggtgcagctcatctttctggtggactccaatccctttccctttggctatatcagcaactacaccgtctccaccaaggtggcctcgatggcattccagacacaggccggcgcccagatccccatcgagcggctggcctcagagcgcgccatcaccgtgaaggtgcccaacaactcggactgggctgcccggggccaccgcagctccgccaactccgccaactccgttgtggtccagccccaggcctccgtcggtgctgtggtcaccctggacagcagcaaccctgcggccgggctgcatctgcagctcaactatacgctgctggacggccactacctgtctgaggaacctgagccctacctggcagtctacctacactcggagccccggcccaatgagcacaactgctcggctagcaggaggatccgcccagagtcactccagggtgctgaccaccggccctacaccttcttcatttccccggggagcagagacccagcggggagttaccatctgaacctctccagccacttccgctggtcggcgctgcaggtgtccgtgggcctgtacacgtccctgtgccagtacttcagcgaggaggacatggtgtggcggacagaggggctgctgcccctggaggagacctcgccccgccaggccgtctgcctcacccgccacctcaccgccttcggcgccagcctcttcgtgcccccaagccatgtccgctttgtgtttcctgagccgacagcggatgtaaactacatcgtcatgctgacatgtgctgtgtgcctggtgacctacatggtcatggccgccatcctgcacaagctggaccagttggatgccagccggggccgcgccatccctttctgtgggcagcggggccgcttcaagtacgagatcctcgtcaagacaggctggggccggggctcaggtaccacggcccacgtgggcatcatgctgtatggggtggacagccggagcggccaccggcacctggacggcgacagagccttccaccgcaacagcctggacatcttccggatcgccaccccgcacagcctgggtagcgtgtggaagatccgagtgtggcacgacaacaaagggctcagccctgcctggttcctgcagcacgtcatcgtcagggacctgcagacggcacgcagcgccttcttcctggtcaatgactggctttcggtggagacggaggccaacgggggcctggtggagaaggaggtgctggccgcgagcgacgcagcccttttgcgcttccggcgcctgctggtggctgagctgcagcgtggcttctttgacaagcacatctggctctccatatgggaccggccgcctcgtagccgtttcactcgcatccagagggccacctgctgcgttctcctcatctgcctcttcctgggcgccaacgccgtgtggtacggggctgttggcgactctgcctacagcacggggcatgtgtccaggctgagcccgctgagcgtcgacacagtcgctgttggcctggtgtccagcgtggttgtctatcccgtctacctggccatcctttttctcttccggatgtcccggagcaaggtggctgggagcccgagccccacacctgccgggcagcaggtgctggacatcgacagctgcctggactcgtccgtgctggacagctccttcctcacgttctcaggcctccacgctgagcaggcctttgttggacagatgaagagtgacttgtttctggatgattctaagagtctggtgtgctggccctccggcgagggaacgctcagttggccggacctgctcagtgacccgtccattgtgggtagcaatctgcggcagctggcacggggccaggcgggccatgggctgggcccagaggaggacggcttctccctggccagcccctactcgcctgccaaatccttctcagcatcagatgaagacctgatccagcaggtccttgccgagggggtcagcagcccagcccctacccaagacacccacatggaaacggacctgctcagcagcctgtccagcactcctggggagaagacagagacgctggcgctgcagaggctgggggagctggggccacccagcccaggcctgaactgggaacagccccaggcagcgaggctgtccaggacaggactggtggagggtctgcggaagcgcctgctgccggcctggtgtgcctccctggcccacgggctcagcctgctcctggtggctgtggctgtggctgtctcagggtgggtgggtgcgagcttccccccgggcgtgagtgttgcgtggctcctgtccagcagcgccagcttcctggcctcattcctcggctgggagccactgaaggtcttgctggaagccctgtacttctcactggtggccaagcggctgcacccggatgaagatgacaccctggtagagagcccggctgtgacgcctgtgagcgcacgtgtgccccgcgtacggccaccccacggctttgcactcttcctggccaaggaagaagcccgcaaggtcaagaggctacatggcatgctgcggagcctcctggtgtacatgctttttctgctggtgaccctgctggccagctatggggatgcctcatgccatgggcacgcctaccgtctgcaaagcgccatcaagcaggagctgcacagccgggccttcctggccatcacgcggtctgaggagctctggccatggatggcccacgtgctgctgccctacgtccacgggaaccagtccagcccagagctggggcccccacggctgcggcaggtgcggctgcaggaagcactctacccagaccctcccggccccagggtccacacgtgctcggccgcaggaggcttcagcaccagcgattacgacgttggctgggagagtcctcacaatggctcggggacgtgggcctattcagcgccggatctgctgggggcatggtcctggggctcctgtgccgtgtatgacagcgggggctacgtgcaggagctgggcctgagcctggaggagagccgcgaccggctgcgcttcctgcagctgcacaactggctggacaacaggagccgcgctgtgttcctggagctcacgcgctacagcccggccgtggggctgcacgccgccgtcacgctgcgcctcgagttcccggcggccggccgcgccctggccgccctcagcgtccgcccctttgcgctgcgccgcctcagcgcgggcctctcgctgcctctgctcacctcggtgtgcctgctgctgttcgccgtgcacttcgccgtggccgaggcccgtacttggcacagggaagggcgctggcgcgtgctgcggctcggagcctgggcgcggtggctgctggtggcgctgacggcggccacggcactggtacgcctcgcccagctgggtgccgctgaccgccagtggacccgtttcgtgcgcggccgcccgcgccgcttcactagcttcgaccaggtggcgcagctgagctccgcagcccgtggcctggcggcctcgctgctcttcctgcttttggtcaaggctgcccagcagctacgcttcgtgcgccagtggtccgtctttggcaagacattatgccgagctctgccagagctcctgggggtcaccttgggcctggtggtgctcggggtagcctacgcccagctggccatcctgctcgtgtcttcctgtgtggactccctctggagcgtggcccaggccctgttggtgctgtgccctgggactgggctctctaccctgtgtcctgccgagtcctggcacctgtcacccctgctgtgtgtggggctctgggcactgcggctgtggggcgccctacggctgggggctgttattctccgctggcgctaccacgccttgcgtggagagctgtaccggccggcctgggagccccaggactacgagatggtggagttgttcctgcgcaggctgcgcctctggatgggcctcagcaaggtcaaggagttccgccacaaagtccgctttgaagggatggagccgctgccctctcgctcctccaggggctccaaggtatccccggatgtgcccccacccagcgctggctccgatgcctcgcacccctccacctcctccagccagctggatgggctgagcgtgagcctgggccggctggggacaaggtgtgagcctgagccctcccgcctccaagccgtgttcgaggccctgctcacccagtttgaccgactcaaccaggccacagaggacgtctaccagctggagcagcagctgcacagcctgcaaggccgcaggagcagccgggcgcccgccggatcttcccgtggcccatccccgggcctgcggccagcactgcccagccgccttgcccgggccagtcggggtgtggacctggccactggccccagcaggacaccccttcgggccaagaacaaggtccaccccagcagcacttagtcctccttcctggcgggggtgggccgtggagtcggagtggacaccgctcagtattactttctgccgctgtcaaggccgagggccaggcagaatggctgcacgtaggttccccagagagcaggcaggggcatctgtctgtctgtgggcttcagcactttaaagaggctgtgtggccaaccaggacccagggtcccctccccagctcccttgggaaggacacagcagtattggacggtttctagcctctgagatgctaatttatttccccgagtcctcaggtacagcgggctgtgcccggccccaccccctgggcagatgtcccccactgctaaggctgctggcttcagggagggttagcctgcaccgccgccaccctgcccctaagttattacctctccagttcctaccgtactccctgcaccgtctcactgtgtgtctcgtgtcagtaatttatatggtgttaaaatgtgtatatttttgtatgtcactattttcactagggctgaggggcctgcgcccagagctggcctcccccaacacctgctgcgcttggtaggtgtggtggcgttatggcagcccggctgctgcttggatgcgagcttggccttgggccggtgctgggggcacagctgtctgccaggcactctcatcaccccagaggccttgtcatcctcccttgccccaggccaggtagcaagagagcagcgcccaggcctgctggcatcaggtctgggcaagtagcaggactaggcatgtcagaggaccccagggtggttagaggaaaagactcctcctgggggctggctcccagggtggaggaaggtgactgtgtgtgtgtgtgtgtgcgcgcgcgcacgcgcgagtgtgctgtatggcccaggcagcctcaaggccctcggagctggctgtgcctgcttctgtgtaccacttctgtgggcatggccgcttctagagcctcgacacccccccaacccccgcaccaagcagacaaagtcaataaaagagctgtctgactgc

SEQ ID NO: 167262 - DNA, 14135 bp, Homo sapiens
  Payload ID: 12912
  Gene Symbol: PKD1
  Gene Name: polycystic kidney disease 1 (autosomal dominant)
  Uniprot ID: P98161
  ENST ID: ENST00000423118
  CDS Start-End: 210-13118
gcactgcagcgccagcgtccgagcgggcggccgagctcccggagcggcctggccccgagccccgagcgggcgtcgctcagcagcaggtcgcggccgcagccccatccagccccgcgcccgccatgccgtccgcgggccccgcctgagctgcggcctccgcgcgcgggcgggcctggggacggcggggccatgcgcgcgctgccctaacgatgccgcccgccgcgcccgcccgcctggcgctggccctgggcctgggcctgtggctcggggcgctggcggggggccccgggcgcggctgcgggccctgcgagcccccctgcctctgcggcccagcgcccggcgccgcctgccgcgtcaactgctcgggccgcgggctgcggacgctcggtcccgcgctgcgcatccccgcggacgccacagcgctagacgtctcccacaacctgctccgggcgctggacgttgggctcctggcgaacctctcggcgctggcagagctggatataagcaacaacaagatttctacgttagaagaaggaatatttgctaatttatttaatttaagtgaaataaacctgagtgggaacccgtttgagtgtgactgtggcctggcgtggctgccgcgatgggcggaggagcagcaggtgcgggtggtgcagcccgaggcagccacgtgtgctgggcctggctccctggctggccagcctctgcttggcatccccttgctggacagtggctgtggtgaggagtatgtcgcctgcctccctgacaacagctcaggcaccgtggcagcagtgtccttttcagctgcccacgaaggcctgcttcagccagaggcctgcagcgccttctgcttctccaccggccagggcctcgcagccctctcggagcagggctggtgcctgtgtggggcggcccagccctccagtgcctcctttgcctgcctgtccctctgctccggccccccgccacctcctgcccccacctgtaggggccccaccctcctccagcacgtcttccctgcctccccaggggccaccctggtggggccccacggacctctggcctctggccagctagcagccttccacatcgctgccccgctccctgtcactgccacacgctgggacttcggagacggctccgccgaggtggatgccgctgggccggctgcctcgcatcgctatgtgctgcctgggcgctatcacgtgacggccgtgctggccctgggggccggctcagccctgctggggacagacgtgcaggtggaagcggcacctgccgccctggagctcgtgtgcccgtcctcggtgcagagtgacgagagcctcgacctcagcatccagaaccgcggtggttcaggcctggaggccgcctacagcatcgtggccctgggcgaggagccggcccgagcggtgcacccgctctgcccctcggacacggagatcttccctggcaacgggcactgctaccgcctggtggtggagaaggcggcctggctgcaggcgcaggagcagtgtcaggcctgggccggggccgccctggcaatggtggacagtcccgccgtgcagcgcttcctggtctcccgggtcaccaggagcctagacgtgtggatcggcttctcgactgtgcagggggtggaggtgggcccagcgccgcagggcgaggccttcagcctggagagctgccagaactggctgcccggggagccacacccagccacagccgagcactgcgtccggctcgggcccaccgggtggtgtaacaccgacctgtgctcagcgccgcacagctacgtctgcgagctgcagcccggaggcccagtgcaggatgccgagaacctcctcgtgggagcgcccagtggggacctgcagggacccctgacgcctctggcacagcaggacggcctctcagccccgcacgagcccgtggaggtcatggtattcccgggcctgcgtctgagccgtgaagccttcctcaccacggccgaatttgggacccaggagctccggcggcccgcccagctgcggctgcaggtgtaccggctcctcagcacagcagggaccccggagaacggcagcgagcctgagagcaggtccccggacaacaggacccagctggcccccgcgtgcatgccagggggacgctggtgccctggagccaacatctgcttgccgctggacgcctcctgccacccccaggcctgcgccaatggctgcacgtcagggccagggctacccggggccccctatgcgctatggagagagttcctcttctccgttcccgcggggccccccgcgcagtactcggtcaccctccacggccaggatgtcctcatgctccctggtgacctcgttggcttgcagcacgacgctggccctggcgccctcctgcactgctcgccggctcccggccaccctggtccccgggccccgtacctctccgccaacgcctcgtcatggctgccccacttgccagcccagctggagggcacttgggcctgccctgcctgtgccctgcggctgcttgcagccacggaacagctcaccgtgctgctgggcttgaggcccaaccctggactgcggctgcctgggcgctatgaggtccgggcagaggtgggcaatggcgtgtccaggcacaacctctcctgcagctttgacgtggtctccccagtggctgggctgcgggtcatctaccctgccccccgcgacggccgcctctacgtgcccaccaacggctcagccttggtgctccaggtggactctggtgccaacgccacggccacggctcgctggcctgggggcagtgtcagcgcccgctttgagaatgtctgccctgccctggtggccaccttcgtgcccggctgcccctgggagaccaacgataccctgttctcagtggtagcactgccgtggctcagtgagggggagcacgtggtggacgtggtggtggaaaacagcgccagccgggccaacctcagcctgcgggtgacggcggaggagcccatctgtggcctccgcgccacgcccagccccgaggcccgtgtactgcagggagtcctagtgaggtacagccccgtggtggaggccggctcggacatggtcttccggtggaccatcaacgacaagcagtccctgaccttccagaacgtggtcttcaatgtcatttatcagagcgcggcggtcttcaagctctcactgacggcctccaaccacgtgagcaacgtcaccgtgaactacaacgtaaccgtggagcggatgaacaggatgcagggtctgcaggtctccacagtgccggccgtgctgtcccccaatgccacgctagcactgacggcgggcgtgctggtggactcggccgtggaggtggccttcctgtggacctttggggatggggagcaggccctccaccagttccagcctccgtacaacgagtccttcccggttccagacccctcggtggcccaggtgctggtggagcacaatgtcatgcacacctacgctgccccaggtgagtacctcctgaccgtgctggcatctaatgccttcgagaacctgacgcagcaggtgcctgtgagcgtgcgcgcctccctgccctccgtggctgtgggtgtgagtgacggcgtcctggtggccggccggcccgtcaccttctacccgcacccgctgccctcgcctgggggtgttctttacacgtgggacttcggggacggctcccctgtcctgacccagagccagccggctgccaaccacacctatgcctcgaggggcacctaccacgtgcgcctggaggtcaacaacacggtgagcggtgcggcggcccaggcggatgtgcgcgtctttgaggagctccgcggactcagcgtggacatgagcctggccgtggagcagggcgcccccgtggtggtcagcgccgcggtgcagacgggcgacaacatcacgtggaccttcgacatgggggacggcaccgtgctgtcgggcccggaggcaacagtggagcatgtgtacctgcgggcacagaactgcacagtgaccgtgggtgcggccagccccgccggccacctggcccggagcctgcacgtgctggtcttcgtcctggaggtgctgcgcgttgaacccgccgcctgcatccccacgcagcctgacgcgcggctcacggcctacgtcaccgggaacccggcccactacctcttcgactggaccttcggggatggctcctccaacacgaccgtgcgggggtgcccgacggtgacacacaacttcacgcggagcggcacgttccccctggcgctggtgctgtccagccgcgtgaacagggcgcattacttcaccagcatctgcgtggagccagaggtgggcaacgtcaccctgcagccagagaggcagtttgtgcagctcggggacgaggcctggctggtggcatgtgcctggcccccgttcccctaccgctacacctgggactttggcaccgaggaagccgcccccacccgtgccaggggccctgaggtgacgttcatctaccgagacccaggctcctatcttgtgacagtcaccgcgtccaacaacatctctgctgccaatgactcagccctggtggaggtgcaggagcccgtgctggtcaccagcatcaaggtcaatggctcccttgggctggagctgcagcagccgtacctgttctctgctgtgggccgtgggcgccccgccagctacctgtgggatctgggggacggtgggtggctcgagggtccggaggtcacccacgcttacaacagcacaggtgacttcaccgttagggtggccggctggaatgaggtgagccgcagcgaggcctggctcaatgtgacggtgaagcggcgcgtgcgggggctcgtcgtcaatgcaagccgcacggtggtgcccctgaatgggagcgtgagcttcagcacgtcgctggaggccggcagtgatgtgcgctattcctgggtgctctgtgaccgctgcacgcccatccctgggggtcctaccatctcttacaccttccgctccgtgggcaccttcaatatcatcgtcacggctgagaacgaggtgggctccgcccaggacagcatcttcgtctatgtcctgcagctcatagaggggctgcaggtggtgggcggtggccgctacttccccaccaaccacacggtacagctgcaggccgtggttagggatggcaccaacgtctcctacagctggactgcctggagggacaggggcccggccctggccggcagcggcaaaggcttctcgctcaccgtgctcgaggccggcacctaccatgtgcagctgcgggccaccaacatgctgggcagcgcctgggccgactgcaccatggacttcgtggagcctgtggggtggctgatggtggccgcctccccgaacccagctgccgtcaacacaagcgtcaccctcagtgccgagctggctggtggcagtggtgtcgtatacacttggtccttggaggaggggctgagctgggagacctccgagccatttaccacccatagcttccccacacccggcctgcacttggtcaccatgacggcagggaacccgctgggctcagccaacgccaccgtggaagtggatgtgcaggtgcctgtgagtggcctcagcatcagggccagcgagcccggaggcagcttcgtggcggccgggtcctctgtgcccttttgggggcagctggccacgggcaccaatgtgagctggtgctgggctgtgcccggcggcagcagcaagcgtggccctcatgtcaccatggtcttcccggatgctggcaccttctccatccggctcaatgcctccaacgcagtcagctgggtctcagccacgtacaacctcacggcggaggagcccatcgtgggcctggtgctgtgggccagcagcaaggtggtggcgcccgggcagctggtccattttcagatcctgctggctgccggctcagctgtcaccttccgcctgcaggtcggcggggccaaccccgaggtgctccccgggccccgtttctcccacagcttcccccgcgtcggagaccacgtggtgagcgtgcggggcaaaaaccacgtgagctgggcccaggcgcaggtgcgcatcgtggtgctggaggccgtgagtgggctgcaggtgcccaactgctgcgagcctggcatcgccacgggcactgagaggaacttcacagcccgcgtgcagcgcggctctcgggtcgcctacgcctggtacttctcgctgcagaaggtccagggcgactcgctggtcatcctgtcgggccgcgacgtcacctacacgcccgtggccgcggggctgttggagatccaggtgcgcgccttcaacgccctgggcagtgagaaccgcacgctggtgctggaggttcaggacgccgtccagtatgtggccctgcagagcggcccctgcttcaccaaccgctcggcgcagtttgaggccgccaccagccccagcccccggcgtgtggcctaccactgggactttggggatgggtcgccagggcaggacacagatgagcccagggccgagcactcctacctgaggcctggggactaccgcgtgcaggtgaacgcctccaacctggtgagcttcttcgtggcgcaggccacggtgaccgtccaggtgctggcctgccgggagccggaggtggacgtggtcctgcccctgcaggtgctgatgcggcgatcacagcgcaactacttggaggcccacgttgacctgcgcgactgcgtcacctaccagactgagtaccgctgggaggtgtatcgcaccgccagctgccagcggccggggcgcccagcgcgtgtggccctgcccggcgtggacgtgagccggcctcggctggtgctgccgcggctggcgctgcctgtggggcactactgctttgtgtttgtcgtgtcatttggggacacgccactgacacagagcatccaggccaatgtgacggtggcccccgagcgcctggtgcccatcattgagggtggctcataccgcgtgtggtcagacacacgggacctggtgctggatgggagcgagtcctacgaccccaacctggaggacggcgaccagacgccgctcagtttccactgggcctgtgtggcttcgacacagagggaggctggcgggtgtgcgctgaactttgggccccgcgggagcagcacggtcaccattccacgggagcggctggcggctggcgtggagtacaccttcagcctgaccgtgtggaaggccggccgcaaggaggaggccaccaaccagacggtgctgatccggagtggccgggtgcccattgtgtccttggagtgtgtgtcctgcaaggcacaggccgtgtacgaagtgagccgcagctcctacgtgtacttggagggccgctgcctcaattgcagcagcggctccaagcgagggcggtgggctgcacgtacgttcagcaacaagacgctggtgctggatgagaccaccacatccacgggcagtgcaggcatgcgactggtgctgcggcggggcgtgctgcgggacggcgagggatacaccttcacgctcacggtgctgggccgctctggcgaggaggagggctgcgcctccatccgcctgtcccccaaccgcccgccgctggggggctcttgccgcctcttcccactgggcgctgtgcacgccctcaccaccaaggtgcacttcgaatgcacgggctggcatgacgcggaggatgctggcgccccgctggtgtacgccctgctgctgcggcgctgtcgccagggccactgcgaggagttctgtgtctacaagggcagcctctccagctacggagccgtgctgcccccgggtttcaggccacacttcgaggtgggcctggccgtggtggtgcaggaccagctgggagccgctgtggtcgccctcaacaggtctttggccatcaccctcccagagcccaacggcagcgcaacggggctcacagtctggctgcacgggctcaccgctagtgtgctcccagggctgctgcggcaggccgatccccagcacgtcatcgagtactcgttggccctggtcaccgtgctgaacgagtacgagcgggccctggacgtggcggcagagcccaagcacgagcggcagcaccgagcccagatacgcaagaacatcacggagactctggtgtccctgagggtccacactgtggatgacatccagcagatcgctgctgcgctggcccagtgcatggggcccagcagggagctcgtatgccgctcgtgcctgaagcagacgctgcacaagctggaggccatgatgctcatcctgcaggcagagaccaccgcgggcaccgtgacgcccaccgccatcggagacagcatcctcaacatcacaggagacctcatccacctggccagctcggacgtgcgggcaccacagccctcagagctgggagccgagtcaccatctcggatggtggcgtcccaggcctacaacctgacctctgccctcatgcgcatcctcatgcgctcccgcgtgctcaacgaggagcccctgacgctggcgggcgaggagatcgtggcccagggcaagcgctcggacccgcggagcctgctgtgctatggcggcgccccagggcctggctgccacttctccatccccgaggctttcagcggggccctggccaacctcagtgacgtggtgcagctcatctttctggtggactccaatccctttccctttggctatatcagcaactacaccgtctccaccaaggtggcctcgatggcattccagacacaggccggcgcccagatccccatcgagcggctggcctcagagcgcgccatcaccgtgaaggtgcccaacaactcggactgggctgcccggggccaccgcagctccgccaactccgccaactccgttgtggtccagccccaggcctccgtcggtgctgtggtcaccctggacagcagcaaccctgcggccgggctgcatctgcagctcaactatacgctgctggacggccactacctgtctgaggaacctgagccctacctggcagtctacctacactcggagccccggcccaatgagcacaactgctcggctagcaggaggatccgcccagagtcactccagggtgctgaccaccggccctacaccttcttcatttccccggggagcagagacccagcggggagttaccatctgaacctctccagccacttccgctggtcggcgctgcaggtgtccgtgggcctgtacacgtccctgtgccagtacttcagcgaggaggacatggtgtggcggacagaggggctgctgcccctggaggagacctcgccccgccaggccgtctgcctcacccgccacctcaccgccttcggcgccagcctcttcgtgcccccaagccatgtccgctttgtgtttcctgagccgacagcggatgtaaactacatcgtcatgctgacatgtgctgtgtgcctggtgacctacatggtcatggccgccatcctgcacaagctggaccagttggatgccagccggggccgcgccatccctttctgtgggcagcggggccgcttcaagtacgagatcctcgtcaagacaggctggggccggggctcaggtaccacggcccacgtgggcatcatgctgtatggggtggacagccggagcggccaccggcacctggacggcgacagagccttccaccgcaacagcctggacatcttccggatcgccaccccgcacagcctgggtagcgtgtggaagatccgagtgtggcacgacaacaaagggctcagccctgcctggttcctgcagcacgtcatcgtcagggacctgcagacggcacgcagcgccttcttcctggtcaatgactggctttcggtggagacggaggccaacgggggcctggtggagaaggaggtgctggccgcgagcgacgcagcccttttgcgcttccggcgcctgctggtggctgagctgcagcgtggcttctttgacaagcacatctggctctccatatgggaccggccgcctcgtagccgtttcactcgcatccagagggccacctgctgcgttctcctcatctgcctcttcctgggcgccaacgccgtgtggtacggggctgttggcgactctgcctacagcacggggcatgtgtccaggctgagcccgctgagcgtcgacacagtcgctgttggcctggtgtccagcgtggttgtctatcccgtctacctggccatcctttttctcttccggatgtcccggagcaaggtggctgggagcccgagccccacacctgccgggcagcaggtgctggacatcgacagctgcctggactcgtccgtgctggacagctccttcctcacgttctcaggcctccacgctgaggcctttgttggacagatgaagagtgacttgtttctggatgattctaagagtctggtgtgctggccctccggcgagggaacgctcagttggccggacctgctcagtgacccgtccattgtgggtagcaatctgcggcagctggcacggggccaggcgggccatgggctgggcccagaggaggacggcttctccctggccagcccctactcgcctgccaaatccttctcagcatcagatgaagacctgatccagcaggtccttgccgagggggtcagcagcccagcccctacccaagacacccacatggaaacggacctgctcagcagcctgtccagcactcctggggagaagacagagacgctggcgctgcagaggctgggggagctggggccacccagcccaggcctgaactgggaacagccccaggcagcgaggctgtccaggacaggactggtggagggtctgcggaagcgcctgctgccggcctggtgtgcctccctggcccacgggctcagcctgctcctggtggctgtggctgtggctgtctcagggtgggtgggtgcgagcttccccccgggcgtgagtgttgcgtggctcctgtccagcagcgccagcttcctggcctcattcctcggctgggagccactgaaggtcttgctggaagccctgtacttctcactggtggccaagcggctgcacccggatgaagatgacaccctggtagagagcccggctgtgacgcctgtgagcgcacgtgtgccccgcgtacggccaccccacggctttgcactcttcctggccaaggaagaagcccgcaaggtcaagaggctacatggcatgctgcggagcctcctggtgtacatgctttttctgctggtgaccctgctggccagctatggggatgcctcatgccatgggcacgcctaccgtctgcaaagcgccatcaagcaggagctgcacagccgggccttcctggccatcacgcggtctgaggagctctggccatggatggcccacgtgctgctgccctacgtccacgggaaccagtccagcccagagctggggcccccacggctgcggcaggtgcggctgcaggaagcactctacccagaccctcccggccccagggtccacacgtgctcggccgcaggaggcttcagcaccagcgattacgacgttggctgggagagtcctcacaatggctcggggacgtgggcctattcagcgccggatctgctgggggcatggtcctggggctcctgtgccgtgtatgacagcgggggctacgtgcaggagctgggcctgagcctggaggagagccgcgaccggctgcgcttcctgcagctgcacaactggctggacaacaggagccgcgctgtgttcctggagctcacgcgctacagcccggccgtggggctgcacgccgccgtcacgctgcgcctcgagttcccggcggccggccgcgccctggccgccctcagcgtccgcccctttgcgctgcgccgcctcagcgcgggcctctcgctgcctctgctcacctcggtgtgcctgctgctgttcgccgtgcacttcgccgtggccgaggcccgtacttggcacagggaagggcgctggcgcgtgctgcggctcggagcctgggcgcggtggctgctggtggcgctgacggcggccacggcactggtacgcctcgcccagctgggtgccgctgaccgccagtggacccgtttcgtgcgcggccgcccgcgccgcttcactagcttcgaccaggtggcgcagctgagctccgcagcccgtggcctggcggcctcgctgctcttcctgcttttggtcaaggctgcccagcagctacgcttcgtgcgccagtggtccgtctttggcaagacattatgccgagctctgccagagctcctgggggtcaccttgggcctggtggtgctcggggtagcctacgcccagctggccatcctgctcgtgtcttcctgtgtggactccctctggagcgtggcccaggccctgttggtgctgtgccctgggactgggctctctaccctgtgtcctgccgagtcctggcacctgtcacccctgctgtgtgtggggctctgggcactgcggctgtggggcgccctacggctgggggctgttattctccgctggcgctaccacgccttgcgtggagagctgtaccggccggcctgggagccccaggactacgagatggtggagttgttcctgcgcaggctgcgcctctggatgggcctcagcaaggtcaaggagttccgccacaaagtccgctttgaagggatggagccgctgccctctcgctcctccaggggctccaaggtatccccggatgtgcccccacccagcgctggctccgatgcctcgcacccctccacctcctccagccagctggatgggctgagcgtgagcctgggccggctggggacaaggtgtgagcctgagccctcccgcctccaagccgtgttcgaggccctgctcacccagtttgaccgactcaaccaggccacagaggacgtctaccagctggagcagcagctgcacagcctgcaaggccgcaggagcagccgggcgcccgccggatcttcccgtggcccatccccgggcctgcggccagcactgcccagccgccttgcccgggccagtcggggtgtggacctggccactggccccagcaggacaccccttcgggccaagaacaaggtccaccccagcagcacttagtcctccttcctggcgggggtgggccgtggagtcggagtggacaccgctcagtattactttctgccgctgtcaaggccgagggccaggcagaatggctgcacgtaggttccccagagagcaggcaggggcatctgtctgtctgtgggcttcagcactttaaagaggctgtgtggccaaccaggacccagggtcccctccccagctcccttgggaaggacacagcagtattggacggtttctagcctctgagatgctaatttatttccccgagtcctcaggtacagcgggctgtgcccggccccaccccctgggcagatgtcccccactgctaaggctgctggcttcagggagggttagcctgcaccgccgccaccctgcccctaagttattacctctccagttcctaccgtactccctgcaccgtctcactgtgtgtctcgtgtcagtaatttatatggtgttaaaatgtgtatatttttgtatgtcactattttcactagggctgaggggcctgcgcccagagctggcctcccccaacacctgctgcgcttggtaggtgtggtggcgttatggcagcccggctgctgcttggatgcgagcttggccttgggccggtgctgggggcacagctgtctgccaggcactctcatcaccccagaggccttgtcatcctcccttgccccaggccaggtagcaagagagcagcgcccaggcctgctggcatcaggtctgggcaagtagcaggactaggcatgtcagaggaccccagggtggttagaggaaaagactcctcctgggggctggctcccagggtggaggaaggtgactgtgtgtgtgtgtgtgtgcgcgcgcgcacgcgcgagtgtgctgtatggcccaggcagcctcaaggccctcggagctggctgtgcctgcttctgtgtaccacttctgtgggcatggccgcttctagagcctcgacacccccccaacccccgcaccaagcagacaaagtcaataaaagagctgtctgactgc

SEQ ID NO: 167263 - DNA, 608 bp, Homo sapiens
  Payload ID: 12912
  Gene Symbol: PKD1
  Gene Name: polycystic kidney disease 1 (autosomal dominant)
  ENST ID: ENST00000562425
  CDS Start-End: 1-275
gcgtgagtgttgcgtggctcctgtccagcagcgccagcttcctggcctcattcctcggctgggagccactgaaggtcttgctggaagccctgtacttctcactggtggccaagcggctgcacccggatgaagatgacaccctggtagagagcccggctgtgacgcctgtgagcgcacgtgtgccccgcgtacggccaccccacggctttgcactcttcctggccaaggaagaagcccgcaaggtcaagaggctacatggcatgctgcgggtctgaggagctctggccatggatggcccacgtgctgctgccctacgtccacgggaaccagtccagcccagagctggggcccccacggctgcggcaggtgcggctgcaggaagcactctacccagaccctcccggccccagggtccacacgtgctcggccgcaggaggcttcagcaccagcgattacgacgttggctgggagagtcctcacaatggctcggggacgtgggcctattcagcgccggatctgctgggggcatggtcctggggctcctgtgccgtgtatgacagcgggggctacgtgcaggagctgggcctgagcctggaggagagccgcga

SEQ ID NO: 167264 - DNA, 465 bp, Homo sapiens
  Payload ID: 12912
  Gene Symbol: PKD1
  Gene Name: polycystic kidney disease 1 (autosomal dominant)
  ENST ID: ENST00000483024
  CDS Start-End: 1-465
cggcgggcgtgctggtggactcggccgtggaggtggccttcctgtggacctttggggatggggagcaggccctccaccagttccagcctccgtacaacgagtccttcccggttccagacccctcggtggcccaggtgctggtggagcacaatgtcatgcacacctacgctgccccaggtgagtacctcctgaccgtgctggcatctaatgccttcgagaacctgacgcagcaggtgctgatccggagtggccgggtgcccattgtgtccttggagtgtgtgtcctgcaaggcacaggccgtgtacgaagtgagccgcagctcctacgtgtacttggagggccgctgcctcaattgcagcagcggctccaagcgagggcggtgggctgcacgtacgttcagcaacaagacgctggtgctggatgagaccaccacatccacgggcagtgcaggcatgcgactggtgc

SEQ ID NO: 167265 - DNA, 737 bp, Homo sapiens
  Payload ID: 12912
  Gene Symbol: PKD1
  Gene Name: polycystic kidney disease 1 (autosomal dominant)
  ENST ID: ENST00000488185
  CDS Start-End: 1-737
gggacttcggagacggctccgccgaggtggatgccgctgggccggctgcctcgcatcgctatgtgctgcctgggcgctatcacgtgacggccgtgctggccctgggggccggctcagccctgctggggacagacgtgcaggtggaagcggcacctgccgccctggagctcgtgtgcccgtcctcggtgcagagtgacgagagcctcgacctcagcatccagaaccgcggtggttcaggcctggaggccgcctacagcatcgtggccctgggcgaggagccggcccgagcggtgcacccgctctgcccctcggacacggagatcttccctggcaacgggcactgctaccgcctggtggtggagaaggcggcctggctgcaggcgcaggagcagtgtcaggcctgggccggggccgccctggcaatggtggacagtcccgccgtgcagcgcttcctggtctcccgggtcaccagacacacgggacctggtgctggatgggagcgagtcctacgaccccaacctggaggacggcgaccagacgccgctcagtttccactgggcctgtgtggcttcgacacagagggaggctggcgggtgtgcgctgaactttgggccccgcgggagcagcacggtcaccattccacgggagcggctggcggctggcgtggagtacaccttcagcctgaccgtgtggaaggccggccgcaaggaggaggccaccaaccagacggtgctgat

SEQ ID NO: 167266 - DNA, 6464 bp, Homo sapiens
  Payload ID: 12912
  Gene Symbol: PKD1
  Gene Name: polycystic kidney disease 1 (autosomal dominant)
  ENST ID: ENST00000487932
  CDS Start-End: 1-3369
cccacacccggcctgcacttggtcaccatgacggcagggaacccgctgggctcagccaacgccaccgtggaagtggatgtgcaggtgcctgtgagtggcctcagcatcagggccagcgagcccggaggcagcttcgtggcggccgggtcctctgtgcccttttgggggcagctggccacgggcaccaatgtgagctggtgctgggctgtgcccggcggcagcagcaagcgtggccctcatgtcaccatggtcttcccggatgctggcaccttctccatccggctcaatgcctccaacgcagtcagctgggtctcagccacgtacaacctcacggcggaggagcccatcgtgggcctggtgctgtgggccagcagcaaggtggtggcgcccgggcagctggtccattttcagatcctgctggctgccggctcagctgtcaccttccgcctgcaggtcggcggggccaaccccgaggtgctccccgggccccgtttctcccacagcttcccccgcgtcggagaccacgtggtgagcgtgcggggcaaaaaccacgtgagctgggcccaggcgcaggtgcgcatcgtggtgctggaggccgtgagtgggctgcaggtgcccaactgctgcgagcctggcatcgccacgggcactgagaggaacttcacagcccgcgtgcagcgcggctctcgggtcgcctacgcctggtacttctcgctgcagaaggtccagggcgactcgctggtcatcctgtcgggccgcgacgtcacctacacgcccgtggccgcggggctgttggagatccaggtgcgcgccttcaacgccctgggcagtgagaaccgcacgctggtgctggaggttcaggacgccgtccagtatgtggccctgcagagcggcccctgcttcaccaaccgctcggcgcagtttgaggccgccaccagccccagcccccggcgtgtggcctaccactgggactttggggatgggtcgccagggcaggacacagatgagcccagggccgagcactcctacctgaggcctggggactaccgcgtgcaggtgaacgcctccaacctggtgagcttcttcgtggcgcaggccacggtgaccgtccaggtgctggcctgccgggagccggaggtggacgtggtcctgcccctgcaggtgctgatgcggcgatcacagcgcaactacttggaggcccacgttgacctgcgcgactgcgtcacctaccagactgagtaccgctgggaggtgtatcgcaccgccagctgccagcggccggggcgcccagcgcgtgtggccctgcccggcgtggacgtgagccggcctcggctggtgctgccgcggctggcgctgcctgtggggcactactgctttgtgtttgtcgtgtcatttggggacacgccactgacacagagcatccaggccaatgtgacggtggcccccgagcgcctggtgcccatcattgagggtggctcataccgcgtgtggtcagacacacgggacctggtgctggatgggagcgagtcctacgaccccaacctggaggacggcgaccagacgccgctcagtttccactgggcctgtgtggcttcgacacagagggaggctggcgggtgtgcgctgaactttgggccccgcgggagcagcacggtcaccattccacgggagcggctggcggctggcgtggagtacaccttcagcctgaccgtgtggaaggccggccgcaaggaggaggccaccaaccagacggtgctgatccggagtggccgggtgcccattgtgtccttggagtgtgtgtcctgcaaggcacaggccgtgtacgaagtgagccgcagctcctacgtgtacttggagggccgctgcctcaattgcagcagcggctccaagcgagggcggtgggctgcacgtacgttcagcaacaagacgctggtgctggatgagaccaccacatccacgggcagtgcaggcatgcgactggtgctgcggcggggcgtgctgcgggacggcgagggatacaccttcacgctcacggtgctgggccgctctggcgaggaggagggctgcgcctccatccgcctgtcccccaaccgcccgccgctggggggctcttgccgcctcttcccactgggcgctgtgcacgccctcaccaccaaggtgcacttcgaatgcacgggctggcatgacgcggaggatgctggcgccccgctggtgtacgccctgctgctgcggcgctgtcgccagggccactgcgaggagttctgtgtctacaagggcagcctctccagctacggagccgtgctgcccccgggtttcaggccacacttcgaggtgggcctggccgtggtggtgcaggaccagctgggagccgctgtggtcgccctcaacaggtctttggccatcaccctcccagagcccaacggcagcgcaacggggctcacagtctggctgcacgggctcaccgctagtgtgctcccagggctgctgcggcaggccgatccccagcacgtcatcgagtactcgttggccctggtcaccgtgctgaacgagtacgagcgggccctggacgtggcggcagagcccaagcacgagcggcagcaccgagcccagatacgcaagaacatcacggagactctggtgtccctgagggtccacactgtggatgacatccagcagatcgctgctgcgctggcccagtgcatggggcccagcagggagctcgtatgccgctcgtgcctgaagcagacgctgcacaagctggaggccatgatgctcatcctgcaggcagagaccaccgcgggcaccgtgacgcccaccgccatcggagacagcatcctcaacatcacaggagacctcatccacctggccagctcggacgtgcgggcaccacagccctcagagctgggagccgagtcaccatctcggatggtggcgtcccaggcctacaacctgacctctgccctcatgcgcatcctcatgcgctcccgcgtgctcaacgaggagcccctgacgctggcgggcgaggagatcgtggcccagggcaagcgctcggacccgcggagcctgctgtgctatggcggcgccccagggcctggctgccacttctccatccccgaggctttcagcggggccctggccaacctcagtgacgtggtgcagctcatctttctggtggactccaatccctttccctttggctatatcagcaactacaccgtctccaccaagctccgccaactccgccaactccgttgtggtccagccccaggcctccgtcggtgctgtggtcaccctggacagcagcaaccctgcggccgggctgcatctgcagctcaactatacgctgctggacggccactacctgtctgaggaacctgagccctacctggcagtctacctacactcggagccccggcccaatgagcacaactgctcggctagcaggaggatccgcccagagtcactccagggtgctgaccaccggccctacaccttcttcatttccccggggagcagagacccagcggggagttaccatctgaacctctccagccacttccgctggtcggcgctgcaggtgtccgtgggcctgtacacgtccctgtgccagtacttcagcgaggaggacatggtgtggcggacagaggggctgctgcccctggaggagacctcgccccgccaggccgtctgcctcacccgccacctcaccgccttcggcgccagcctcttcgtgcccccaagccatgtccgctttgtgtttcctgagccgacagcggatgtaaactacatcgtcatgctgacatgtgctgtgtgcctggtgacctacatggtcatggccgccatcctgcacaagctggaccagttggatgccagccggggccgcgccatccctttctgtgggcagcggggccgcttcaagtacgagatcctcgtcaagacaggctggggccggggctcaggtaccacggcccacgtgggcatcatgctgtatggggtggacagccggagcggccaccggcacctggacggcgacagagccttccaccgcaacagcctggacatcttccggatcgccaccccgcacagcctgggtagcgtgtggaagatccgagtgtggcacgacaacaaagggctcagccctgcctggttcctgcagcacgtcatcgtcagggacctgcagacggcacgcagcgccttcttcctggtcaatgactggctttcggtggagacggaggccaacgggggcctggtggagaaggaggtgctggccgcgagcgacgcagcccttttgcgcttccggcgcctgctggtggctgagctgcagcgtggcttctttgacaagcacatctggctctccatatgggaccggccgcctcgtagccgtttcactcgcatccagagggccacctgctgcgttctcctcatctgcctcttcctgggcgccaacgccgtgtggtacggggctgttggcgactctgcctacagcacggggcatgtgtccaggctgagcccgctgagcgtcgacacagtcgctgttggcctggtgtccagcgtggttgtctatcccgtctacctggccatcctttttctcttccggatgtcccggagcaaggtggctgggagcccgagccccacacctgccgggcagcaggtgctggacatcgacagctgcctggactcgtccgtgctggacagctccttcctcacgttctcaggcctccacgctgagcaggcctttgttggacagatgaagagtgacttgtttctggatgattctaagagtctggtgtgctggccctccggcgagggaacgctcagttggccggacctgctcagtgacccgtccattgtgggtagcaatctgcggcagctggcacggggccaggcgggccatgggctgggcccagaggaggacggcttctccctggccagcccctactcgcctgccaaatccttctcagcatcagatgaagacctgatccagcaggtccttgccgagggggtcagcagcccagcccctacccaagacacccacatggaaacggacctgctcagcagcctgtccagcactcctggggagaagacagagacgctggcgctgcagaggctgggggagctggggccacccagcccaggcctgaactgggaacagccccaggcagcgaggctgtccaggacaggactggtggagggtctgcggaagcgcctgctgccggcctggtgtgcctccctggcccacgggctcagcctgctcctggtggctgtggctgtggctgtctcagggtgggtgggtgcgagcttccccccgggcgtgagtgttgcgtggctcctgtccagcagcgccagcttcctggcctcattcctcggctgggagccactgaaggtcttgctggaagccctgtacttctcactggtggccaagcggctgcacccggatgaagatgacaccctggtagagagcccggctgtgacgcctgtgagcgcacgtgtgccccgcgtacggccaccccacggctttgcactcttcctggccaaggaagaagcccgcaaggtcaagaggctacatggcatgctgcggagcctcctggtgtacatgctttttctgctggtgaccctgctggccagctatggggatgcctcatgccatgggcacgcctaccgtctgcaaagcgccatcaagcaggagctgcacagccgggccttcctggccatcacgcggtctgaggagctctggccatggatggcccacgtgctgctgccctacgtccacgggaaccagtccagcccagagctggggcccccacggctgcggcaggtgcggctgcaggaagcactctacccagaccctcccggccccagggtccacacgtgctcggccgcaggaggcttcagcaccagcgattacgacgttggctgggagagtcctcacaatggctcggggacgtgggcctattcagcgccggatctgctgggggcatggtcctggggctcctgtgccgtgtatgacagcgggggctacgtgcaggagctgggcctgagcctggaggagagccgcgaccggctgcgcttcctgcagctgcacaactggctggacaacaggagccgcgctgtgttcctggagctcacgcgctacagcccggccgtggggctgcacgccgccgtcacgctgcgcctcgagttcccggcggccggccgcgccctggccgccctcagcgtccgcccctttgcgctgcgccgcctcagcgcgggcctctcgctgcctctgctcacctcggtgtgcctgctgctgttcgccgtgcacttcgccgtggccgaggcccgtacttggcacagggaagggcgctggcgcgtgctgcggctcggagcctgggcgcggtggctgctggtggcgctgacggcggccacggcactggtacgcctcgcccagctgggtgccgctgaccgccagtggacccgtttcgtgc

SEQ ID NO: 167267 - DNA, 2545 bp, Homo sapiens
  Payload ID: 12912
  Gene Symbol: PKD1
  Gene Name: polycystic kidney disease 1 (autosomal dominant)
  ENST ID: ENST00000568591
  CDS Start-End: 1-603
ctgctggggacagacgtgcaggtggaagcggcacctgccgccctggagctcgtgtgcccgtcctcggtgcagagtgacgagagcctcgacctcagcatccagaaccgcggtggttcaggcctggaggccgcctacagcatcgtggccctgggcgaggagccggcccgagcggtgcacccgctctgcccctcggacacggagatcttccctggcaacgggcactgctaccgcctggtggtggagaaggcggcctggctgcaggcgcaggagcagtgtcaggcctgggccggggccgccctggcaatggtggacagtcccgccgtgcagcgcttcctggtctcccgggtcaccagggggtggaggtgggcccagcgccgcagggcgaggccttcagcctggagagctgccagaactggctgcccggggagccacacccagccacagccgagcactgcgtccggctcgggcccaccgggtggtgtaacaccgacctgtgctcagcgccgcacagctacgtctgcgagctgcagcccggaggcccagtgcaggatgccgagaacctcctcgtgggagcgcccagtggggacctgcagggacccctgacgcctctggcacagcaggacggcctctcagccccgcacgagcccgtggaggtcatggtattcccgggcctgcgtctgagccgtgaagccttcctcaccacggccgaatttgggacccaggagctccggcggcccgcccagctgcggctgcaggtgtaccggctcctcagcacagcagggaccccggagaacggcagcgagcctgagagcaggtccccggacaacaggacccagctggcccccgcgtgcatgccagggggacgctggtgccctggagccaacatctgcttgccgctggacgcctcctgccacccccaggcctgcgccaatggctgcacgtcagggccagggctacccggggccccctatgcgctatggagagagttcctcttctccgttcccgcggggccccccgcgcagtactcggtcaccctccacggccaggatgtcctcatgctccctggtgacctcgttggcttgcagcacgacgctggccctggcgccctcctgcactgctcgccggctcccggccaccctggtccccgggccccgtacctctccgccaacgcctcgtcatggctgccccacttgccagcccagctggagggcacttgggcctgccctgcctgtgccctgcggctgcttgcagccacggaacagctcaccgtgctgctgggcttgaggcccaaccctggactgcggctgcctgggcgctatgaggtccgggcagaggtgggcaatggcgtgtccaggcacaacctctcctgcagctttgacgtggtctccccagtggctgggctgcgggtcatctaccctgccccccgcgacggccgcctctacgtgcccaccaacggctcagccttggtgctccaggtggactctggtgccaacgccacggccacggctcgctggcctgggggcagtgtcagcgcccgctttgagaatgtctgccctgccctggtggccaccttcgtgcccggctgcccctgggagaccaacgataccctgttctcagtggtagcactgccgtggctcagtgagggggagcacgtggtggacgtggtggtggaaaacagcgccagccgggccaacctcagcctgcgggtgacggcggaggagcccatctgtggcctccgcgccacgcccagccccgaggcccgtgtactgcagggagtcctagtgaggtacagccccgtggtggaggccggctcggacatggtcttccggtggaccatcaacgacaagcagtccctgaccttccagaacgtggtcttcaatgtcatttatcagagcgcggcggtcttcaagctctcactgacggcctccaaccacgtgagcaacgtcaccgtgaactacaacgtaaccgtggagcggatgaacaggatgcagggtctgcaggtctccacagtgccggccgtgctgtcccccaatgccacgctagcactgacggcgggcgtgctggtggactcggccgtggaggtggccttcctgtggacctttggggatggggagcaggccctccaccagttccagcctccgtacaacgagtccttcccggttccagacccctcggtggcccaggtgctggtggagcacaatgtcatgcacacctacgctgccccaggtgctgatccggagtggccgggtgcccattgtgtccttggagtgtgtgtcctgcaaggcacaggccgtgtacgaagtgagccgcagctcctacgtgtacttggagggccgctgcctcaattgcagcagcggctccaagcgagggcggtgggctgcacgtacgttcagcaacaagacgctggtgctggatgagaccaccacatccacgggcagtgcaggcatgcgactggtgctgcggcggggcgtgctgcgggacggcgagggatacaccttcacgctcacggtgctgggccgctctggcgaggaggagggctgcgcct

SEQ ID NO: 167268 - DNA, 1822 bp, Homo sapiens
  Payload ID: 12912
  Gene Symbol: PKD1
  Gene Name: polycystic kidney disease 1 (autosomal dominant)
  ENST ID: ENST00000567946
  CDS Start-End: 1-1822
cggagactctggtgtccctgagggtccacactgtggatgacatccagcagatcgctgctgcgctggcccagtgcatggggcccagcagggagctcgtatgccgctcgtgcctgaagcagacgctgcacaagctggaggccatgatgctcatcctgcaggcagagaccaccgcgggcaccgtgacgcccaccgccatcggagacagcatcctcaacatcacaggagacctcatccacctggccagctcggacgtgcgggcaccacagccctcagagctgggagccgagtcaccatctcggatggtggcgtcccaggcctacaacctgacctctgccctcatgcgcatcctcatgcgctcccgcgtgctcaacgaggagcccctgacgctggcgggccactacctgtctgaggaacctgagccctacctggcagtctacctacactcggagccccggcccaatgagcacaactgctcggctagcaggaggatccgcccagagtcactccagggtgctgaccaccggccctacaccttcttcatttccccggggagcagagacccagcggggagttaccatctgaacctctccagccacttccgctggtcggcgctgcaggtgtccgtgggcctgtacacgtccctgtgccagtacttcagcgaggaggacatggtgtggcggacagaggggctgctgcccctggaggagacctcgccccgccaggccgtctgcctcacccgccacctcaccgccttcggcgccagcctcttcgtgcccccaagccatgtccgctttgtgtttcctgagccgacagcggatgtaaactacatcgtcatgctgacatgtgctgtgtgcctggtgacctacatggtcatggccgccatcctgcacaagctggaccagttggatgccagccggggccgcgccatccctttctgtgggcagcggggccgcttcaagtacgagatcctcgtcaagacaggctggggccggggctcaggtaccacggcccacgtgggcatcatgctgtatggggtggacagccggagcggccaccggcacctggacggcgacagagccttccaccgcaacagcctggacatcttccggatcgccaccccgcacagcctgggtagcgtgtggaagatccgagtgtggcacgacaacaaagggctcagccctgcctggttcctgcagcacgtcatcgtcagggacctgcagacggcacgcagcgccttcttcctggtcaatgactggctttcggtggagacggaggccaacgggggcctggtggagaaggaggtgctggccgcgagcgacgcagcccttttgcgcttccggcgcctgctggtggctgagctgcagcgtggcttctttgacaagcacatctggctctccatatgggaccggccgcctcgtagccgtttcactcgcatccagagggccacctgctgcgttctcctcatctgcctcttcctgggcgccaacgccgtgtggtacggggctgttggcgactctgcctacagcacggggcatgtgtccaggctgagcccgctgagcgtcgacacagtcgctgttggcctggtgtccagcgtggttgtctatcccgtctacctggccatcctttttctcttccggatgtcccggagcaaggtggctgggagcccgagccccacacctgccgggcagcaggtgctggacatcgacagctgcctggactcgtccgtgctggacagctccttcctcacgttctcaggcctccacgctgagcaggcctttgttggacagatgaagagtgacttgtttctggatgattctaagag

SEQ ID NO: 167269 - DNA, 665 bp, Homo sapiens
  Payload ID: 12912
  Gene Symbol: PKD1
  Gene Name: polycystic kidney disease 1 (autosomal dominant)
  ENST ID: ENST00000561668
  CDS Start-End: 1-137
ccggccccagggtccacacgtgctcggccgcaggaggcttcagcaccagcgattacgacgttggctgggagagtcctcacaatggctcggggacgtgggcctattcagcgccggatctgctggggagctgggcctgagcctggaggagagccgcgaccggctgcgcttcctgcagctgcacaactggctggacaacaggagccgcgctgtgttcctggagctcacgcgctacagcccggccgtggggctgcacgccgccgtcacgctgcgcctcgagttcccggcggccggccgcgccctggccgccctcagcgtccgcccctttgcgctgcgccgcctcagcgcgggcctctcgctgcctctgctcacctcggtgtgcctgctgctgttcgccgtgcacttcgccgtggccgaggcccgtacttggcacagggaagggcgctggcgcgtgctgcggctcggagcctgggcgcggtggctgctggtggcgctgacggcggccacggcactggtacgcctcgcccagctgggtgccgctgaccgccagtggacccgtttcgtgcgcggccgcccgcgccgcttcactagcttcgaccaggtggcgcagctgagctccgcagcccgtggcctggcggcctcgctgctcttcctgcttttggtcaagg

SEQ ID NO: 167270 - DNA, 9092 bp, Homo sapiens
  Payload ID: 12913
  Gene Symbol: PKD1L1
  Gene Name: polycystic kidney disease 1 like 1
  Uniprot ID: Q8TDX9
  ENST ID: ENST00000289672
  CDS Start-End: 52-8601
ggaagaagctggtctgctgactgtcatacttgtgaccagcttgcacaggacatggccgaggaggcagcccagaacatttctgatgaccaggaaaggtgtctccaggctgcctgctgcctttcctttggtggtgagctgtctgtgagcactgacaagagctggggtcttcatctgtgcagctgtagccctcctggaggtggattgtgggtcgaggtctatgctaatcatgtgcttcttatgagtgatgggaagtgtggctgtccttggtgtgctctgaatggaaaggcagaagaccgggaatcacagagcccatcctcatcagcttccaggcagaagaacatttggaaaacaactagtgaagcagcgttaagtgttgttaatgaaaaaacacaggctgttgttaatgaaaaaacacaggcgcctctggattgtgataacagtgctgatagaattccccacaaacctttcattataatcgcaagggcctggagcagtggtggccccaggttccatcacaggcggctgtgtgctactgggaccgcagacagcacattctctgctcttctccagctccagggcaccacttctgcagcagctccctgcagcctgaagatggaggcttcctgctgtgtcctgagactgctgtgctgtgcggaggatgtggccacggggctgcttcctgggactgtcacgatggagacccccaccaaggtggccagacccactcagaccagctcccagcgagtgcccctgtggccgatttcacattttcccacttctcccagaagctcccacggccttccgcctggcattcctcgcacccccagcttcacggcatcgcagtctggttctgagatcctctatccccctactcagcatcctcctgtggccatcctagctcgaaattctgataacttcatgaaccctgttcttaattgctccctggaagtggaagctcgggcacctccaaatctgggattccgtgttcatatggcttctggagaggctctctgtctgatgatggatttcggggacagttctggggttgaaatgaggctacacaacatgtctgaggcaatggcggtgactgcctaccaccagtactcaaaaggtattttttttcatcttttacattttcagttggatatgtccacctacaaagaagcagagacacaaaatacaactttaaatgtttacttgtgccaaagtgaaaacagctgcctggaagactcagaccccagtaaccttggatatgagcttatttctgcctttgtcaccaaaggagtctatatgctcaaggctgttatttataacgagtttcatggaaccgaagtggagcttgggccttattatgtggagattggccatgaggccgtgtctgcgttcatgaactccagcagtgtccatgaagatgaagtgcttgtctttgctgactcccaagtgaatcagaaaagcactgtggttatacatcactttccatctattccttcatataacgtgtcctttatttctcagactcaagtgggtgacagccaggcttggcacagcatgactgtctggtataagatgcaatccgtctctgtctacacaaatggaactgtgtttgccacagacacagacattacatttacagctgttaccaaggaaacaatacccctggaatttgagtggtattttggagaggatccaccagtgaggacaacttcaagaagcattaaaaaaagactcagcatcccccaatggtatcgtgtgatggttaaggcttccaacaggatgagcagtgtggtctctgagccccatgtcatcagggtgcagaagaaaattgtggccaatcggctcacgtccccctcctcagctctggtaaatgccagtgtggcctttgagtgctggatcaacttcggcacagatgttgcctacctgtgggactttggggatggcaccgtcagcctggggagcagctccagcagccatgtctacagtagggaaggagaatttacagtggaggtccttgccttcaataatgtcagtgcctccactctaagacagcaacttttcatcgtgtgcgagccctgccagccacccctggtgaagaacatggggcctgggaaagtccagatatggaggtctcagcctgtgaggctgggagtgacgtttgaagctgcagtcttctgtgatatttcccaaggtctttcttacacctggaacttgatggactctgaagggctccctgtctccctccctgctgctgtggacactcacagacagaccctcatcctcccgagccacaccttggagtatgggaactacactgcccttgccaaggttcagattgaaggcagtgtggtgtacagcaactactgtgtgggcctggaggtgcgagcccaggcccctgtcagtgtgatctccgagggcacacacctattcttctccaggaccacctcatcccccattgtcctcagagggacccagtccttcgaccctgacgaccctggggcgactctcaggtatcactgggaatgcgccaccgctggctccccagcacatccctgcttcgactcctccactgcacaccaactggatgccgcggctcccactgtttcctttgaggcacaatggctcagtgacagctatgatcagttccttgtgatgctgagggtctccagtggtggccggaactcttctgagacccgggtgttcctgtccccctaccctgactcggcgttcagattcgtccacatctcctgggtcagctttaaagacaccttcgtcaactggaatgacgaactctctcttcaagctatgtgtgaggactgcagtgaaataccgaatctgtcttattcctgggatctctttttagtcaatgcaacagaaaagaataggatagaagttcccttctgcagagtagtggggctgcttggctcgctgggactcggtgccatttcagagtcatcacagttaaacctgctgcccactgagcctggcactgcagatcctgatgcaacgaccacaccattctcacgggaaccttcacccgtgacccttggccaacctgccacttcagctccaaggggaacccccacagagcccatgactggagtctactggattcctcctgcgggggactctgcagtcctgggggaggctccagaggaaggttcactagacctagagccagggccacagagcaagggatccctgatgactggccgctctgagagaagtcagcccacccacagccctgaccctcacctctctgattttgaagcctattacagtgacattcaagaagcaataccatcgggaggaagacagccagctaaggacaccagctttccaggatcaggacctagcttgagtgccgaggagagccctggagatggggataacctggtggacccctccctgtctgcaggcagagccgagcctgtcctcatgattgactggcccaaggccctgctgggtcgagcagttttccaaggctattcatcctcaggtattacagaacagacagtgacaatcaagccatactctctgagcagtggagagacgtacgtcctgcaagtgtctgtggcttcgaagcatggcttactgggtaaagctcagctgtacttgacagtcaacccggctcctcgggacatggcctgtcaggtgcagccccaccatggtctggaagcacacaccgtcttcagtgtcttctgcatgtctggaaaaccggacttccattatgaatttagttaccagataggaaacacctccaaacacactttgtaccatgggagagacacccagtattattttgtgttgccagctggtgagcacttggacaattacaaagtcatggtttccactgaaatcacagatggcaaaggctccaaggtccagccgtgcactgtggtggtgactgtgctgccccgctaccatggaaatgactgtctgggcgaggacctgtataattccagcctgaaaaacctttctaccctccagctgatggggagttacacagaaatcaggaactacatcactgtgatcaccagaatcctgagtcgtttgtctaaggaggacaaaactgcctcctgcaaccaatggtcacgaatacaggatgcattaatttcttcagtatgcagattggcttttgtagatcaggaagaaatgattggttctgttcttatgttgagggacctcgtgagcttctctaataagctaggctttatgagtgcggttctcatcctcaagtacacccgggcactccttgctcaaggccagttctcggggccatttgtgattgacaaaggagtgaggcttgagctcatcggtctcatatccagagtctgggaagtctctgagcaagaaaactcgaaggaggaagtctatcgacatgaagaaggaattacagtcatctcagatttattgttgggttgtctctctttgaaccatgttagcactgggcagatggagttccggacccttcttcattacaaccttcagagctctgtccagagcctgggatctgtccaggtgcatttacctggtgaccttgctgggcacagtcctgctggggcggagacacagagcccatgctacattagccagctcatactcttcaagaagaacccatatccagggagccaagctcctgggcagattggtggagttgtgggcctcaacctctatacctgctccagcagaagacccatcaacaggcaatggctaaggaaacccgtgatggtcgagtttggggaggaggatggcctggataataggagaaataaaacgacatttgtattacttcgggataaagtgaatctccatcagttcactgagctttccgaaaacccccaggaatctctacagatagaaattgaattttccaaacctgttacaagggcatttcccgtcatgttgctagtaagattctctgagaaacctactccctctgattttcttgtgaagcagatctacttctgggatgagtcaattgtgcagatttatatacctgctgcttctcagaaagatgccagtgtaggctatttatccttattggatgctgactatgacagaaaacctccaaacagatatttagctaaggcagtgaactatacagtacatttccagtggatccgatgcctgttttgggacaagagagagtggaaatctgaacgtttctctccacaaccagggacttctcctgaaaaagtgaactgcagctaccatcgcctcgcggcattcgctctcctaaggagaaagctgaaggccagttttgaagtgagtgacatttccaagctacagagccacccagaaaacttgcttcccagtatttttattatgggttctgtgattctttatggatttttggtcgctaaaagtagacaagtagatcatcatgaaaaaaagaaagctggttacatctttctgcaagaagcttccctgccgggccatcagctatatgcggtcgtcattgacactggcttccgagctccggccaggttgacctcaaaggtgtacattgttttatgtggcgacaatggactgtcagaaaccaaggagctctcctgtccagagaagcccctgtttgaaaggaattccagacacacctttatcctgagcgctcctgcccaactgggcctgctgaggaagatccgcctctggcacgacagccgtgggccttccccaggctggttcatcagccacgtgatggtgaaggagctgcacacgggacagggctggttcttccctgcccagtgctggctgtctgccggcaggcatgatggtcgcgtggagcgggagctcacctgtctgcaagggggactcggcttccggaagcttttctattgcaagttcacagagtacctggaggatttccatgtctggctgtcggtgtacagcaggccctcctccagccgctacctgcacacgccgcgcctcaccgtgtccttctccctgctgtgcgtctacgcgtgtctcactgccctggttgctgctggagggcaagagcagccccacttggacgtcagccccacccttggatccttcagggtgggtctcctgtgtaccctcctggcttctccaggggcccagctcttgtccctgctcttcaggctcagcaaggaagccccggggtctgcccgagtggagccacacagcccacttagaggaggagcacagaccgaggcaccccatggtcctaattcctggggaaggataccagacgcacaggagccacgcaagcaacctgcatcagccattctctctgggagtggcagggcccaaaggaaggcggcaagtgacaatggcacagcttgtccagcccctaagctgcaggttcatggggctgaccacagcaggacttctctgatggggaaaagccactgctgccctccccacactcaagcacccagcagtggtttggagggactaatgccccagtggtcaagggcccttcagccttggtggagctctgcagtgtgggccatttgtgggaccgcttctttggcctgcagtttggggacaggatttctagcctacaggtttggccaggagcaatgtgtgcagtggctgcacctgctgtccctctccgtggtctgctgtattttcatcacccagccacttatggtatgcctcatggccttgggttttgcttggaaaagaagagctgacaaccacttttttactgagtctttatgtgaggctaccagggatctggactctgaattggcagaacgttcctggactcgcctccccttctcttcaagctgcagtattcctgactgtgcaggcgaggttgaaaaagtcttggctgcccgacaacaagctcgccacctgcgctgggcgcatccaccatccaaggcccagctgaggggcaccagacagaggatgaggagagagagtcgcacacgggctgccctgagagacatttccatggacatcctcatgctgcttctgcttttgtgtgtaatatatgggagattttcccaagatgaatactccctcaatcaagctatccggaaagaatttacaagaaatgccagaaactgcttgggtggcctgagaaacatcgctgactggtgggactggagtctgaccacacttctggatggcctgtacccgggaggcaccccgtcagcccgtgtgccgggggctcagcctggagctcttggaggaaaatgctacctaataggcagttccgtaattaggcagctaaaagtttttcctaggcatttatgcaagcctcccaggccattttcagcactcatcgaagactctattcctacatgtagtcccgaagttggaggccctgagaacccctacctgatagacccagagaaccaaaacgtgaccctgaatggtcctgggggctgtgggacaagggaggactgtgtgctcagcctgggcagaacaaggactgaagcccacacagccctgtcccgactcagggccagcatgtggattgaccgcagcaccagggctgtgtctgtgcacttcactctctataaccctccaacccaactcttcaccagcgtgtccctgagagtggagatcctccctacggggagtctcgtcccctcatccctggtggagtcattcagcatcttccgcagcgactcagccctgcagtaccacctcatgcttccccagctggtcttcctggcactcagcctgatccacctctgtgttcaactctaccgtatgatggacaagggcgtcctcagctactggcgaaagccaaggaactggctggagctctccgtggttggagtgagcctcacctactatgcagtttccggccaccttgttactcttgctggagatgtcactaaccagtttcacagaggactttgccgagcatttatggacctcacccttatggcatcatggaatcagagggctcgatggctccggggaatcctcttattcctcttcacattaaaatgcgtctatcttcctggcattcaaaacacaatggcatcctgctcctccatgatgcgccactcactccccagcatctttgtagcagggctggtgggggcactgatgctggccgccctctcccacctgcaccgatttctgctctctatgtgggttctaccacctggcaccttcacagacgccttccccgggctgctgtttcattttcccagaagaagccaaaaagactgcctccttggcctttccaagtctgaccagcgggccatggcttgttactttgggatccttttaatagtctctgccacactgtgttttggaatgctgagaggttttctcatgactttaccccaaaaaagaaaatcttttcaaagtaaatcttttgtgagacttaaagatgtcactgcttatatgtgggaaaaggtcctcacctttctgagactggaaacaccaaagttggaagaggctgagatggttgagaatcacaattactacttggatgaatttgcaaatctgttagacgaacttctgatgaagattaatggtttgtccgacagcctacaactcccccttctggaaaaaacatccaacaacacaggggaggcaaggacagaagagagtcccttagtggacatttctagttaccaagctgctgagccagcagacatcaaggacttctgaggagcctggtaccttgcataggcactatggaccctgttttgcttaacccacccaacagccaattttagcagacatcctagttttgcaggtgagaagagctgaggtacgaagaagttttgttaatttttccagttcacgtaacaagtaaatgggaaaccaggatgaaaatcaaggtttatctgtcatcagactgttactcataatcaccattcggagagttcagatgtgggacaagattctaactccagccttctcccaaatggttaatttgccagttgccctagagttacatattgtcttatttgtttgttttactgaatctgtctgagtattaaaagccttgtatcttgtgaaatttctttcaggtctcataaaagcgatgaaagagaccaggataacattctaatatttaaataagatttttgaagtaaaatccttattttgtaaatttaacaattgaatcttgctagattaataacgcatctttcctg

SEQ ID NO: 167271 - DNA, 520 bp, Homo sapiens
  Payload ID: 12913
  Gene Symbol: PKD1L1
  Gene Name: polycystic kidney disease 1 like 1
  ENST ID: ENST00000433506
  CDS Start-End: 1-493
agttggaggccctgagaacccctacctgatagacccagagaaccaaaacgtgaccctgaatggtcctgggggctgtgggacaagggaggactgtgtgctcagcctgggcagaacaaggactgaagcccacacagccctgtcccgactcagggccagcatgtggattgaccgcagcaccagggctgtgtctgtgcacttcactctctataaccctccaacccaactcttcaccagcgtgtccctgagagtggagatcctccctacggggagtctcgtcccctcatccctggtggagtcattcagcatcttccgcagcgactcagccctgcagtaccacctcatgcttccccagctggtcttcctggcactcagcctgatccacctctgtgttcaactctaccgtatgatggacaagggcgtcctcagctactggcgaaagccaaggaactggctggaggtagcctctcttgtgtcattttcttttgaaaaataacaataaactgtttatatcttgaaaaaa

SEQ ID NO: 167272 - DNA, 3427 bp, Homo sapiens
  Payload ID: 12914
  Gene Symbol: PKD1L2
  Gene Name: polycystic kidney disease 1-like 2 (gene/pseudogene)
  Uniprot ID: Q7Z442
  ENST ID: ENST00000337114
  CDS Start-End: 1-2976
atgagtgcagtgggcttggtactcctggtgcttgctctgaggcttagggccaccactgttaagccagaggaaggcagcttttgctctaacagccaggtggccttcagagatgcttgctatgaatttgtgccactcggacgcaccttccgtgatgcccagagctggtgcgaggggcaaggaggccatttggtcttcattcaggacgaaggcacccagtggtttctgcagaagcacatctcccaggacagggaatggtggattggactcacgtggaacttggcacggaatggaaccacggaggggccggggacttggttggacacctccaatgtgacctacagcaactggcatggagggcaggccgccgctgcccctgacacctgcggccacatcgggagaggcccttcctctgagtgggtgacctcggactgcgcccagaccttcgccttcatgtgcgagttccgggttggccagagcctggcctgcgagggactcaatgccaccgtgcactgtggcttggggcaggtcatccaggtccaggatgccgtctacgggcgccagaatccccatttctgcacccaggatgccgggcgtccttcagatctggagcagggatgcagctgggccaacgtcaaggaggaggtggcaggccagtgccaggagctacagtcatgccaggtggcagcagatgagacctactttggaaacctgtgtccgactcagggcagttacctgtgggtgcagtaccagtgccgggaagccctgcagctgatggtgtccagtgagagtttcatctttgacaatgtcaccatctccctgacgtggctcctctcaccctacataggaaacctgtcctgtataattagtacaggagacagccacacttttgatccctacaacccgccgagtgtgtccagcaatgtgacccaccagttcacatctcctggggaattcaccgtgtttgctgaatgcacaaccagtgagtggcatgtgacagctcagaggcaggtgaccgtgcgagacaagatggagacgctcagtgtgactgcatgctccggcctgtcccagtcaggagccggccctctctgccaggctgtctttggggatcctctgtggattcaggtggagcttgatggaggaacaggagtgacttacactgtgcttttgggtgacataaccctggccgagtccaccacccaaaagggctcgctaccgtacaatctgatcctggacagagaaacccagaaactgatgggccctgggaggcaccgcctggagatccaagccaccggcaacaccaccacctctacaatctccagaaacattacagtccacttggtggagctgctgtcagggctgcaggcctcctgggcttctgaccatttggagcttggacaggacctattgatcaccatctcattggctcagggcaccccggaagagctgacctttgaggtggctggactcaatgcaaccttctcccacgagcaagtgagctttggagagccatttgggatttgccgcctggctgttccggttgaaggcacctttctggtcaccatgctggtgaggaatgccttctccaacctgagtttggaaatcgggaacatcactatcacagccccttccggtctccaagaaccatctgggatgaatgctgaaggaaagagtaaagataaaggcgatatggaggtgtacatccaacctggtccatatgtggatcctttcacgacagtgaccctgggctggccagacaatgacaaggagttacgcttccaatggtcatgtgggtcttgctgggctctgtggagcagctgtgttgagaggcagctgcttcgcacagaccagagggagctggtggttccagcatcctgcctgccgccgcctgactctgctgtcaccctgcgcctggctgttctgagaggccaagagctggagaacagggcagagcagtgcctctacgtgtctgcgccctgggaactcaggcctcgagtcagctgtgagaggaactgcaggccagttaatgccagcaaagacattctgctcagggtcaccatgggggaggactctccagtggctatgttcagctggtatttggacaacaccccaacagagcaggctgagcccctcctggatgcctgcagactcagaggattttggccaaggtccttaaccctcctccagagcaacacctccacgttgctgttgaacagctcgtttctgcagtcccggggagaggtcatccgaatcagagccacagcactgaccaggcatgcctatggggaggacacctatgtgatcagcactgtgcctccccgtgaggtgcctgcctgcactattgccccagaggagggcaccgttctgacgagctttgccatcttctgcaacgcctccacagccctgggacccctggagttctgcttctgtctggaatcaggttcctgcctacactgtggccctgaacctgccctcccatcagtgtatctgccacttggagaggagaacaatgactttgtgctgacagtagttatttctgccaccaatcgtgcaggggacacgcagcagacccaggccatggctaaggtggcactcggagacacatgtgttgaggatgtagcattccaggctgccgtgtcagagaaaatccccacagctctgcaaggcgagggtggccccgagcagctcctccagctggccaaggctgtgtcctccatgctgaaccaagagcatgaaagccagggctcaggacagtcactgagcatagacgtcagacagaaggtcagagagcatgtgctgggatcactgtctgcagtcaccaccggcttggaggacgtgcagagggtgcaggagctggccgaggtgctgagagaggtgacctgccggagtaaggaactcacaccctcggcccaggggtcctgcatgggcgattcatgggaaggtgcccctcctgctgcccatgtatctcacgctaggtgagagggcctgtttgcccagactctcactcctgcatctgctggtgagcaagttgagggagtaactgaatctcattaatatttgggtggccaaatgtgagtccagacactgctactgactgcccatgttctcaacttcagtacatgccagcctgacatctggctgccagctcctgtgcttccttatccttctgggggtcttctctgaccctcagagcctactgtacctgcccatatggctgtgaattcatgcagtgttcagtgactaatgaagctggcttataaacaccccagctacctcacccctcttgatggataatcccaagcaggagtgaatcccaggtaatgggcttgatcacactcctgtactggcttccacccttccctgtctcacaccccctactccccacaagtgtttcttgggatcatgtccaaataaatgacttgctctcaaa

SEQ ID NO: 167273 - DNA, 4165 bp, Homo sapiens
  Payload ID: 12914
  Gene Symbol: PKD1L2
  Gene Name: polycystic kidney disease 1-like 2 (gene/pseudogene)
  Uniprot ID: Q7Z442
  ENST ID: ENST00000527937
  CDS Start-End: 115-837
agatgatagcaatgcctcggggagcttcctcactctgtcctctgtctgcctttcagctgtgagaggaactgcaggccagttaatgccagcaaagacattctgctcagggtcaccatgggggaggactctccagtggctatgttcagctggtatttggacaacaccccaacagagcaggctgagcccctcctggatgcctgcagactcagaggattttggccaaggtccttaaccctcctccagagcaacacctccacgttgctgttgaacagctcgtttctgcagtcccggggagaggtcatccgaatcagagccacaggttcctgcctacactgtggccctgaacctgccctcccatcagtgtatctgccacttggagaggagaacaatgactttgtgctgacagtagttatttctgccaccaatcgtgcaggggacacgcagcagacccaggccatggctaaggtggcactcggagacacatgtgttgaggatgtagcattccaggctgccgtgtcagagaaaatccccacagctctgcaaggcgagggtggccccgagcagctcctccagctggccaaggctgtgtcctccatgctgaaccaagagcatgaaagccagggctcaggacagtcactgagcatagacgtcagacagaaggtacccgtgggaagctggggggctcctttcattcccttcctctggggccccagggtctgcgtgcggccatttgggctgtggatcaaggttcatggatcaggggagaaacctgtggtgtctcccaagcggctgacaccacctccctctctggtcttttgggtgagtgacataaagtgaagaaaatgccttcttccttggtaacctgctttctcggctggccctcatggaggcacaggcctctgggatggggggagtttagaacacatcatcccctgcttttcatgtttcagatgacaaggcagagccccagagcagaaaggggactgtcctcggtcacatgggtagcggtttggagttggaccacagatggcgtcccggctttgtcacttaccattcgcattgtcacaggccagggaccaaacctctctaagtctcagtttccccatatagaagaatactagtctcctcatacaattgtagtaagagttaaataagaattacgatcactgcaactaaaaaactagataagaccgtcaacattcaatcagttttaatctacaaaaatggccgttccattgttacaacctagtatgataaactattgcagaacgtatgattgtgtccactcccagcatgtgccacatgagtttgtgttcgtgtgtgtgcatgcacacacccacacacacacccctgtgggcacggagaagagaagaaagacttctcttggctccctgaaaggtttgcaggaaggtactgagtgtggtgctagaggcctggtaggtacttaatacaggaagccggattgtcattgtggtcgcttaccgagagaaactaacatgtatcaagcacctgctatgagctgccaggccctgaattagggcttcatggatctgtaatccccactacaaccctgggacgtaaatggtgaggcctccatctatgttacagctgaggaaacagagggtaagagaatcagaggtgcctgcctgtgtccctgtgtctggtaagtggtgaagcctgggttcaaacccagtttagaggttccccctccacctccagccctcttaccccagaccccctgccacatacatacacattagctctcacacatcatacatacacactttcacacacactcttatgcacacacacacactcaaacatgttcacacacacacactcacaaacacattcacatactcccacacacatactcacacacttatacgcatatacatacatgctcacacactcactcatatgactcatactcacacacatacacacactgacagatgctcacacacacacactcatatacacacatacacatgcacacacaaactcacacacatgctcacacacatacactgacacgctgtcacacacacacatactcccacacacaattatgctttcacacatacacatacatacacactcacacactttcacacacacacagctctcattcttggtcacattcactctgagaagtaccaatgggaagcttcccctggacatcctgtggtccccaagcacacagaccacacagcctaacccaaggtctccccatgaaatgcccggggcctggcacaagacagatgtcaaactctcactgggaagctgagaagatgttaacaagggctctgttgagacaggtgtgtgcagggcttagggaacaaactagacagcgtggaggaccccagaggcccggcctgccgtgagcaggatccagggggcggctgcccacagagggactctctggtaggagctgtggcttttgaagaatgaggcggccagcccccggtgacctggccgagggcatcaggagaatgacccctcccagctctctctcctcctgccatctcgtcccctgctgggctcctgctgggtgagtccatttgccggagggtccagagccggtgacatctttacccagggtaggtgacaaacgatggggtcagggcctgcagaagcaaatgtgagattacccattatctgagtttcccttctggaatattctgcaaagagtctcctgccacactgacctattctttcctcaacccaagacacagccgggatggaggcctggctgtccctggaatggatggcagatgcactcatacttggaagcttcgggaaagcctgtcaggctgagccaggtgtgagcaacaggccacggtgtctctgccccatcaaaagtggctgctgcttaaatctaagtcattattaaaattaaataaagttacaaatgacagttctactgggcagtgctgaaatgatgttcttagtttttctctgctcctaccaaagcccctcaccagcccctcattagtgctttgtagtgtagaaagcacttgaccctgaagcccgtggcctggcccaagacaggagtggagggctgggtaggggggttcttgtccccactgctgcaaaggcacacagggaccccaagcctccggtgagacctcccatccatgccagaccaacagtcatccagtttctgaatttcatgccattctggtcacaggtgccacgctgagacacaatttattttcaaatagtgccaaattctacagattcaatttgaagatttggagaaagcttgagacatcctatatatgtttgctagggctgctgttacaaatgaccacaaagatcatggcttaacgcaacacgcatttattcactttatagttctggaggccagaagtttaaaatggggtccactaggccaaaagtaaggtgatggcagagctgcaaacctggaggctccaggagagaagccattccttgccttttccgggttctagaggccgcctgcactccttgactcctatcttcaaagccagccacgcagcatctccaaagtcctctcctctccctctgtctctccccacccttacctcatcctctttccctctctttttcttccccctacccctgcctccatcacccatctcctgttctgattaacgttcctacctccctcttagaagggtcgtatgatgacgttggtcccacctgttcggataatctctccatctcagaatttttaacttaattgcttctccaaaatgacttagtcaaagtgccttttgccacattcagtaacatattcacaggtttcagggatgtgaatgtgggcatcttgagggggctgttatctgcctaatcacacatcatacaaggcagacagaggtctgcagggctttagaaaccaccagtgaggccaggtgcggtggctcacgcctgtaatacctgcactttggaaggctgaggcaggtggatcacttgaggtcagaagttcaagaccagcctggccaacatggcaaaaccctgtctctactaaaaatacaaaaaattagctggtgatggtggtgcgcacctgtaatcccagctactcaggaggctgaggcccgaacccaggaggcggaggttgcaatgagtcgagatcatgccagtgtactccagcctgggtgacagagcgagactctgactc

SEQ ID NO: 167274 - DNA, 7379 bp, Homo sapiens
  Payload ID: 12914
  Gene Symbol: PKD1L2
  Gene Name: polycystic kidney disease 1-like 2 (gene/pseudogene)
  ENST ID: ENST00000525539
  CDS Start-End: 1-7379
atgagtgcagtgggcttggtactcctggtgcttgctctgaggcttagggccaccactgttaagccagaggaaggcagcttttgctctaacagccaggtggccttcagagatgcttgctatgaatttgtgccactcggacgcaccttccgtgatgcccagagctggtgcgaggggcaaggaggccatttggtcttcattcaggacgaaggcacccagtggtttctgcagaagcacatctcccaggacagggaatggtggattggactcacgtggaacttggcacggaatggaaccacggaggggccggggacttggttggacacctccaatgtgacctacagcaactggcatggagggcaggccgccgctgcccctgacacctgcggccacatcgggagaggcccttcctctgagtgggtgacctcggactgcgcccagaccttcgccttcatgtgcgagttccgggttggccagagcctggcctgcgagggactcaatgccaccgtgcactgtggcttggggcaggtcatccaggtccaggatgccgtctacgggcgccagaatccccatttctgcacccaggatgccgggcgtccttcagatctggagcagggatgcagctgggccaacgtcaaggaggaggtggcaggccagtgccaggagctacagtcatgccaggtggcagcagatgagacctactttggaaacctgtgtccgactcagggcagttacctgtgggtgcagtaccagtgccgggaagccctgcagctgatggtgtccagtgagagtttcatctttgacaatgtcaccatctccctgacgtggctcctctcaccctacataggaaacctgtcctgtataattagtacaggagacagccacacttttgatccctacaacccgccgagtgtgtccagcaatgtgacccaccagttcacatctcctggggaattcaccgtgtttgctgaatgcacaaccagtgagtggcatgtgacagctcagaggcaggtgaccgtgcgagacaagatggagacgctcagtgtgactgcatgctccggcctgtcccagtcaggagccggccctctctgccaggctgtctttggggatcctctgtggattcaggtggagcttgatggaggaacaggagtgacttacactgtgcttttgggtgacataaccctggccgagtccaccacccaaaagggctcgctaccgtacaatctgatcctggacagagaaacccagaaactgatgggccctgggaggcaccgcctggagatccaagccaccggcaacaccaccacctctacaatctccagaaacattacagtccacttggtggagctgctgtcagggctgcaggcctcctgggcttctgaccatttggagcttggacaggacctattgatcaccatctcattggctcagggcaccccggaagagctgacctttgaggtggctggactcaatgcaaccttctcccacgagcaagtgagctttggagagccatttgggatttgccgcctggctgttccggttgaaggcacctttctggtcaccatgctggtgaggaatgccttctccaacctgagtttggaaatcgggaacatcactatcacagccccttccggtctccaagaaccatctgggatgaatgctgaaggaaagagtaaagataaaggcgatatggaggtgtacatccaacctggtccatatgtggatcctttcacgacagtgaccctgggctggccagacaatgacaaggagttacgcttccaatggtcatgtgggtcttgctgggctctgtggagcagctgtgttgagaggcagctgcttcgcacagaccagagggagctggtggttccagcatcctgcctgccgccgcctgactctgctgtcaccctgcgcctggctgttctgagaggccaagagctggagaacagggcagagcagtgcctctacgtgtctgcgccctgggaactcaggcctcgagtcagctgtgagaggaactgcaggccagttaatgccagcaaagacattctgctcagggtcaccatgggggaggactctccagtggctatgttcagctggtatttggacaacaccccaacagagcaggctgagcccctcctggatgcctgcagactcagaggattttggccaaggtccttaaccctcctccagagcaacacctccacgttgctgttgaacagctcgtttctgcagtcccggggagaggtcatccgaatcagagccacagcactgaccaggcatgcctatggggaggacacctatgtgatcagcactgtgcctccccgtgaggtgcctgcctgcactattgccccagaggagggcaccgttctgacgagctttgccatcttctgcaacgcctccacagccctgggacccctggagttctgcttctgtctggaatcaggttcctgcctacactgtggccctgaacctgccctcccatcagtgtatctgccacttggagaggagaacaatgactttgtgctgacagtagttatttctgccaccaatcgtgcaggggacacgcagcagacccaggccatggctaaggtggcactcggagacacatgtgttgaggatgtagcattccaggctgccgtgtcagagaaaatccccacagctctgcaaggcgagggtggccccgagcagctcctccagctggccaaggctgtgtcctccatgctgaaccaagagcatgaaagccagggctcaggacagtcactgagcatagacgtcagacagaaggtcagagagcatgtgctgggatcactgtctgcagtcaccaccggcttggaggacgtgcagagggtgcaggagctggccgaggtgctgagagaggtgacctgccggagtaaggaactcacaccctcggcccagtgggaggccagcttggctctacagcatgccagtgaggccctgttgacagtgagtgccaaggcccgccctgaggaccagaggcgccaggcagccaccagggacctgtttcaggctgtgggcagtgtgctggaagcttccctgagcaacagaccagaagagcctgcggaggccagcagcagccagattgccacagtgctgcggctgcttcgagtcatggagcatgtgcagaccaccctcctgctgggaaaactgccagggggccttccagccatgctggccaccccctccatctctgtgtacacaaacagaatacaaccctggagttggcaaggctcctccctgcgccctgatgccgcagactctgcaaccttcatgctgcccgctgcctcctccctcagctctctggagggcggccaggagcccgtggatataaagatcatgagtttcccaaagagcccctttccagcccgaagccactttgatgtcagcgggactgtcggtggcctccgtgtgaccagccctagtggtcaactcatacctgtgaagaatctgtcggagaatatcgagatcctgctgccccggcattcacaaagacacagccagccgaccgtgttgaacctgaccagtcctgaagctttgtgggtgaacgtgacttcaggggaggcaaccttggggatccagctgcactggagaccagacattgcactcacgcttagcctgggctatggctaccaccccaacaagagcagctacgatgcccaaactcacctcgtaccaatggtggctccagatgagctgcccacgtggatcctgagcccacaggacctgcgttttggagaaggggtctactatttgactgtggtccctgagtctgacctggagccagcccccggcagggacctcacggttggcatcaccaccttcctgtctcactgtgtgttctgggatgaggtccaggagacttgggacgactcaggatgccaggtggggcctcggaccagcccctaccagacacactgcctctgcaaccacctcactttcttcggaagcacgttcctggtgatgtccaatgccatcaacatccaccagactgctgagctctttgccacctttgaggacaaccctgtggtcgtgaccaccgtgggctgcctgtgtgtggtctacgtgctggtggtgatctgggcgaggaggaaggacgctcaggatcaggccaaggtgaaggtcacagtgctggaagacaatgatccctttgctcagtaccactacctggtgacagtctacacaggacaccgacgaggggcagccacgtcctcaaaggtgactgtcaccctgtatggcctggatggagagagagagccccaccacctggctgatcccgacactccggtttttgagcgaggagcagtggatgccttcctcctctccaccctgttccccctgggagaactgcggagcctccggctgtggcatgacaactcaggggaccggccatcgtggtatgtgagccgggtgctggtctatgacctggtgatggaccggaagtggtatttcctgtgcaactcctggctatccatcaatgttggagattgcgtcctcgataaggtgtttcctgtggccacggagcaggacagaaaacaattcagccacctgtttttcatgaagacttccgcgggcttccaggatggacacatctggtattcgatcttcagccgctgcgctcgcagcagcttcacccgcgtccagagggtgtcctgctgcttctccctgctgctgtgcaccatgctgaccagcatcatgttctggggggtccccaaggacccagctgagcaaaagatggacttgggtaaaattgaattcacctggcaggaggtgatgattggcctggagagctccatcctcatgttccccatcaacctcctgattgttcagatctttcagaacacccgtccccgggtcgcgaaggagcagaacactggaaaatgggaccgggggtcccccaacctgactccctccccacagcccatggaggacggccttctgacacctgaggcagtgaccaaggatgtgtcaagaatcgtcagctccctcttcaaagctctcaaggtgccatcccccgccttgggctgggactcagtgaacttgatggacatcaacagtctcctcgccttggtggaagatgtcatttatccacagaacacatcagggcaggtgttctgggaggaagccaaaaagagagaggaccctgtaacactcactttggggtcatcagaaatgaaagagaaatcacagtgtcccaagcccaaggcggcacggagtggcccctggaaggacagcgcctacaggcagtgtctgtaccttcagctggaacacgtggagcaagagctgcggctggtggggccccgaggcttctcccagccccacagccatgcccaggccctcaggcagctgcagaccctgaagggcggcctgggggtacagccgggcacctgggcccctgcacatgccagcgctcttcaggtgagcaaaccccctcaaggcctgccctggtggtgcatcctggtgggctggctcctggtagcggccaccagtggcgtggcggccttcttcaccatgctctacggcctgcactacgggagggccagctccctcaggtggctcatctccatggctgtctccttcgtggagagcatgttcgtcacccagcccctgaaggtgctgggattcgctgctttctttgcactggtcttgaagagagtggacgatgaggaggatactgtggccccgctgccaggacatctgttgggcccagacccctatgccttgttccgagcacgaagaaacagcagcagggatgtctaccagccacctctcaccgctgccattgagaagatgaaaaccacccacctcaaggaacagaaagcatttgccctcatcagagaaatcctggcatacttgggcttcctgtggatgctactgctcgtggcctacgggcagagggaccccagcgcctaccacctcaacagacacctccagcacagcttcaccaggggcttttcaggtgtgctcggcttccgagagttcttcaagtgggccaacaccaccctcgtgagtaacctgtatggtcaccccccaggctttatcactgatgggaactccaagctggttggcagtgcccagattcgtcaagtgagggtccaggaaagctcttgccctcttgcccagcagccgcaggcatatctcaacggatgccgtgcaccatattccctggatgctgaagacatggcagactatggggaaggctggaatgccaccaccctcagtaatggcagtaccagagccaggaccaacgtcaagggtatcccatctggggcaaactcactgtgtaccggggaggaggctacgtggtccccttggggactgatcgccaaagcacgtcaagaattctccgctatctctttgacaacacctggctggacgccctgaccagagctgtgtttgtggagtccactgtctacaacgccaacgtcaacctgttctgcattgtcacgctgacgctagagaccagcgctctgggcaccttttttacgcacgcggccctgcagagcctccgcctgtaccccttcaccgacggctggcaccccttcgtggtagcggcagagctcatctacttcctcttcctcctctactacatggtggtgcagggcaagcgcatgagtaaagagacgtggggctatttctgcagcaagtggaaccttctggagctggccatcatcctggccagctggagcgccctggcggtgtttgtgaagagggctgtcctggccgaaagggacctccagcgctgccggaaccacagggaggaaggcatcagcttcagtgagacagcagcagccgatgccgcccttggctacatcattgccttcctggtactcctgtccacagtgaagctttggcatctgctcaggttgaatcccaaaatgaacatgatcacggcagccctacgccgtgcctggggcgacatttcaggctttatgattgtcatccttaccatgctcctggcttactccatcgcgtcaaacttgatatttggttggaaactccgttcctacaaaaccctctttgatgcggcggagacgatggtcagccttcagctgggaatcttcaactacgaggaggtcctggactatagcccagtgcttggctccttcctcattggatcctgcattgtttttatgacatttgtggtgctgaacctgtttatctctgtcatcctggtggccttcagtgaggagcaaaaatactatcagctgtcggaggaaggggagatcgtagatttgctgctgatgaaaatactcagtttcctgggcattaagtctaagagagaggagcctggaagcagcagggagcagcctgggtctctgtcccagactcgccactctcgaccagcacaagctttgcccaaggactaa

SEQ ID NO: 167275 - DNA, 5669 bp, Homo sapiens
  Payload ID: 12914
  Gene Symbol: PKD1L2
  Gene Name: polycystic kidney disease 1-like 2 (gene/pseudogene)
  ENST ID: ENST00000533478
  CDS Start-End: 112-5435
tgatagcaatgcctcggggagcttcctcactctgtcctctgtctgcctttcagctgtgagaggaactgcaggccagttaatgccagcaaagacattctgctcagggtcaccatgggggaggactctccagtggctatgttcagctggtatttggacaacaccccaacagagcaggctgagcccctcctggatgcctgcagactcagaggattttggccaaggtccttaaccctcctccagagcaacacctccacgttgctgttgaacagctcgtttctgcagtcccggggagaggtcatccgaatcagagccacagcactgaccaggcatgcctatggggaggacacctatgtgatcagcactgtgcctccccgtgaggtgcctgcctgcactattgccccagaggagggcaccgttctgacgagctttgccatcttctgcaacgcctccacagccctgggacccctggagttctgcttctgtctggaatcaggttcctgcctacactgtggccctgaacctgccctcccatcagtgtatctgccacttggagaggagaacaatgactttgtgctgacagtagttatttctgccaccaatcgtgcaggggacacgcagcagacccaggccatggctaaggtggcactcggagacacatgtgttgaggatgtagcattccaggctgccgtgtcagagaaaatccccacagctctgcaaggcgagggtggccccgagcagctcctccagctggccaaggctgtgtcctccatgctgaaccaagagcatgaaagccagggctcaggacagtcactgagcatagacgtcagacagaaggtcagagagcatgtgctgggatcactgtctgcagtcaccaccggcttggaggacgtgcagagggtgcaggagctggccgaggtgctgagagaggtgacctgccggagtaaggaactcacaccctcggcccagtgggaggccagcttggctctacagcatgccagtgaggccctgttgacagtgagtgccaaggcccgccctgaggaccagaggcgccaggcagccaccagggacctgtttcaggctgtgggcagtgtgctggaagcttccctgagcaacagaccagaagagcctgcggaggccagcagcagccagattgccacagtgctgcggctgcttcgagtcatggagcatgtgcagaccaccctcctgctgggaaaactgccagggggccttccagccatgctggccaccccctccatctctgtgtacacaaacagaatacaaccctggagttggcaaggctcctccctgcgccctgatgccgcagactctgcaaccttcatgctgcccgctgcctcctccctcagctctctggagggcggccaggagcccgtggatataaagatcatgagtttcccaaagagcccctttccagcccgaagccactttgatgtcagcgggactgtcggtggcctccgtgtgaccagccctagtggtcaactcatacctgtgaagaatctgtcggagaatatcgagatcctgctgccccggcattcacaaagacacagccagccgaccgtgttgaacctgaccagtcctgaagctttgtgggtgaacgtgacttcaggggaggcaaccttggggatccagctgcactggagaccagacattgcactcacgcttagcctgggctatggctaccaccccaacaagagcagctacgatgcccaaactcacctcgtaccaatggtggctccagatgagctgcccacgtggatcctgagcccacaggacctgcgttttggagaaggggtctactatttgactgtggtccctgagtctgacctggagccagcccccggcagggacctcacggttggcatcaccaccttcctgtctcactgtgtgttctgggatgaggtccaggagacttgggacgactcaggatgccaggtggggcctcggaccagcccctaccagacacactgcctctgcaaccacctcactttcttcggaagcacgttcctggtgatgtccaatgccatcaacatccaccagactgctgagctctttgccacctttgaggacaaccctgtggtcgtgaccaccgtgggctgcctgtgtgtggtctacgtgctggtggtgatctgggcgaggaggaaggacgctcaggatcaggccaaggtgaaggtcacagtgctggaagacaatgatccctttgctcagtaccactacctggtgacagtctacacaggacaccgacgaggggcagccacgtcctcaaaggtgactgtcaccctgtatggcctggatggagagagagagccccaccacctggctgatcccgacactccggtttttgagcgaggagcagtggatgccttcctcctctccaccctgttccccctgggagaactgcggagcctccggctgtggcatgacaactcaggggaccggccatcgtggtatgtgagccgggtgctggtctatgacctggtgatggaccggaagtggtatttcctgtgcaactcctggctatccatcaatgttggagattgcgtcctcgataaggtgtttcctgtggccacggagcaggacagaaaacaattcagccacctgtttttcatgaagacttccgcgggcttccaggatggacacatctggtattcgatcttcagccgctgcgctcgcagcagcttcacccgcgtccagagggtgtcctgctgcttctccctgctgctgtgcaccatgctgaccagcatcatgttctggggggtccccaaggacccagctgagcaaaagatggacttgggtaaaattgaattcacctggcaggaggtgatgattggcctggagagctccatcctcatgttccccatcaacctcctgattgttcagatctttcagaacacccgtccccgggtcgcgaaggagcagaacactggaaaatgggaccgggggtcccccaacctgactccctccccacagcccatggaggacggccttctgacacctgaggcagtgaccaaggatgtgtcaagaatcgtcagctccctcttcaaagctctcaaggtgccatcccccgccttgggctgggactcagtgaacttgatggacatcaacagtctcctcgccttggtggaagatgtcatttatccacagaacacatcagggcaggtgttctgggaggaagccaaaaagagagaggaccctgtaacactcactttggggtcatcagaaatgaaagagaaatcacagtgtcccaagcccaaggcggcacggagtggcccctggaaggacagcgcctacaggcagtgtctgtaccttcagctggaacacgtggagcaagagctgcggctggtggggccccgaggcttctcccagccccacagccatgcccaggccctcaggcagctgcagaccctgaagggcggcctgggggtacagccgggcacctgggcccctgcacatgccagcgctcttcaggtgagcaaaccccctcaaggcctgccctggtggtgcatcctggtgggctggctcctggtagcggccaccagtggcgtggcggccttcttcaccatgctctacggcctgcactacgggagggccagctccctcaggtggctcatctccatggctgtctccttcgtggagagcatgttcgtcacccagcccctgaaggtgctgggattcgctgctttctttgcactggtcttgaagagagtggacgatgaggaggatactgtggccccgctgccaggacatctgttgggcccagacccctatgccttgttccgagcacgaagaaacagcagcagggatgtctaccagccacctctcaccgctgccattgagaagatgaaaaccacccacctcaaggaacagaaagcatttgccctcatcagagaaatcctggcatacttgggcttcctgtggatgctactgctcgtggcctacgggcagagggaccccagcgcctaccacctcaacagacacctccagcacagcttcaccaggggcttttcaggtgtgctcggcttccgagagttcttcaagtgggccaacaccaccctcgtgagtaacctgtatggtcaccccccaggctttatcactgatgggaactccaagctggttggcagtgcccagattcgtcaagtgagggtccaggaaagctcttgccctcttgcccagcagccgcaggcatatctcaacggatgccgtgcaccatattccctggatgctgaagacatggcagactatggggaaggctggaatgccaccaccctcagtaatggcagtaccagagccaggaccaacgtcaagggtatcccatctggggcaaactcactgtgtaccggggaggaggctacgtggtccccttggggactgatcgccaaagcacgtcaagaattctccgctatctctttgacaacacctggctggacgccctgaccagagctgtgtttgtggagtccactgtctacaacgccaacgtcaacctgttctgcattgtcacgctgacgctagagaccagcgctctgggcaccttttttacgcacgcggccctgcagagcctccgcctgtaccccttcaccgacggctggcaccccttcgtggtagcggcagagctcatctacttcctcttcctcctctactacatggtggtgcagggcaagcgcatgagtaaagagacgtggggctatttctgcagcaagtggaaccttctggagctggccatcatcctggccagctggagcgccctggcggtgtttgtgaagagggctgtcctggccgaaagggacctccagcgctgccggaaccacagggaggaaggcatcagcttcagtgagacagcagcagccgatgccgcccttggctacatcattgccttcctggtactcctgtccacagtgaagctttggcatctgctcaggttgaatcccaaaatgaacatgatcacggcagccctacgccgtgcctggggcgacatttcaggctttatgattgtcatccttaccatgctcctggcttactccatcgcgtcaaacttgatatttggttggaaactccgttcctacaaaaccctctttgatgcggcggagacgatggtcagccttcagctgggaatcttcaactacgaggaggtcctggactatagcccagtgcttggctccttcctcattggatcctgcattgtttttatgacatttgtggtgctgaacctgtttatctctgtcatcctggtggccttcagtgaggagcaaaaatactatcagctgtcggaggaaggggagatcgtagatttgctgctgatgaaaatactcagtttcctgggcattaagtctaagagagaggagcctggaagcagcagggagcagcctgggtctctgtcccagactcgccactctcgaccagcacaagctttgcccaaggactaagctgttcgtccacacgccaccatctaccagtggggacgcccagggcctcgggcgtacgcttaccagcgactctatagtctctctaggtcatagctttcatgtccattgaagaattaccaagcccagcaagtaaaaaaaattacaataacagagatatatgtaaaattgccaatactatgagagcttctttgttcaaatgtatttcctcttattataaataaaacaaatattaca

SEQ ID NO: 167276 - DNA, 1488 bp, Homo sapiens
  Payload ID: 12914
  Gene Symbol: PKD1L2
  Gene Name: polycystic kidney disease 1-like 2 (gene/pseudogene)
  Uniprot ID: Q7Z442
  ENST ID: ENST00000531391
  CDS Start-End: 117-1037
ccagatgatagcaatgcctcggggagcttcctcactctgtcctctgtctgcctttcagctgtgagaggaactgcaggccagttaatgccagcaaagacattctgctcagggtcaccatgggggaggactctccagtggctatgttcagctggtatttggacaacaccccaacagagcaggctgagcccctcctggatgcctgcagactcagaggattttggccaaggtccttaaccctcctccagagcaacacctccacgttgctgttgaacagctcgtttctgcagtcccggggagaggtcatccgaatcagagccacagcactgaccaggcatgcctatggggaggacacctatgtgatcagcactgtgcctccccgtgaggtgcctgcctgcactattgccccagaggagggcaccgttctgacgagctttgccatcttctgcaacgcctccacagccctgggacccctggagttctgcttctgtctggaatcaggttcctgcctacactgtggccctgaacctgccctcccatcagtgtatctgccacttggagaggagaacaatgactttgtgctgacagtagttatttctgccaccaatcgtgcaggggacacgcagcagacccaggccatggctaaggtggcactcggagacacatgtgttgaggatgtagcattccaggctgccgtgtcagagaaaatccccacagctctgcaaggcgagggtggccccgagcagctcctccagctggccaaggctgtgtcctccatgctgaaccaagagcatgaaagccagggctcaggacagtcactgagcatagacgtcagacagaaggtcagagagcatgtgctgggatcactgtctgcagtcaccaccggcttggaggacgtgcagagggtgcaggagctggccgaggtgctgagagaggtgacctgccggagtaaggaactcacaccctcggcccaggggtcctgcatgggcgattcatgggaaggtgcccctcctgctgcccatgtatctcacgctaggtgagagggcctgtttgcccagactctcactcctgcatctgctggtgagcaagttgagggagtaactgaatctcattaatatttgggtggccaaatgtgagtccagacactgctactgactgcccatgttctcaacttcagtacatgccagcctgacatctggctgccagctcctgtgcttccttatccttctgggggtcttctctgaccctcagagcctactgtacctgcccatatggctgtgaattcatgcagtgttcagtgactaatgaagctggcttataaacaccccagctacctcacccctcttgatggataatcccaagcaggagtgaatcccaggtaatgggcttgatcacactcctgtactggcttccacccttccctgtctcacaccccctactccccacaagtgtttcttgggatcatgtccaaataaatgacttgctctcaaa

SEQ ID NO: 167277 - DNA, 2006 bp, Homo sapiens
  Payload ID: 12914
  Gene Symbol: PKD1L2
  Gene Name: polycystic kidney disease 1-like 2 (gene/pseudogene)
  ENST ID: ENST00000526632
  CDS Start-End: 1-1558
attggctcagggcaccccggaagagctgacctttgaggtggctggactcaatgcaaccttctcccacgagcaagtgagctttggagagccatttgggatttgccgcctggctgttccggttgaaggcacctttctggtcaccatgctggtgaggaatgccttctccaacctgagtttggaaatcgggaacatcactatcacagccccttccggtctccaagaaccatctgggatgaatgctgaaggaaagagtaaagataaaggcgatatggaggtgtacatccaacctggtccatatgtggatcctttcacgacagtgaccctgggctggccagacaatgacaaggagttacgcttccaatggtcatgtgggtcttgctgggctctgtggagcagctgtgttgagaggcagctgcttcgcacagaccagagggagctggtggttccagcatcctgcctgccgccgcctgactctgctgtcaccctgcgcctggctgttctgagaggccaagagctggagaacagggcagagcagtgcctctacgtgtctgcgccctgggaactcaggcctcgagtcagctgtgagaggaactgcaggccagttaatgccagcaaagacattctgctcagggtcaccatgggggaggactctccagtggctatgttcagctggtatttggacaacaccccaacagagcaggctgagcccctcctggatgcctgcagactcagaggattttggccaaggtccttaaccctcctccagagcaacacctccacgttgctgttgaacagctcgtttctgcagtcccggggagaggtcatccgaatcagagccacagcactgaccaggcatgcctatggggaggacacctatgtgatcagcactgtgcctccccgtgaggtgcctgcctgcactattgccccagaggagggcaccgttctgacgagctttgccatcttctgcaacgcctccacagccctgggacccctggagttctgcttctgtctggaatcaggttcctgcctacactgtggccctgaacctgccctcccatcagtgtatctgccacttggagaggagaacaatgactttgtgctgacagtagttatttctgccaccaatcgtgcaggggacacgcagcagacccaggccatggctaaggtggcactcggagacacatgtgttgaggatgtagcattccaggctgccgtgtcagagaaaatccccacagctctgcaaggcgagggtggccccgagcagctcctccagctggccaaggctgtgtcctccatgctgaaccaagagcatgaaagccagggctcaggacagtcactgagcatagacgtcagacagaaggtcagagagcatgtgctgggatcactgtctgcagtcaccaccggcttggaggacgtgcagagggtgcaggagctggccgaggtgctgagagaggtgacctgccggagtaaggaactcacaccctcggcccaggggtcctgcatgggcgattcatgggaaggtgcccctcctgctgcccatgtatctcacgctaggtgagagggcctgtttgcccagactctcactcctgcatctgctggtgagcaagttgagggagtaactgaatctcattaatatttgggtggccaaatgtgagtccagacactgctactgactgcccatgttctcaacttcagtacatgccagcctgacatctggctgccagctcctgtgcttccttatccttctgggggtcttctctgaccctcagagcctactgtacctgcccatatggctgtgaattcatgcagtgttcagtgactaatgaagctggcttataaacaccccagctacctcacccctcttgatggataatcccaagcaggagtgaatcccaggtaatgggcttgatcacactcctgtactggcttccacccttccctgtctcacaccccctactccccacaagtgtttcttgggatcatgtccaaataaatgacttgctctc

SEQ ID NO: 167278 - DNA, 7621 bp, Homo sapiens
  Payload ID: 12914
  Gene Symbol: PKD1L2
  Gene Name: polycystic kidney disease 1-like 2 (gene/pseudogene)
  ENST ID: ENST00000614230
  CDS Start-End: 1-7377
atgagtgcagtgggcttggtactcctggtgcttgctctgaggcttagggccaccactgttaagccagaggaaggcagcttttgctctaacagccaggtggccttcagagatgcttgctatgaatttgtgccactcggacgcaccttccgtgatgcccagagctggtgcgaggggcaaggaggccatttggtcttcattcaggacgaaggcacccagtggtttctgcagaagcacatctcccaggacagggaatggtggattggactcacgtggaacttggcacggaatggaaccacggaggggccggggacttggttggacacctccaatgtgacctacagcaactggcatggagggcaggccgccgctgcccctgacacctgcggccacatcgggagaggcccttcctctgagtgggtgacctcggactgcgcccagaccttcgccttcatgtgcgagttccgggttggccagagcctggcctgcgagggactcaatgccaccgtgcactgtggcttggggcaggtcatccaggtccaggatgccgtctacgggcgccagaatccccatttctgcacccaggatgccgggcgtccttcagatctggagcagggatgcagctgggccaacgtcaaggaggaggtggcaggccagtgccaggagctacagtcatgccaggtggcagcagatgagacctactttggaaacctgtgtccgactcagggcagttacctgtgggtgcagtaccagtgccgggaagccctgcagctgatggtgtccagtgagagtttcatctttgacaatgtcaccatctccctgacgtggctcctctcaccctacataggaaacctgtcctgtataattagtacaggagacagccacacttttgatccctacaacccgccgagtgtgtccagcaatgtgacccaccagttcacatctcctggggaattcaccgtgtttgctgaatgcacaaccagtgagtggcatgtgacagctcagaggcaggtgaccgtgcgagacaagatggagacgctcagtgtgactgcatgctccggcctgtcccagtcaggagccggccctctctgccaggctgtctttggggatcctctgtggattcaggtggagcttgatggaggaacaggagtgacttacactgtgcttttgggtgacataaccctggccgagtccaccacccaaaagggctcgctaccgtacaatctgatcctggacagagaaacccagaaactgatgggccctgggaggcaccgcctggagatccaagccaccggcaacaccaccacctctacaatctccagaaacattacagtccacttggtggagctgctgtcagggctgcaggcctcctgggcttctgaccatttggagcttggacaggacctattgatcaccatctcattggctcagggcaccccggaagagctgacctttgaggtggctggactcaatgcaaccttctcccacgagcaagtgagctttggagagccatttgggatttgccgcctggctgttccggttgaaggcacctttctggtcaccatgctggtgaggaatgccttctccaacctgagtttggaaatcgggaacatcactatcacagccccttccggtctccaagaaccatctgggatgaatgctgaaggaaagagtaaagataaaggcgatatggaggtgtacatccaacctggtccatatgtggatcctttcacgacagtgaccctgggctggccagacaatgacaaggagttacgcttccaatggtcatgtgggtcttgctgggctctgtggagcagctgtgttgagaggcagctgcttcgcacagaccagagggagctggtggttccagcatcctgcctgccgccgcctgactctgctgtcaccctgcgcctggctgttctgagaggccaagagctggagaacagggcagagcagtgcctctacgtgtctgcgccctgggaactcaggcctcgagtcagctgtgagaggaactgcaggccagttaatgccagcaaagacattctgctcagggtcaccatgggggaggactctccagtggctatgttcagctggtatttggacaacaccccaacagagcaggctgagcccctcctggatgcctgcagactcagaggattttggccaaggtccttaaccctcctccagagcaacacctccacgttgctgttgaacagctcgtttctgcagtcccggggagaggtcatccgaatcagagccacagcactgaccaggcatgcctatggggaggacacctatgtgatcagcactgtgcctccccgtgaggtgcctgcctgcactattgccccagaggagggcaccgttctgacgagctttgccatcttctgcaacgcctccacagccctgggacccctggagttctgcttctgtctggaatcaggttcctgcctacactgtggccctgaacctgccctcccatcagtgtatctgccacttggagaggagaacaatgactttgtgctgacagtagttatttctgccaccaatcgtgcaggggacacgcagcagacccaggccatggctaaggtggcactcggagacacatgtgttgaggatgtagcattccaggctgccgtgtcagagaaaatccccacagctctgcaaggcgagggtggccccgagcagctcctccagctggccaaggctgtgtcctccatgctgaaccaagagcatgaaagccagggctcaggacagtcactgagcatagacgtcagacagaaggtcagagagcatgtgctgggatcactgtctgcagtcaccaccggcttggaggacgtgcagagggtgcaggagctggccgaggtgctgagagaggtgacctgccggagtaaggaactcacaccctcggcccagtgggaggccagcttggctctacagcatgccagtgaggccctgttgacagtgagtgccaaggcccgccctgaggaccagaggcgccaggcagccaccagggacctgtttcaggctgtgggcagtgtgctggaagcttccctgagcaacagaccagaagagcctgcggaggccagcagcagccagattgccacagtgctgcggctgcttcgagtcatggagcatgtgcagaccaccctcctgctgggaaaactgccagggggccttccagccatgctggccaccccctccatctctgtgtacacaaacagaatacaaccctggagttggcaaggctcctccctgcgccctgatgccgcagactctgcaaccttcatgctgcccgctgcctcctccctcagctctctggagggcggccaggagcccgtggatataaagatcatgagtttcccaaagagcccctttccagcccgaagccactttgatgtcagcgggactgtcggtggcctccgtgtgaccagccctagtggtcaactcatacctgtgaagaatctgtcggagaatatcgagatcctgctgccccggcattcacaaagacacagccagccgaccgtgttgaacctgaccagtcctgaagctttgtgggtgaacgtgacttcaggggaggcaaccttggggatccagctgcactggagaccagacattgcactcacgcttagcctgggctatggctaccaccccaacaagagcagctacgatgcccaaactcacctcgtaccaatggtggctccagatgagctgcccacgtggatcctgagcccacaggacctgcgttttggagaaggggtctactatttgactgtggtccctgagtctgacctggagccagcccccggcagggacctcacggttggcatcaccaccttcctgtctcactgtgtgttctgggatgaggtccaggagacttgggacgactcaggatgccaggtggggcctcggaccagcccctaccagacacactgcctctgcaaccacctcactttcttcggaagcacgttcctggtgatgtccaatgccatcaacatccaccagactgctgagctctttgccacctttgaggacaaccctgtggtcgtgaccaccgtgggctgcctgtgtgtggtctacgtgctggtggtgatctgggcgaggaggaaggacgctcaggatcaggccaaggtgaaggtcacagtgctggaagacaatgatccctttgctcagtaccactacctggtgacagtctacacaggacaccgacgaggggcagccacgtcctcaaaggtgactgtcaccctgtatggcctggatggagagagagagccccaccacctggctgatcccgacactccggtttttgagcgaggagcagtggatgccttcctcctctccaccctgttccccctgggagaactgcggagcctccggctgtggcatgacaactcaggggaccggccatcgtggtatgtgagccgggtgctggtctatgacctggtgatggaccggaagtggtatttcctgtgcaactcctggctatccatcaatgttggagattgcgtcctcgataaggtgtttcctgtggccacggagcaggacagaaaacaattcagccacctgtttttcatgaagacttccgcgggcttccaggatggacacatctggtattcgatcttcagccgctgcgctcgcagcagcttcacccgcgtccagagggtgtcctgctgcttctccctgctgctgtgcaccatgctgaccagcatcatgttctggggggtccccaaggacccagctgagcaaaagatggacttgggtaaaattgaattcacctggcaggaggtgatgattggcctggagagctccatcctcatgttccccatcaacctcctgattgttcagatctttcagaacacccgtccccgggtcgcgaaggagcagaacactggaaaatgggaccgggggtcccccaacctgactccctccccacagcccatggaggacggccttctgacacctgaggcagtgaccaaggatgtgtcaagaatcgtcagctccctcttcaaagctctcaaggtgccatcccccgccttgggctgggactcagtgaacttgatggacatcaacagtctcctcgccttggtggaagatgtcatttatccacagaacacatcagggcaggtgttctgggaggaagccaaaaagagagaggaccctgtaacactcactttggggtcatcagaaatgaaagagaaatcacagtgtcccaagcccaaggcggcacggagtggcccctggaaggacagcgcctacaggcagtgtctgtaccttcagctggaacacgtggagcaagagctgcggctggtggggccccgaggcttctcccagccccacagccatgcccaggccctcaggcagctgcagaccctgaagggcggcctgggggtacagccgggcacctgggcccctgcacatgccagcgctcttcaggtgagcaaaccccctcaaggcctgccctggtggtgcatcctggtgggctggctcctggtagcggccaccagtggcgtggcggccttcttcaccatgctctacggcctgcactacgggagggccagctccctcaggtggctcatctccatggctgtctccttcgtggagagcatgttcgtcacccagcccctgaaggtgctgggattcgctgctttctttgcactggtcttgaagagagtggacgatgaggaggatactgtggccccgctgccaggacatctgttgggcccagacccctatgccttgttccgagcacgaagaaacagcagcagggatgtctaccagccacctctcaccgctgccattgagaagatgaaaaccacccacctcaaggaacagaaagcatttgccctcatcagagaaatcctggcatacttgggcttcctgtggatgctactgctcgtggcctacgggcagagggaccccagcgcctaccacctcaacagacacctccagcacagcttcaccaggggcttttcaggtgtgctcggcttccgagagttcttcaagtgggccaacaccaccctcgtgagtaacctgtatggtcaccccccaggctttatcactgatgggaactccaagctggttggcagtgcccagattcgtcaagtgagggtccaggaaagctcttgccctcttgcccagcagccgcaggcatatctcaacggatgccgtgcaccatattccctggatgctgaagacatggcagactatggggaaggctggaatgccaccaccctcagttggcagtaccagagccaggaccaacgtcaagggtatcccatctggggcaaactcactgtgtaccggggaggaggctacgtggtccccttggggactgatcgccaaagcacgtcaagaattctccgctatctctttgacaacacctggctggacgccctgaccagagctgtgtttgtggagtccactgtctacaacgccaacgtcaacctgttctgcattgtcacgctgacgctagagaccagcgctctgggcaccttttttacgcacgcggccctgcagagcctccgcctgtaccccttcaccgacggctggcaccccttcgtggtagcggcagagctcatctacttcctcttcctcctctactacatggtggtgcagggcaagcgcatgagtaaagagacgtggggctatttctgcagcaagtggaaccttctggagctggccatcatcctggccagctggagcgccctggcggtgtttgtgaagagggctgtcctggccgaaagggacctccagcgctgccggaaccacagggaggaaggcatcagcttcagtgagacagcagcagccgatgccgcccttggctacatcattgccttcctggtactcctgtccacagtgaagctttggcatctgctcaggttgaatcccaaaatgaacatgatcacggcagccctacgccgtgcctggggcgacatttcaggctttatgattgtcatccttaccatgctcctggcttactccatcgcgtcaaacttgatatttggttggaaactccgttcctacaaaaccctctttgatgcggcggagacgatggtcagccttcagctgggaatcttcaactacgaggaggtcctggactatagcccagtgcttggctccttcctcattggatcctgcattgtttttatgacatttgtggtgctgaacctgtttatctctgtcatcctggtggccttcagtgaggagcaaaaatactatcagctgtcggaggaaggggagatcgtagatttgctgctgatgaaaatactcagtttcctgggcattaagtctaagagagaggagcctggaagcagcagggagcagcctgggtctctgtcccagactcgccactctcgaccagcacaagctttgcccaaggactaagctgttcgtccacacgccaccatctaccagtggggacgcccagggcctcgggcgtacgcttaccagcgactctatagtctctctaggtcatagctttcatgtccattgaagaattaccaagcccagcaagtaaaaaaaattacaataacagagatatatgtaaaattgccaatactatgagagcttctttgttcaaatgtatttcctcttattataaataaaacaaatattacatggagtttgg

SEQ ID NO: 167279 - DNA, 5199 bp, Homo sapiens
  Payload ID: 12915
  Gene Symbol: PKD1L3
  Gene Name: polycystic kidney disease 1-like 3
  Uniprot ID: Q7Z443
  ENST ID: ENST00000620267
  CDS Start-End: 1-5199
atgttcttcaaaggaggaagctggctttggttatacatcagaacaagtattattctaggaagtgagctaaacagcccagcaccacatgggcaaaataattgttaccagcttaacagatttcaatgcagctttgaggaagcacagcattactgtcatgtgcagagaggattcctagctcatatttggaacaaggaagttcaagatctcatccgggactatctggaagaaggaaagaagtggtggattgggcaaaatgtaatgccattgaaaaagcatcaagacaacaaatacccagcagacgttgcagccaacgggcccccaaagcccctcagctgcacctacctgtccagaaacttcattcggatctcatccaaaggggacaagtgcttactgaaatactatttcatttgccagactggtgactttttggacggagatgcccattatgaaagaaatggaaataattcccatttgtaccagagacacaagaagacaaaaagaggagttgcaatagcaagagacaaaatgcccccaggacctggtcatcttccaaccacatgtcactatcctcttcctgctcatctttccaagaccctgtgtcatcccatcagccagtttccttcagtactatcaagtatcacatcacaggtaacatcagccgcatctgaacccagcagccagcctctccctgtgataacacagctcaccatgcccgtgtctgtcacgcatgctgggcaatctctggcagaaacaacttcaagcccaaaggaagaaggtcatccgaataccttcacctcttatctacaagtgtcattgcagaaggcatctggtcaggtcatagatgagatagcagggaacttcagcagagcagttcatggtttgcaagctcttaacaaactacaggaagcttgtgagttcctccagaaactaacagccttaaccccaagattttctaagccagctcaggttaatctcatcaattcccttatttacctgagtgaggagttactcaggatcccatttcagaacaacaacagtctgggcttcaaagttcctccaactgtctgcccctttcattccctcaacaatgtcaccaaagctggagaaggaagttggctggaatccaagcgtcatactgagccggtagaagacatcctggaaatgtccttggtggagtttgggaatatcggggaagcatttctagagcagaaccagtctcccgagtcttcagtgactttgacctctgccaatgctactctgctgctgagcagacaaaacatatcaactttaccgctgagctcttacactctgggtcacccagcccctgtgaggctaggctttccgtcggctttagctttgaaggagctcttgaataaacatccaggagttaatgtccaaataacaggactagctttcaatcccttcaaggatttggacaacagaaacattgttggaagcattggaagtgtgttactaagcgctaatcgtaaattgctccaagtccatgatttaatggaggacattgagatcatgctctggagaaatgttagcttggaaacccatcccaccagcctcaacatgagcacacatcagcttacaatcacagtgaacgtcacttccttggagaaatccttgatagtgagcatagatcctgacagtccccttttaatgacactctacctggggttccagtatcagcctaactgcactcacttccacctgaacatcacccttccaaaggataaggtgtggcaaaaagatgaggagtacacgtgggtgctgaatccagagcatctgcagcacgggattggcacctactatataacagctgtgctgagtgagaggcaggagggtgctcagcagacacccagcttggtctcggtcatcaccgccgtcactcagtgttactactgggagatccacaaccagacatggagcagcgccggatgccaagttgggccacagagcacaattctgaggacacagtgtctctgtaaccacctgaccttctttgccagcgacttctttgtcgtgcccaggaccgtgaatgttgaagacacgatcaaactgttccttcgcgtgaccaacaatcctgttggggtgtcactgctggccagccttttaggattttatgtgatcacagttgtgtgggctcggaaaaaggatcaagcagatatgcagaaggtgaaggtcactgtcctggctgataatgaccccagcgctcaatttcactaccttattcaggtctacaccggatatcgaagaagcgctgctacaacagctaaggttgtcatcaccctctatggatcagagggacggagtgagccccatcacctctgtgacccccagaagacagtctttgaacgagggggcctggatgtcttccttctcaccacttggacctctctagggaacctgcacagccttcggctctggcatgacaattctggcgtcagtccctcctggtatgtcagccaggtaattgtctgtgacatggcagttaagaggaagtggcatttcctgtgcaattgctggctggctgtggacctcggagactgtgagcttgaccgggtcttcatcccagtttcaaagagagagctcttttcctttagacatctgttttcctccatgattgtggaaaagttcacccaggattatctgtggctttcaattgcaactcggcatccctggaaccagtttacaagggtccaacggctgtcttgctgcatgacactgctactctgcaacatggtcatcaatgttatgttctggaagataaacagcaccactgccaagagagatgagcaaatgcgtccatttgctgtggcctggtctgaactgctggtcagcatccatactgctgtcatcctcttcccaatcaatcttgtcatagggcggctcttcccgttgattgagccacaggagactctgcccctctttcctcccatccaggcctcctgcctctcagatgcttctgttgagcctctctctgccacaatggtagttgaggaattaaaggaaactgtgagattcctgctcaggagaaatacatacctactctccaagtgtgagcagccgccatggagttcttgggacattactaagctggtgaaacttttatccagcctcgtatcatctcacttggagggtcaaggctgtcatcagcagggagagcgccactgggcacgtgttgttcctgaaaaccaccatcatttctgctgttacctgcatagagttctgcagaggctgaaatctcacttaggcacgctgggtctcacccagggtcaccagtcctgtgacttcctagatgcagccagccaacttcaaaaactccaggaactcttggaaacacatattcttcccacggagcaagagccatccagggaagtcaccagttttgccatcctgagctcagaagaaggaaaaaagcccatctcaaatggcctgtccaaatggttgacttcagtctgctggctcctcttaggtttcactagcctggcttcagccttttttacagcactttatagcttggaattgagcaaagaccaagccaccagctggatgatttcaattattttatcagtgcttcagaacatcttcatcagccagccagtaaaggtggtcttcttcacattcttatactcactgatgatgagcaggatgccacggcttaacaaagagaatgaacaacaaacaaagaggatcttggcactcttggcaaaatgttcttcgtcagtaccaggttcaagagataagaacaaccccgtctatgtagccccagctataaatagtccaactaagcacccagaaagaaccttgaaaaagaagaaactcttcaagctgactggagatattttggtacaaatcctcttccttaccctgttgatgactgcaatctactctgcaaagaactccaatagattttacctccaccaagctatctggaagacattttcgcaccagttctcggaaatcaaacttcttcaggatttctacccctgggccaatcatatccttcttcctagcctgtatggggattacagaggtaagaatgcagtcctggagcccagtcattgcaaatgtggggtacaattaattttccaaataccccgtaccaagacctatgagaaagtggacgaaggtcagctggcgttttgtgataacggccatacctgtgggcgtcccaagagcctattccctggacttcatctaaggaggttcagttacatctgttcacccaggcccatggtgctgattcccactgatgagcttcacgaaaggctgacaagcaagaatgagaatggattcagttacatcatgagaggtgctttcttcacctctttgagactggaaagcttcacttcccttcagatgtcaaagaagggctgtgtctggtctatcatctcacaagtcatctattatctactggtctgttactatgccttcatacagggttgtcagctgaaacagcagaagtggaggttcttcactgggaaaagaaacattctggacacaagtataatcctcattagcttcatcctcctggggcttgacatgaagagtatttctctacataagaaaaacatggcacgataccgcgatgaccaggacagattcatcagcttctatgaggcagtaaaagtgaactctgctgcgactcaccttgtgggcttcccggttctcctggcaactgttcagttatggaacctgctgcgtcatagccccaggctgcgggtcatcagcaggacactgagccgagcctgggacgaggtggtgggctttctgctgatcatcctaatcctgctgacaggctatgccattgcctttaacctgctgtttggatgcagcatctctgactaccggacatttttcagctcagcagtgactgttgttggtctcctgatgggaatttctcaccaagaggaggttttcgctttagacccagtcctgggcacctttctgatcctcaccagtgtcatcttgatggtacttgtggtaattaatcttttcgtttcggccattctcatggcctttggaaaagaaagaaagtcgcttaagaaagaagctgcactaatagatacactgctacagaagctctcaaatttgttaggaatcagttggccccaaaaaacctcatctgagcaagcagccacgacagcagtgggcagtgacactgaagttttagatgaactaccttaa

SEQ ID NO: 167280 - DNA, 5056 bp, Homo sapiens
  Payload ID: 12916
  Gene Symbol: PKD2
  Gene Name: polycystic kidney disease 2 (autosomal dominant)
  Uniprot ID: Q13563
  ENST ID: ENST00000237596
  CDS Start-End: 67-2973
ggctcctgaggcgcacagcgccgagcgcggcgccgcgcacccgcgcgccggacgccagtgaccgcgatggtgaactccagtcgcgtgcagcctcagcagcccggggacgccaagcggccgcccgcgccccgcgcgccggacccgggccggctgatggctggctgcgcggccgtgggcgccagcctcgccgccccgggcggcctctgcgagcagcggggcctggagatcgagatgcagcgcatccggcaggcggccgcgcgggaccccccggccggagccgcggcctccccttctcctccgctctcgtcgtgctcccggcaggcgtggagccgcgataaccccggcttcgaggccgaggaggaggaggaggaggtggaaggggaagaaggcggaatggtggtggagatggacgtagagtggcgcccgggcagccggaggtcggccgcctcctcggccgtgagctccgtgggcgcgcggagccgggggcttgggggctaccacggcgcgggccacccgagcgggaggcggcgccggcgagaggaccagggcccgccgtgccccagcccagtcggcggcggggacccgctgcatcgccacctccccctggaagggcagccgccccgagtggcctgggcggagaggctggttcgcgggctgcgaggtctctggggaacaagactcatggaggaaagcagcactaaccgagagaaataccttaaaagtgttttacgggaactggtcacatacctcctttttctcatagtcttgtgcatcttgacctacggcatgatgagctccaatgtgtactactacacccggatgatgtcacagctcttcctagacacccccgtgtccaaaacggagaaaactaactttaaaactctgtcttccatggaagacttctggaagttcacagaaggctccttattggatgggctgtactggaagatgcagcccagcaaccagactgaagctgacaaccgaagtttcatcttctatgagaacctgctgttaggggttccacgaatacggcaactccgagtcagaaatggatcctgctctatcccccaggacttgagagatgaaattaaagagtgctatgatgtctactctgtcagtagtgaagatagggctccctttgggccccgaaatggaaccgcttggatctacacaagtgaaaaagacttgaatggtagtagccactggggaatcattgcaacttatagtggagctggctattatctggatttgtcaagaacaagagaggaaacagctgcacaagttgctagcctcaagaaaaatgtctggctggaccgaggaaccagggcaacttttattgacttctcagtgtacaacgccaacattaacctgttctgtgtggtcaggttattggttgaattcccagcaacaggtggtgtgattccatcttggcaatttcagcctttaaagctgatccgatatgtcacaacttttgatttcttcctggcagcctgtgagattatcttttgtttctttatcttttactatgtggtggaagagatattggaaattcgcattcacaaactacactatttcaggagtttctggaattgtctggatgttgtgatcgttgtgctgtcagtggtagctataggaattaacatatacagaacatcaaatgtggaggtgctactacagtttctggaagatcaaaatactttccccaactttgagcatctggcatattggcagatacagttcaacaatatagctgctgtcacagtattttttgtctggattaagctcttcaaattcatcaattttaacaggaccatgagccagctctcgacaaccatgtctcgatgtgccaaagacctgtttggctttgctattatgttcttcattattttcctagcgtatgctcagttggcataccttgtctttggcactcaggtcgatgacttcagtactttccaagagtgtatcttcactcaattccgtatcattttgggcgatatcaactttgcagagattgaggaagctaatcgagttttgggaccaatttatttcactacatttgtgttctttatgttcttcattcttttgaatatgtttttggctatcatcaatgatacttactctgaagtgaaatctgacttggcacagcagaaagctgaaatggaactctcagatcttatcagaaagggctaccataaagctttggtcaaactaaaactgaaaaaaaataccgtggatgacatttcagagagtctgcggcaaggaggaggcaagttaaactttgacgaacttcgacaagatctcaaagggaagggccatactgatgcagagattgaggcaatattcacaaagtacgaccaagatggagaccaagaactgaccgaacatgaacatcagcagatgagagacgacttggagaaagagagggaggacctggatttggatcacagttctttaccacgtcccatgagcagccgaagtttccctcgaagcctggatgactctgaggaggatgacgatgaagatagcggacatagctccagaaggaggggaagcatttctagtggcgtttcttacgaagagtttcaagtcctggtgagacgagtggaccggatggagcattccatcggcagcatagtgtccaagattgacgccgtgatcgtgaagctagagattatggagcgagccaaactgaagaggagggaggtgctgggaaggctgttggatggggtggccgaggatgaaaggctgggtcgtgacagtgaaatccatagggaacagatggaacggctagtacgtgaagagttggaacgctgggaatccgatgatgcagcttcccagatcagtcatggtttaggcacgccagtgggactaaatggtcaacctcgccccagaagctcccgcccatcttcctcccaatctacagaaggcatggaaggtgcaggtggaaatgggagttctaatgtccacgtatgatatgtgtgtttcagtatgtgtgtttctaataagtgaggaagtggctgtcctgaattgctgtaacaagcacactatttatatgccctgaccaccataggatgctagtctttgtgaccgattgctaatcttctgcactttaatttattttatataaactttacccatggttcaaagatttttttttctttttctcatataagaaatctaggtgtaaatattgagtacagaaaaaaaatcttcatgatgtgtattgagcggtacgcccagttgccaccatgactgagtcttctcagttgacaatgaagtagccttttaaagctagaaaactgtcaaagggcttctgagtttcatttccagtcacaaaaatcagtattgttatttttttccaagagtgtgaaggaaaatggggcattcctttccactctggcatagttcatgagcttaatacatagctttcttttaagaaaggagccttttttttcaactagcttcctggggtaaacttttctaaaagataaaatggaaaggaactccaaactatgatagaatctgtgtgaatggttaagatgaatgttaaatactatgcttttttgtaagttgatcgtatctgatgtctgtgggactaactgtatcacttaatttttaccttattttggctctaatttgaataagctgagtaaaaccaccaaagatcagttataggataaaatggcatctctaaccataacacaggagaattggaaggagccctaagttgtcactcagtttaatttcttttaatggttagtttagcctaaagatttatctgcatattctttttcccatgtggctctactcatttgcaactgaatttaatgttataactcatctagtgagaccaacttactaaatttttagtatgcactgaaagtttttatccaacaattatgttcattttaagcaaaattttaagaaagttttgaaattcataaagcatttggttttaaactattttaagaatatagtactcggtcaggtatgacggctcacgcctgtaatcccagcactttgggaggccgaaacaggcgaatcacttgagcccaggagttcaagaccaacatgggcaatgtggcgaaactccatctctacaaaaaatgcaaaaataaaaaatatagtactcaagtattcttgatcctgtgtttcaaaactagaatttgtaatgcaaatggagctcagtctaataaaaaagaggttttggtattaaaagttcatacattagacagtatcagccaaaatttgagttagcaacactgttttctttacgagagggtctcacccaaatttatggggagaaatctatttctcaaaaaaaaaaatcttcttttacagaaatgttgagtaaggtgacattttgagcgctaataagcaaaagagcatgcagtgctgttgaataaccctcacttggagaaccaagagaatcctgtcgtttaatgctatattttaatttcacaagttgttcatttaactggtagaatgtcagtccaatctccaatgagaacatgagcaaatagacctttccaggttgaaagtgaaacatactgggtttctgtaagtttttcctcatggcttcatctctatctttactttctcttgaatatgctacacaaagttctttattactacatactaaagtttgcattccagggatattgactgtacatatttatgtatatgtaccatgttgttacatgtaaacaaacttcaatttgaagtgcagctattatgtggtatccatgtgtatcgaccatgtgccatatatcaattatggtcactagaaagtctctttatgatactttttattgtactgtttttcatttcacttgcaaaattttgcagaattcctcctttctacccataaattacatatatttttcttctttagtcatggagaactccccccctcatctcttccctattatctttccctgtgtactggtattattaaaaagacattacatacgcaagtctttctcgacaatcaagaatgttattaatgtgtaatactgagcactttacttcttaataaaaacttgatatagtagca

SEQ ID NO: 167281 - DNA, 1222 bp, Homo sapiens
  Payload ID: 12916
  Gene Symbol: PKD2
  Gene Name: polycystic kidney disease 2 (autosomal dominant)
  ENST ID: ENST00000502363
  CDS Start-End: 51-1211
atgtcttctctctcttacagctcttcaaattcatcaattttaacaggaccatgagccagctctcgacaaccatgtctcgatgtgccaaagacctgtttggctttgctattatgttcttcattattttcctagcgtatgctcagttggcataccttgtctttggcactcaggtcgatgacttcagtactttccaagagtgtatcttcactcaattccgtatcattttgggcgatatcaactttgcagagattgaggaagctaatcgagttttgggaccaatttatttcactacatttgtgttctttatgttcttcattcttttgaatatgtttttggctatcatcaatgatacttactctgaagtgaaatctgacttggcacagcagaaagctgaaatggaactctcagatcttatcagaaagggctaccataaagctttggtcaaactaaaactgaaaaaaaataccgtggatgacatttcagagagtctgcggcaaggaggaggcaagttaaactttgacgaacttcgacaagatctcaaagggaagggccatactgatgcagagattgaggcaatattcacaaagtacgaccaagatggagaccaagaactgaccgaacatgaacatcagcagatgagagacgacttggagaaagagagggaggacctggatttggatcacagttctttaccacgtcccatgagcagccgaagtttccctcgaagcctggatgactctgaggaggatgacgatgaagatagcggacatagctccagaaggaggggaagcatttctagtggcgtttcttacgaagagtttcaagtcctggtgagacgagtggaccggatggagcattccatcggcagcatagtgtccaagattgacgccgtgatcgtgaagctagagattatggagcgagccaaactgaagaggagggaggtgctgggaaggctgttggatggggtggccgaggatgaaaggctgggtcgtgacagtgaaatccatagggaacagatggaacggctagtacgtgaagagttggaacgctgggaatccgatgatgcagcttcccagatcagtcatggtttaggcacgccagtgggactaaatggtcaacctcgccccagaagctcccgcccatcttcctcccaatctacagaaggcatggaaggtgcaggtggaaatgggagttctaatgtccacgtatgatatgtgtgttt

SEQ ID NO: 167282 - DNA, 1720 bp, Homo sapiens
  Payload ID: 12916
  Gene Symbol: PKD2
  Gene Name: polycystic kidney disease 2 (autosomal dominant)
  ENST ID: ENST00000508588
  CDS Start-End: 396-1556
aatggtagtagccactggggaatcattgcaacttatagtggagctggctattatctggatttgtcaagaacaagagaggaaacagctgcacaagttgctagcctcaagaaaaatgtctggctggaccgaggaaccagggcaacttttattgacttctcagtgtacaacgccaacattaacctgttctgtgtggtcagctgtcagtggtagctataggaattaacatatacagaacatcaaatgtggaggtgctactacagtttctggaagatcaaaatactttccccaactttgagcatctggcatattggcagatacagttcaacaatatagctgctgtcacagtattttttgtctggattaagctcttcaaattcatcaattttaacaggaccatgagccagctctcgacaaccatgtctcgatgtgccaaagacctgtttggctttgctattatgttcttcattattttcctagcgtatgctcagttggcataccttgtctttggcactcaggtcgatgacttcagtactttccaagagtgtatcttcactcaattccgtatcattttgggcgatatcaactttgcagagattgaggaagctaatcgagttttgggaccaatttatttcactacatttgtgttctttatgttcttcattcttttgaatatgtttttggctatcatcaatgatacttactctgaagtgaaatctgacttggcacagcagaaagctgaaatggaactctcagatcttatcagaaagggctaccataaagctttggtcaaactaaaactgaaaaaaaataccgtggatgacatttcagagagtctgcggcaaggaggaggcaagttaaactttgacgaacttcgacaagatctcaaagggaagggccatactgatgcagagattgaggcaatattcacaaagtacgaccaagatggagaccaagaactgaccgaacatgaacatcagcagatgagagacgacttggagaaagagagggaggacctggatttggatcacagttctttaccacgtcccatgagcagccgaagtttccctcgaagcctggatgactctgaggaggatgacgatgaagatagcggacatagctccagaaggaggggaagcatttctagtggcgtttcttacgaagagtttcaagtcctggtgagacgagtggaccggatggagcattccatcggcagcatagtgtccaagattgacgccgtgatcgtgaagctagagattatggagcgagccaaactgaagaggagggaggtgctgggaaggctgttggatggggtggccgaggatgaaaggctgggtcgtgacagtgaaatccatagggaacagatggaacggctagtacgtgaagagttggaacgctgggaatccgatgatgcagcttcccagatcagtcatggtttaggcacgccagtgggactaaatggtcaacctcgccccagaagctcccgcccatcttcctcccaatctacagaaggcatggaaggtgcaggtggaaatgggagttctaatgtccacgtatgatatgtgtgtttcagtatgtgtgtttctaataagtgaggaagtggctgtcctgaattgctgtaacaagcacactatttatatgccctgaccaccataggatgctagtctttgtgaccgattgctaatcttctgcactttaatttattttatataaactttaccca

SEQ ID NO: 167283 - DNA, 3043 bp, Homo sapiens
  Payload ID: 12917
  Gene Symbol: PKD2L1
  Gene Name: polycystic kidney disease 2-like 1
  Uniprot ID: Q9P0L9
  ENST ID: ENST00000318222
  CDS Start-End: 384-2801
cagcatcgccttttcctcccgtttctccttccactcccagctccacatcctcctcctattctcccctctcccctcttcaaacccccaccttccagttccctcacctcccctttcggctggtcccctggggcttgcagcaagagggagagagagctcctgacaggattgatggtccttccccaccctgtcctctcatccgctccctccccagcaggcacagacatccccctacaaaaggcaggagcccaggctgtgtggaaacagctgctctcagacgcctttccatttgctctctgctggctaggctgggctgtgcctctgctccctcttcctctagctgagagtgggcacctggggtaccgggcccccccacctcattccccatgaatgctgtgggaagtcctgaggggcaggagctgcaaaagctggggagtggagcctgggacaaccccgcctacagtggtcccccttccccacacgggacgctgagagtctgcaccatctccagcacggggcctctccagccccaacccaagaagcctgaagatgaaccccaggagacggcatacaggacccaggtgtccagctgctgcctccatatctgtcaaggcatcagaggactttggggaacaaccctgactgagaacacagctgagaaccgggaactttatatcaagaccaccctgagggagctgttggtatatattgtgttcctggtggacatctgtctactgacctatggaatgacaagctccagtgcttattactacaccaaagtgatgtctgagctcttcttacatactccatcagacactggagtctcctttcaggccatcagcagcatggcggacttctgggattttgcccagggcccactactggacagtttgtattggaccaaatggtacaacaaccagagcctgggccatggctcccactccttcatctactatgagaacatgctgctgggggttccgaggctgcggcagctaaaggtccgcaatgactcctgtgtggtgcatgaagacttccgggaggacattctgagctgctatgatgtctactctccagacaaagaagaacaactcccctttgggcccttcaatggcacagcgtggacataccactcgcaggatgagttggggggcttctcccactggggcaggctcacaagctacagcggaggtggctactacctggaccttccaggatcccgacagggtagtgcagaggctctccgggcccttcaggaggggctgtggctggacaggggcactcgagtggtgttcatcgacttctcagtctacaatgccaatatcaatcttttctgtgtcctgaggctggtggtggagtttccagctacaggaggtgccatcccatcctggcaaatccgcacagtcaagctgatccgctatgtcagcaactgggacttctttatcgttggctgtgaggtcatcttctgcgtcttcatcttctactatgtggtggaagagatcctggagctccacattcaccggcttcgctacctcagcagcatctggaacatactggacctggtggtcatcttgctctccattgtggctgtgggcttccacatattccgaaccctcgaggtgaatcggctcatggggaagctcctgcagcagccaaacacgtatgcagactttgagttcctcgccttctggcagacacagtacaacaacatgaatgctgtcaacctcttcttcgcctggatcaagatattcaagtacatcagcttcaacaaaaccatgacccagctctcctccacgctggcccgctgtgccaaggacatcctgggcttcgccgtcatgttcttcattgttttcttcgcctatgcccaactcggctacctgcttttcgggacccaagtggaaaactttagcactttcatcaagtgcattttcactcagttccggataatcctcggggactttgactacaatgctatcgacaatgccaaccgcatcctgggccctgcctactttgtcacctatgtcttcttcgtcttcttcgtgctcctgaacatgttcctggccatcatcaatgacacatattcagaggtcaaggaggagctggctggacagaaggatgagctgcaactttctgacctcctgaaacagggctacaacaagaccctactaagactgcgtctgaggaaggagagggtttcggatgtgcagaaggtcctgcagggtggggagcaggagatccagtttgaggatttcaccaacaccttaagggaactgggacacgcagagcatgaaatcactgagctcacggccaccttcaccaagtttgacagagatgggaatcgtattctggatgagaaggaacaggaaaaaatgcgacaggacctggaggaagagagggtggccctcaacactgagattgagaaactaggccgatctattgtgagcagcccacaaggcaaatcgggtccagaggctgccagagcaggaggctgggtttcaggagaagaattctacatgctcacaaggagagttctgcagctggagactgtcctggaaggagtagtgtcccagattgatgctgtaggctcaaagctgaaaatgctggagaggaaggggtggctggctccctccccaggcgtgaaggaacaagctatttggaagcacccgcagccagccccagctgtgaccccagacccctggggagtccagggtgggcaggagagtgaggttccctataaaagagaagaggaagccttagaggagaggagactctcccgtggtgagattccaacgttgcagaggagttaagtgtgaggcactcccggagcaaagtctatgaaggatcttctgcaagaggctgcctcctggtccactgaacctggaaactgagtgggctttaaccaggagataaaaatggagcctgaagggaatcaggcaaggaaatgaactcaggattcagagatctttgaattaatatgtggtgggttctgacattattcttccataagaccatgtgggtttccatggtggctatcaataaaactccttag

SEQ ID NO: 167284 - DNA, 423 bp, Homo sapiens
  Payload ID: 12917
  Gene Symbol: PKD2L1
  Gene Name: polycystic kidney disease 2-like 1
  ENST ID: ENST00000465680
  CDS Start-End: 1-187
gcctctccagccccaacccaagaagcctgaagatgaaccccaggagacggcatacaggacccaggtgtccagctgctgcctccatatctgtcaaggcatcagagaggttccctataaaagagaagaggaagccttagaggagaggagactctcccgtggtgagattccaacgttgcagaggagttaagtgtgaggcactcccggagcaaagtctatgaaggatcttctgcaagaggctgcctcctggtccactgaacctggaaactgagtgggctttaaccaggagataaaaatggagcctgaagggaatcaggcaaggaaatgaactcaggattcagagatctttgaattaatatgtggtgggttctgacattattcttccataagaccatgtgggtttccatggtggctatcaataaaact

SEQ ID NO: 167285 - DNA, 554 bp, Homo sapiens
  Payload ID: 12917
  Gene Symbol: PKD2L1
  Gene Name: polycystic kidney disease 2-like 1
  ENST ID: ENST00000532547
  CDS Start-End: 162-377
atccccctacaaaaggcaggagcccaggctgtgtggaaacagctgctctcagacgcctttccatttgctctctgctggctaggctgggctgtgcctctgctccctcttcctctagctgagagtgggcacctggggtaccgggcccccccacctcattccccatgaatgctgtgggaagtcctgaggggcaggagctgcaaaagctggggagtggagcctgggacaaccccgcctacagtggtcccccttccccacacgggacgctgagagtctgcaccatctccagcacggggcctctccagccccaacccaagaagcctgaagatgaaccccaggagacggcatacaggacccaggactttggggaacaaccctgactgagaacacagctgagaaccgggaactttatatcaagaccaccctgagggagctgttggtatatattgtgttcctggtggacatctgtctactgacctatggaatgacaagctccagtgcttattactacaccaaagtgatgtctgagctcttcttacatactccatcagacactg

SEQ ID NO: 167286 - DNA, 2277 bp, Homo sapiens
  Payload ID: 12917
  Gene Symbol: PKD2L1
  Gene Name: polycystic kidney disease 2-like 1
  ENST ID: ENST00000528248
  CDS Start-End: 1-119
atgaaccccaggagacggcatacaggacccaggtgtccagctgctgcctccatatctgtcaaggcatcagaggcatctctcccatgccccttaggactttggggaacaaccctgactgagaacacagctgagaaccgggaactttatatcaagaccaccctgagggagctgttggtatatattgtgttcctggtggacatctgtctactgacctatggaatgacaagctccagtgcttattactacaccaaagtgatgtctgagctcttcttacatactccatcagacactggagtctcctttcaggccatcagcagcatggcggacttctgggattttgcccagggcccactactggacagtttgtattggaccaaatggtacaacaaccagagcctgggccatggctcccactccttcatctactatgagaacatgctgctgggggttccgaggctgcggcagctaaaggtccgcaatgactcctgtgtggtgcatgaagacttccgggaggacattctgagctgctatgatgtctactctccagacaaagaagaacaactcccctttgggcccttcaatggcacagcgtggacataccactcgcaggatgagttggggggcttctcccactggggcaggctcacaagctacagcggaggtggctactacctggaccttccaggatcccgacagggtagtgcagaggctctccgggcccttcaggaggggctgtggctggacaggggcactcgagtggtgttcatcgacttctcagtctacaatgccaatatcaatcttttctgtgtcctgaggctggtggtggagtttccagctacaggaggtgccatcccatcctggcaaatccgcacagtcaagctgatccgctatgtcagcaactgggacttctttatcgttggctgtgaggtcatcttctgcgtcttcatcttctactatgtggtggaagagatcctggagctccacattcaccggcttcgctacctcagcagcatctggaacatactggacctggtggtcatcttgctctccattgtggctgtgggcttccacatattccgaaccctcgaggtgaatcggctcatggggaagctcctgcagcagccaaacacgtatgcagactttgagttcctcgccttctggcagacacagtacaacaacatgaatgctgtcaacctcttcttcgcctggatcaagatattcaagtacatcagcttcaacaaaaccatgacccagctctcctccacgctggcccgctgtgccaaggacatcctgggcttcgccgtcatgttcttcattgttttcttcgcctatgcccaactcggctacctgcttttcgggacccaagtggaaaactttagcactttcatcaagtgcattttcactcagttccggataatcctcggggactttgactacaatgctatcgacaatgccaaccgcatcctgggccctgcctactttgtcacctatgtcttcttcgtcttcttcgtgctcctgaacatgttcctggccatcatcaatgacacatattcagaggtcaaggaggagctggctggacagaaggatgagctgcaactttctgacctcctgaaacagggctacaacaagaccctactaagactgcgtctgaggaaggagagggtttcggatgtgcagaaggtcctgcagggtggggagcaggagatccagtttgaggatttcaccaacaccttaagggaactgggacacgcagagcatgaaatcactgagctcacggccaccttcaccaagtttgacagagatgggaatcgtattctggatgagaaggaacaggaaaaaatgcgacaggacctggaggaagagagggtggccctcaacactgagattgagaaactaggccgatctattgtgagcagcccacaaggcaaatcgggtccagaggctgccagagcaggaggctgggtttcaggagaagaattctacatgctcacaaggagagttctgcagctggagactgtcctggaaggagtagtgtcccagattgatgctgtaggctcaaagctgaaaatgctggagaggaaggggtggctggctccctccccaggcgtgaaggaacaagctatttggaagcacccgcagccagccccagctgtgaccccagacccctggggagtccagggtgggcaggagagtgaggttccctataaaagagaagaggaagccttagaggagaggagactctcccgtggtgagattccaacgttgcagaggagttaa

SEQ ID NO: 167287 - DNA, 2202 bp, Homo sapiens
  Payload ID: 12918
  Gene Symbol: PKD2L2
  Gene Name: polycystic kidney disease 2-like 2
  Uniprot ID: Q9NZM6
  ENST ID: ENST00000290431
  CDS Start-End: 24-1865
gggcggtgtagtgcaggtccgccatggctgaggcgtcacggtggcaccgaggcggggcttcgaaacataagttgcattacagaaaggaagtagaaattacaaccacacttcaggaattgttactctactttatttttttaataaacctatgtatattgacttttgggatggtaaacccacatatgtattacttaaacaaggttatgtcatctctatttttggacacttctgtgcctggtgaagaaagaaccaactttaagtccattcgcagcataactgatttttggaagtttatggaaggaccccttttggaaggtctgtactgggattcatggtacaataaccagcagctgtataatttaaagaacagcagtcgcatctactatgaaaatatacttctaggagttcccagagttcgtcaactaaaagtccgcaacaacacatgcaaagtctattcatcttttcagtctttgatgagtgaatgttatggcaaatatacttctgcaaatgaagacctctctaattttggccttcaaattaatactgaatggagatattctacttctaataccaactccccttggcactggggatttcttggtgtttaccgaaatgggggatacattttcactttatcaaaatcgaaatctgaaaccaaaaacaagttcattgaccttcgactgaacagctggatcacaagagggactagagttatttttattgatttttccttatataatgctaatgtaaatctattttgtattatcagattggtggcagaattccctgcaactggaggaatacttacttcatggcagttttactctgtgaagctcctcagatatgttagctactatgactattttattgcttcctgtgaaatcacattctgtatttttctttttgtcttcacaacacaagaagtcaaaaaaataaaagaatttaagtctgcctatttcaaaagtatttggaactggctagaattgctacttttgctgttgtgttttgtggctgtttccttcaacacatactataatgtacaaatttttctcttacttggacagctgttgaaaagtactgaaaaatattcagatttctattttcttgcatgctggcacatttattacaataatataattgctattaccatcttttttgcatggataaagatattcaaattcataagctttaacaagacaatgtctcagctgtcatcaaccttgtcccgttgtgttaaagacatagtaggatttgccatcatgttttttataatattctttgcttatgcccagttaggatttcttgtttttggatcacaagttgatgacttttccacttttcagaattccatatttgcacaatttcgaattgttcttggagattttaattttgctggtattcagcaagccaatcctatcttgggacccatttacttcatcactttcatcttttttgtgttctttgtcctgctgaatatgttcttggcaattattaatgatacctattctgaagtgaaagctgactattcaataggcagaaggctagattttgaacttggcaaaatgattaaacagagttacaaaaatgttctcgagaaattcagactgaagaaagctcaaaaagatgaagacaagaaaaccaaaggcagcggagatttggctgaacaagccagaagagaaggctttgacgaaaatgagattcaaaacgcagagcagatgaaaaaatggaaagagaggcttgagaaaaagtattattctatggaaattcaagatgactaccagcctgtcactcaagaagaatttcgagatggcaccacaaccaagtacaaaatgagattctctgagtgcctgacaaaacgaatttaagtaccagccaagtacacacgatgatagcttcaaggaatacaactgactttatgatatgaattttcaaggaacgtatcttatatggattttgaagaatcttgtttgcttataagaacttcaagaagcctaagcttggctttaattttcttgtactctctgtactcctcaagcactggaacacgatcctctttctgggcattcctaggggagaaaataaaatttgtaatgttctagagatcatttggaaaaaaagatccaaaagttgtcttaatatgagacatactgttactaaacataagttcaaataaaaagttgttctgttaaaaaaaaaaaaaaa

SEQ ID NO: 167288 - DNA, 930 bp, Homo sapiens
  Payload ID: 12918
  Gene Symbol: PKD2L2
  Gene Name: polycystic kidney disease 2-like 2
  Uniprot ID: Q9NZM6
  ENST ID: ENST00000414094
  CDS Start-End: 35-208
ggcgaacgaacgggcggtgtagtgcaggtccgccatggctgaggcgtcacggtggcaccgaggcggggcttcgaaacataagttgcattacagaaaggaagtagaaattacaaccacacttcaggaattgttactctactttatttttttaataaacctatgtatatgttatgtcatctctatttttggacacttctgtgcctggtgaagaaagaaccaactttaagtccattcgcagcataactgatttttggaagtttatggaaggaccccttttggaaggtctgtactgggattcatggtacaataaccagcagctgtataatttaaagaacagcagtcgcatctactatgaaaatatacttctaggagttcccagagttcgtcaactaaaagtccgcaacaacacatgcaaagtctattcatcttttcagtctttgatgagtgaatgttatggcaaatatacttctgcaaatgaagacctctctaattttggccttcaaattaatactgaatggagatattctacttctaataccaactccccttggcactggggatttcttggtgtttaccgaaatgggggatacattttcactttatcaaaatcgaaatctgaaaccaaaaacaagttcattgaccttcgactgaacagctggatcacaagagggactagagttatttttattgatttttccttatataatgctaatgtaaatctattttgtattatcagattggtggcagaattccctgcaactggaggaatacttacttcatggcagttttactctgtgaagctcctcagatatgttagctactatgactattttattgcttcctgtgaaatcacattctgtatttttctttttgtcttcacaacacaagaagtcaaaaaaataaaagaatttaagtctgcctatttcaaaa

SEQ ID NO: 167289 - DNA, 2333 bp, Homo sapiens
  Payload ID: 12918
  Gene Symbol: PKD2L2
  Gene Name: polycystic kidney disease 2-like 2
  Uniprot ID: Q9NZM6
  ENST ID: ENST00000508638
  CDS Start-End: 56-1627
cgcgcaagcgccgcggcctcaggcgaacgaacgggcggtgtagtgcaggtccgccatggctgaggcgtcacggtggcaccgaggcggggcttcgaaacataagttgcattacagaaaggaagtagaaattacaaccacacttcaggaattgttactctactttatttttttaataaacctatgtatattgacttttgggatggtaaacccacatatgtattacttaaacaaggttatgtcatctctatttttggacacttctgtgcctggtgaagaaagaaccaactttaagtccattcgcagcataactgatttttggaagtttatggaaggaccccttttggaaggtctgtactgggattcatggtacaataaccagcagctgtataatttaaagaacagcagtcgcatctactatgaaaatatacttctaggagttcccagagttcgtcaactaaaagtccgcaacaacacatgcaaagtctattcatcttttcagtctttgatgagtgaatgttatggcaaatatacttctgcaaatgaagacctctctaattttggccttcaaattaatactgaatggagatattctacttctaataccaactccccttggcactggggatttcttggtgtttaccgaaatgggggatacattttcactttatcaaaatcgaaatctgaaaccaaaaacaagttcattgaccttcgactgaacagctggatcacaagagggactagagttatttttattgatttttccttatataatgctaatgtaaatctattttgtattatcagattggtggcagaattccctgcaactggaggaatacttacttcatggcagttttactctgtgaagctcctcagatatgttagctactatgactattttattgcttcctgtgaaatcacattctgtatttttctttttgtcttcacaacacaagaagtcaaaaaaataaaagaatttaagtctgcctatttcaaaagtatttggaactggctagaattgctacttttgctgttgtgttttgtggctgtttccttcaacacatactataatgtacaaatttttctcttacttggacagctgttgaaaagtactgaaaaatattcagatttctattttcttgcatgctggcacatttattacaataatataattgctattaccatcttttttgcatggataaagaatatgttcttggcaattattaatgatacctattctgaagtgaaagctgactattcaataggcagaaggctagattttgaacttggcaaaatgattaaacagagttacaaaaatgttctcgagaaattcagactgaagaaagctcaaaaagatgaagacaagaaaaccaaaggcagcggagatttggctgaacaagccagaagagaaggctttgacgaaaatgagattcaaaacgcagagcagatgaaaaaatggaaagagaggcttgagaaaaagtattattctatggaaattcaagatgactaccagcctgtcactcaagaagaatttcgagaactttttttatatgctgtggagctggagaaggaattacactacatcaatttgaagctaaatcaagtggtgagaaaggtttcagctctatagtattgagacaagtggagtcattctgtaagaaaaaggcaacagaagaattcagtatgaagattttcctccaattttcttcagtaatgagaaacaaaaagttggtaataacaaaaagcttgcatttccaaagttcttgaagttgaaaggataaaattccagtcttttgctaaaaggatgtatctgtagtacaaaacaatgaagtaaaccatatgtttgctaaaggtggagaggacagtctgtggttaatatggaacatcacttacgctcccttgagagggcctacttactctcccatcatttgttttgtttagtggcaccacaaccaagtacaaaatgagattctctgagtgcctgacaaaacgaatttaagtaccagccaagtacacacgatgatagcttcaaggaatacaactgactttatgatatgaattttcaaggaacgtatcttatatggattttgaagaatcttgtttgcttataagaacttcaagaagcctaagcttggctttaattttcttgtactctctgtactcctcaagcactggaacacgatcctctttctgggcattcctaggggagaaaataaaatttgtaatgttctagagatcatttggaaaaaaagatccaaaagttgtcttaatatgagacatactgttactaaacataagttcaaataaaaagttgttctgttaaaaaaaaaaaaaaa

SEQ ID NO: 167290 - DNA, 830 bp, Homo sapiens
  Payload ID: 12918
  Gene Symbol: PKD2L2
  Gene Name: polycystic kidney disease 2-like 2
  ENST ID: ENST00000511176
  CDS Start-End: 579-830
agactggcgagaagacatcatgatataaaatctgttagtggccgggcgcagtggctcaagcctgtaatcccaacactttgggaggccgaggcgggcggatcacaaggtcaagagatcgagaccatcctggccaacatggtgaaaccccatctctactaaaaatacgaaaattagctgggtgtggtggcgcgcgcctgtagtcccagctactcgggaggctgaggcaggagaatcgcttgaaccggggaggcggaggctgcagtgagacgagatcgcgtcactgaactccagcctggcgacagagctagactccgtctcaaaaaaaaaatctgttattaatagtatatagtaaaaaaattatccctgcctcgtaaaactaagaattgaaaaatagccagaagctattggagctttcctccccgcagtgggcttcgaaacataagttgcattacagaaaggaagtagaaattacaaccacacttcaggaattgttactctactttatttttttaataaacctatgtatataaagaaccaactttaagtccattcgcagcataactgatttttggaagtttatggaaggaccccttttggaaggtctgtactgggattcatggtacaataaccagcagctgtataatttaaagaacagcagtcgcatctactatgaaaatatacttctaggagttcccagagttcgtcaactaaaagtccgcaacaacacatgcaaagtctattcatcttttcagtctttgatgagtgaatgttatggcaaatatacttctgcaaatgaagacctctctaattttggccttcaaattaatact

SEQ ID NO: 167291 - DNA, 2282 bp, Homo sapiens
  Payload ID: 12918
  Gene Symbol: PKD2L2
  Gene Name: polycystic kidney disease 2-like 2
  Uniprot ID: Q9NZM6
  ENST ID: ENST00000508883
  CDS Start-End: 27-1901
aacgggcggtgtagtgcaggtccgccatggctgaggcgtcacggtggcaccgaggcggggcttcgaaacataagttgcattacagaaaggaagtagaaattacaaccacacttcaggaattgttactctactttatttttttaataaacctatgtatattgacttttgggatggtaaacccacatatgtattacttaaacaaggttatgtcatctctatttttggacacttctgtgcctggtgaagaaagaaccaactttaagtccattcgcagcataactgatttttggaagtttatggaaggaccccttttggaaggtctgtactgggattcatggtacaataaccagcagctgtataatttaaagaacagcagtcgcatctactatgaaaatatacttctaggagttcccagagttcgtcaactaaaagtccgcaacaacacatgcaaagtctattcatcttttcagtctttgatgagtgaatgttatggcaaatatacttctgcaaatgaagacctctctaattttggccttcaaattaatactgaatggagatattctacttctaataccaactccccttggcactggggatttcttggtgtttaccgaaatgggggatacattttcactttatcaaaatcgaaatctgaaaccaaaaacaagttcattgaccttcgactgaacagctggatcacaagagggactagagttatttttattgatttttccttatataatgctaatgtaaatctattttgtattatcagattggtggcagaattccctgcaactggaggaatacttacttcatggcagttttactctgtgaagctcctcagatatgttagctactatgactattttattgcttcctgtgaaatcacattctgtatttttctttttgtcttcacaacacaagaagtcaaaaaaataaaagaatttaagtctgcctatttcaaaagtatttggaactggctagaattgctacttttgctgttgtgttttgtggctgtttccttcaacacatactataatgtacaaatttttctcttacttggacagctgttgaaaagtactgaaaaatattcagatttctattttcttgcatgctggcacatttattacaataatataattgctattaccatcttttttgcatggataaagatattcaaattcataagctttaacaagacaatgtctcagctgtcatcaaccttgtcccgttgtgttaaagacatagtaggatttgccatcatgttttttataatattctttgcttatgcccagttaggatttcttgtttttggatcacaagttgatgacttttccacttttcagaattccatatttgcacaatttcgaattgttcttggagattttaattttgctggtattcagcaagccaatcctatcttgggacccatttacttcatcactttcatcttttttgtgttctttgtcctgctgaatatgttcttggcaattattaatgatacctattctgaagtgaaagctgactattcaataggcagaaggctagattttgaacttggcaaaatgattaaacagagttacaaaaatgttctcgagaaattcagactgaagaaagctcaaaaagatgaagacaagaaaaccaaaggcagcggagatttggctgaacaagccagaagagaaggctttgacgaaaatgagattcaaaacgcagagcagatgaaaaaatggaaagagaggcttgagaaaaagtattattctatggaaattcaagatgactaccagcctgtcactcaagaagaatttcgagaactttttttatatgctgtggagctggagaaggaattacactacatcaatttgaagctaaatcaagtggtgagaaaggtttcagctctatagtattgagacaagtggagagacagagtctcactctgtcgcccaggctggaacagcggtgcgacagtggcctcaacatcctccaaacagagaatcaagtgatcctcttgcctcagcctcccaagtatctgggactacacgcgaacaccaccacccctggctaatttaaacaaaatttttatacagtctgggtcccactatattgcccaggctggtcttgaactcctggcctcaagggatcctcctgcctcagcttcaaaaactgctgggattataggcatgagccactgtgcctggctagatttttttttaatttttgaaatacagtaatgttttatttaaaaatgggaatgacaataaatatttgcaaatcacacttgaaaa

SEQ ID NO: 167292 - DNA, 1927 bp, Homo sapiens
  Payload ID: 12918
  Gene Symbol: PKD2L2
  Gene Name: polycystic kidney disease 2-like 2
  ENST ID: ENST00000503015
  CDS Start-End: 1380-1927
acagctcagccaattcctctagaaactaagctagacttgccatggtttgcacttcaaaggcaatcacaagaacttaaatcatgactgaatctactgaatttgtgattttgttttaaccaaacaggtttctaattcttcaggatttttcagtctgttatgctcaaaggaataagaatagtctctagagattacctgcttaattctcatagttaatgtaaatttgacagcccggtagtcccagctgctgggagaggttgagctggggatcccttaagatcaggagtttgaggccagactgggaaatatagcgagactccatctctaaaaaaaaaaaaattatgtaaatttgattacctatatatgggtgtttttcctctaataatttcaatttcagataatctgttactttagaaagcataattttgtgaacagctgagagtcccagtacaggaaagcccaaatccttttgttaaaactattctaaagctttttttcctctcgggcttctagttcactggctgtcagccttttgcgaggcctctcctgttcctctcatcgatggtagtttttgaccctcactactgtgtggccgttttgctttttatctacacataaaacagcatttatcgacagcagtctacatctctttcagggaaataacaaaagtggctttatcttttactttcaaaactggttagtggttttctttgcaggtttccctggggcctttggactggattccattttattttcctttttatcaacacgagaatccgtcctggtcttacatcctggagggcttttggctgccttaatttacagccaaattagtttggccttttctatagctggtttaccaaccttctcatctttgcaaagcttctgggtcagatgtgggtctgggccccaggactcctgtgtcggcctgacctttcacataatcactgcagagtttttcatctatttttacatcacgggggcaggggagtggaagctacttccagcaacagctctcggttaataaccagtttctgcaagtagcagcagcagcagcagcgtagggtcacggttaggaatttgggcttgggcatccaagacttggccccaacttccagtgaattacttcatttctcagcttctcggtttcttcaggcctaaaatgaggacaaaaatacctacctttcacggaggtggatgtggagactaacaaggcgataaatgttaaaggggcttcgaaacataagttgcattacagaaaggaagtagaaattacaaccacacttcaggaattgttactctactttatttttttaataaacctatgtatataaagaaccaactttaagtccattcgcagcataactgatttttggaagtttatggaaggaccccttttggaaggtctgtactgggattcatggtacaataaccagcagctgtataatttaaagaacagcagtcgcatctactatgaaaatatacttctaggagttcccagagttcgtcaactaaaagtccgcaacaacacatgcaaagtctattcatcttttcagtctttgatgagtgaatgttatggcaaatatacttctgcaaatgaagacctctctaattttggccttcaaattaatactgaatggagatattctacttctaataccaactccccttggcactggggatttcttggtgtttaccgaaatgggggatacattttcactttatcaaaatcgaaatctgaaaccaaaaacaagttcattgaccttcgactgaacagctggatcacaagagggactagagttatttttattgatttttccttatataatgctaatgtaaatctattttgtattatcagattggtggcagaattccctgcaactggaggaatacttacttcatggcagttttactctgtgaagctcctcag

SEQ ID NO: 167293 - DNA, 2185 bp, Homo sapiens
  Payload ID: 12918
  Gene Symbol: PKD2L2
  Gene Name: polycystic kidney disease 2-like 2
  Uniprot ID: Q9NZM6
  ENST ID: ENST00000502810
  CDS Start-End: 32-1840
gaacgaacgggcggtgtagtgcaggtccgccatggctgaggcgtcacggtggcaccgaggcggggcttcgaaacataagttgcattacagaaaggaagtagaaattacaaccacacttcaggaattgttactctactttatttttttaataaacctatgtatattgacttttgggatggtaaacccacatatgtattacttaaacaaggttatgtcatctctatttttggacacttctgtgcctggtgaagaaagaaccaactttaagtccattcgcagcataactgatttttggaagtttatggaaggaccccttttggaaggtctgtactgggattcatggtacaataaccagcagctgtataatttaaagaacagcagtcgcatctactatgaaaatatacttctaggagttcccagagttcgtcaactaaaagtccgcaacaacacatgcaaagtctattcatcttttcagtctttgatgagtgaatgttatggcaaatatacttctgcaaatgaagacctctctaattttggccttcaaattaatactgaatggagatattctacttctaataccaactccccttggcactggggatttcttggtgtttaccgaaatgggggatacattttcactttatcaaaatcgaaatctgaaaccaaaaacaagttcattgaccttcgactgaacagctggatcacaagagggactagagttatttttattgatttttccttatataatgctaatgtaaatctattttgtattatcagattggtggcagaattccctgcaactggaggaatacttacttcatggcagttttactctgtgaagctcctcagatatgttagctactatgactattttattgcttcctgtgaaatcacattctgtatttttctttttgtcttcacaacacaagaagtcaaaaaaataaaagaatttaagtctgcctatttcaaaagtatttggaactggctagaattgctacttttgctgctgttgaaaagtactgaaaaatattcagatttctattttcttgcatgctggcacatttattacaataatataattgctattaccatcttttttgcatggataaagatattcaaattcataagctttaacaagacaatgtctcagctgtcatcaaccttgtcccgttgtgttaaagacatagtaggatttgccatcatgttttttataatattctttgcttatgcccagttaggatttcttgtttttggatcacaagttgatgacttttccacttttcagaattccatatttgcacaatttcgaattgttcttggagattttaattttgctggtattcagcaagccaatcctatcttgggacccatttacttcatcactttcatcttttttgtgttctttgtcctgctgaatatgttcttggcaattattaatgatacctattctgaagtgaaagctgactattcaataggcagaaggctagattttgaacttggcaaaatgattaaacagagttacaaaaatgttctcgagaaattcagactgaagaaagctcaaaaagatgaagacaagaaaaccaaaggcagcggagatttggctgaacaagccagaagagaaggctttgacgaaaatgagattcaaaacgcagagcagatgaaaaaatggaaagagaggcttgagaaaaagtattattctatggaaattcaagatgactaccagcctgtcactcaagaagaatttcgagaactttttttatatgctgtggagctggagaaggaattacactacatcaatttgaagctaaatcaagtggtgagaaaggtttcagctctatagtattgagacaagtggagtggcaccacaaccaagtacaaaatgagattctctgagtgcctgacaaaacgaatttaagtaccagccaagtacacacgatgatagcttcaaggaatacaactgactttatgatatgaattttcaaggaacgtatcttatatggattttgaagaatcttgtttgcttataagaacttcaagaagcctaagcttggctttaattttcttgtactctctgtactcctcaagcactggaacacgatcctctttctgggcattcctaggggagaaaataaaatttgtaatgttctagagatcatttggaaaaaaagatccaaaagttgtctta

SEQ ID NO: 167294 - DNA, 7693 bp, Homo sapiens
  Payload ID: 12919
  Gene Symbol: PKDREJ
  Gene Name: polycystin (PKD) family receptor for egg jelly
  Uniprot ID: Q9NTG1
  ENST ID: ENST00000253255
  CDS Start-End: 34-6795
gcggcctctcccagcttctcctgggccggcgccatgaggcctgggcccgctctcctccttctgggcgtgggcctgagcctgagcgtcggccgcctcccgctgccgccggttcctcgcggggcacaagccgccgtctccggggcgcccggtggcctcctcaggggcgccccgggcctcggggtgcgcggcggccgcgccctcctcagtctgcggcccagcgcggtgcgggcgggcggcgctgtcctgagcggccgcggcagcctctgcttcccccatggcgggaccgggcggcgctggtactgcctcgacttgcgcgtcctgctcagcgcccaacgcctgccctggccggccgcgcccgcgctcgcgctcgtcgacctgcagctctccgcgcgcggcggccgcctctccctgacgtggtccgtgcggctgccgcgctcgcccgggcgcctggcctgggccttccgcctgcggctgctcggacccggcgccgcccgcccggcctcccccgcggcccgcgtctccccgcgctccgccgcgccaggcccgcggccccagcagggcttcgtggcccgcaccgagtgccccacagacggccccgcgcgcgtgatgttgcaggccgtcaactcgtccagccacagagccgtcgagtcgtccgtgtcctgtcagataaacgcctgcgtcatccagcgcgtgaggatcaacacggaccagaagggcgcccccgtgcgcctgagcatgcaggcggaggccaccatcaacgcctcggtgcagctggactgcccggccgcgcgcgccatcgcccagtactggcaggtgttctccgtgcccgccgtgggtcaggcgcccgactggacgcagcccttggatctgccccagctcgagatcaggaacagccccttgttcattcacatccccaataattcgttacagtggggagtgtatgtgtttaatttcacggtgtccatcaccacagggaaccccaagatgcccgaggtgaaagactcggacgccgtctatgtctggatcgtcaggagttccctgcaggcggtgatgcttggcgatgccaacataacagctaatttcacagagcagctgattctggacgggtccacgtcctcggacccagatgcggacagcccgttacagggactccagttcttttggtactgtaccacagatcccagaaactacggtggggatcgaataatcctggggagcaaggaagtctgtcaccccgagcaggccaatctgaaatggccctgggcctcgggccctgtactgacacttttgccagaaacacttaaaggcgaccacgtgtatttcttcagaatggtgattcggaaggactctaggacagcgttttctgataagagggtccacgtgctccaaggaccaaaagccatagcacacatcacatgtatcgaaaattgtgagagaaacttcattgtctctgatagattttctttgttcctaaattgcacaaattgtgcaagccgtgatttctataaatggtcaattttgtcttcttcaggtggtgagatgctatttgattggatgggggaaactgtaacaggaaggaatggtgcttatctgtctataaaagcttttgcttttcggcattttttggaagctgagttttcgatttctctgtatctagcatgttggagtggagtgacctcggtcttcaggcattcttttattattaaccatggccctcagatcggagaatgcaaaattaatccagctaaaggaattgcacttattactaaatttgttgtccagtgtagtaattttagggataagcacgtccctcttacatataaaataattgtttctgatttgcacagtgttggtgaaatcagttcagtaaaagagaacaccctggggaccatcctgtacttggggcctcagtccacagtacccccttcctttctccctgttggtatgttggctagtcaatatggcttgaagatatatgcccaggtctatgattctctaggagctttttctcaggtgactttgcatgccaccgcacaggctcccactgacaaaaattcatcaaagacagtgttgaatcagttactcagtttcaccgtgggaccaagttcattgctgtctactttgattcaaaagaaggattttttacctgcaggttacttactgtatatagtagcttccgttttgaataacatgaaaactgaattacctctccgagatgacagagtcaatctccgaaaacacctcatcgatcagtctttccttcttcctgtaagcactttggtagaaattggccaggtagtcatgactattaccaaattaacccagaaaccctctgaattcacttgggatgctcagaaacgtgccaccatgagggtatggcaagcaaatcaagccctacaagagtatcagcaaaaagataaacgctttcgatctgaacaaatagaaatcgtgagtactggaatactaatgagtttgtctaatattcttaaaatgacttctcctcaccaagtagttaaagatcctttctatgtaatagaatctctatcagacacaatactggctaataaagtgccagggaacaaaaccacctcaatgagaacccccaatttcaacatgtatgtcaagaaagttgaaaagtggggtatcaaccagctcttcagaaatgagaaacactgcagaaattgtttttatccaacactcaatgtgagcagtgttcctggtctgtctgcaaatggtcccatttctacaatgttttgtgatttcacaaatgacctctttccttggttaaatgatcaggaaaacacttcggtggaggtgtctggattcagaatgacaggagttgcagataacggtagtgtgctagagatcacacctgatgtagcggaagtgtaccttgtcaggaaaaacttgacctttgcagcttttaatctcacagtgggacccaacagcgaggttgatgggtccttgaagaagacgacaggtgggtttagctttcaagtggacagcacagtgcttagggaggttctggtccacatagtaacagaagtgatggtgctgttcacagtgttggtgtacacaggcagtcagatcactcccacagcgctggtcgccaccttcctggtgcctcatgacatccctccatttgccagccagagtgccctgtttgacccagcctgcacagtgaagaaggcccgtgtagtctgcctccctgtgtccctgctgcaactcatagctcagcacagccactctccccactgtactgtatccatagttctgcaggcacctcgttttgtcatgaagctcaatgacaagctagtgagaatttctattttcagcgtccagtgcttggacatgtatgggatccagagtgaatggagagagggttattgcattcttggtgagaagaccagctggtatgaggtgcactgcatctgcaagaatgtagtaagggctaggcggcagctgggcacaatcggactcacgggcattcacctgcatacccactatgtgatggccaaggtgattgtgatccctaatcctgtggatctacggttaaacatcatcaagagccttcaccaaaaccccgtgaccctcttcactgtgcttttcattattctcttatacgtgggcctagctttttgggctttatacagggatgaaatggaccagcatcttcgggggcatgtgatagttctaccagataatgatccttatgataatttatgctacttggtgactatttttacaggaagtcgttgggggtctgggaccagggccaatgtctttgtgcaacttagaggaactgtgagtaccagcgacgtgcattgtttaagccatccacatttcacaactctctaccgaggtagcatcaacactttcctcctaacgacaaaaagtgacttgggggacatccattccatccgtgtgtggcacaacaacgagggtcgatcgcctagctggtatttaagtagaatcaaagtggaaaatctgtttagcaggcacatttggctgttcatatgccagaaatggctttctgttgataccactttggacagaacatttcacgttacccatccagatgagcgtctgactagaaaagactttttctttatagatgtgagtagtaatctccggaaaaaccacatgtggttctctatttttgctagtgttgttgctaaaacattcaataggctccagagattgtcctgttgtttagcaatgttgcttagctctcttctttgtaacattatgttctttaatctaaatagacaagaacaaactgagtcaagagagaggaaatacatgagatcaatgatgataggaattgaaagtgtcttaattacaatccctgtgcaattattaataacttttttgttcacctgttcccagaggaaacctcaagcggatctaaaggaggtatctcctcaaaagcatcctctaatgtcagaagcaagtgagcactgggaagaatacttgagaaagtggcatgcttacgaaactgctaaggtgcaccccagggaggttgcaaaacctgcatctaaaggaaagcccaggcttccaaaggcttctcctaaggcaacctccaaacccaagcacaggcataggaaagcacaaatcaagaccccggagaccctcgggccaaatacaaattccaataacaacatagaagatgatcaggatgtccattccgaacagcacccttcccaaaaggatctccagcagcttaagaaaaagccccggatcgtcctaccttggtggtgtgtttatgttgcatggtttttggtttttgctacttctagcatatcctcattcttcattgtattttatggactgacttacggctatgacaagtcaatagaatggctctttgcatctttttgttcattctgtcagtcagttcttctggtgcagccatctaaaattatactcctgtcaggcttcagaacgaataaacccaagtattgcaaaaacctttcatggtcaaccaagtataaatatactgagatcaggttggatggaatgcgtatgcatccagaagaaatgcagaggatacatgaccagatcgtccgaatccgaggcacgaggatgtaccaaccccttacagaagatgaaatcagaatattcaaaagaaagaagaggatcaagagaagagcactcctgtttctgagttacattctaactcactttatctttctagcccttctgttgatccttatcgtcttactacgtcacactgactgcttttactataaccagtttattcgtgatcggttctctatggatcttgctactgtgactaagctggaagacatctatagatggctaaacagcgtgctgttgcctttgttacacaatgacctgaatccaacatttcttcctgaaagctcgtctaaaatccttggccttccattgatgaggcaagtgagagcaaaatctagtgaaaaaatgtgtctacctgccgaaaagtttgtgcaaaacagcatcagaagagaaattcattgtcaccccaaatatggcattgacccagaagacacaaaaaactattctggcttttggaatgaagttgataagcaggctatagatgagagtaccaatggatttacttataagcctcaaggaacgcaatggctatattattcctatggactactacacacctatggatctggaggatatgcactctatttttttccagaacagcagcggtttaattccacactgaggctcaaagaacttcaagaaagcaattggctggatgagaagacatgggctgtggttttggaattaacaacttttaatccagatataaatctgttctgtagcatttcggtcatatttgaagtctctcagttaggagttgtcaacacaagcatatctctgcactctttttcacttgctgattttgacagaaaagcttcagcagaaatctacttgtatgtggccattctcatttttttcttagcctacgttgttgatgagggttgtatcattatgcaagaaagagcctcctatgtgagaagtgtgtataatttgctcaactttgctttaaagtgcatatttactgtgttgattgtgctctttctcaggaaacatttcctggccactggcataattcggttttacttgtcgaacccagaagacttcattccctttcatgcagtttctcaggtagatcacattatgaggataattttgggtttcctgttatttctgacaattttgaagaccctcaggtattccagattcttctacgatgtgcgcctggctcagagggccatccaggctgccctccctggcatctgccacatggcatttgttgtgtccgtgtatttcttcgtatacatggcttttggttacctggtgtttggtcagcatgaatggaactacagtaacttgattcattccactcagacagtattttcctattgtgtctcagctttccagaacactgaattttccaataacaggattctgggggtcctgttcctctcatctttcatgctggtgatgatctgcgtcttgatcaacttatttcaggctgtaattctgtctgcatatgaggaaatgaagcagcccgtgtatgaggagccatcggatgaagtggaagcaatgacctatttgtgccgtaagctgagaaccatgttcagctttctgacctcgcaatctaaggccaaagatgagcctgagttctttattgacatgctgtatgggcagccagagaagaacagccaccgttatctggggctgaagaccagaaacatcaacgggaagaaaatggtttaccttgttgtttgatgaatgatggtttcatgagtcacaagcaagcgttcccccaactgctgagtctgtgggattaaggggattagggagtgtcagtggcctagtcatgctttctactcatgtccttcacaaggcacatcccctacatttggaagaatccccaatcttgtcctctgctcttgggagtgtaaaagttgggagtgtagtgtagcatctggggagacagcaggatcacagtgtgggattcctggactgatttccctttagaggggagttatgtgactccccgtacaagggcaaccctgtttctttggtgcctgcagtttagagaaggcagagccactggttttgagaaccagatttgagagagggacctggccagggtggagcattgtctgggtgtttctgcgcttgacccatgctggaagctaatggcctgttgctcctgacagagccccaaactcctcggcctcactgggaggcccctttgtagaccagggctcccctcctcttgttccccctgggcttagggcctcgtggggagttccaggacttgcttcatgcttgagaatgcagatgtggtgcttctcatttattcttaaagctactggtagttaaagtaaaattcagtaacattttctgaccaagagacatgttttgttaaacaacaaaaaggtacatatgggttcacattgaaatatgtctatatgctgaatatagcaacatatgcatctaagatttgggcatttggttattaatagcgtgctggactattcaggaataaggaaaatgtggtttatcacttaagagaaacaagggctggtagctgtactattttcactcagaagcatgttcatttatgtagatgccactttaagctttatcagaattaaatgtgagatttcttctttga

SEQ ID NO: 167295 - DNA, 1113 bp, Homo sapiens
  Payload ID: 12920
  Gene Symbol: PQBP1
  Gene Name: polyglutamine binding protein 1
  Uniprot ID: O60828
  ENST ID: ENST00000218224
  CDS Start-End: 258-1055
gggagaggaacagggccctggagcacctggtttcggggacagtagggttggtgggagttgcgatgatattgccacctacctcttacatcttttagtgcgtatgttctgtccacccagctactggttcatttgagtagatcggagtcagatgagtacatgtttacgggaggcgcttggttacgggatccagataggaatctttatctgagctgcttgtcagtttgttcgtctgtccctaggtctgtctgctatcagctatgccgctgcccgttgcgctgcagacccgcttggccaagagaggcatcctcaaacatctggagcctgaaccagaggaagagatcattgccgaggactatgacgatgatcctgtggactacgaggccaccaggttggagggcctaccaccaagctggtacaaggtgttcgacccttcctgcgggctcccttactactggaatgcagacacagaccttgtatcctggctctccccacatgaccccaactccgtggttaccaaatcggccaagaagctcagaagcagtaatgcagatgctgaagaaaagttggaccggagccatgacaagtcggacaggggccatgacaagtcggaccgcagccatgagaaactagacaggggccacgacaagtcagaccggggccacgacaagtctgacagggatcgagagcgtggctatgacaaggtagacagagagagagagcgagacagggaacgggatcgggaccgcgggtatgacaaggcagaccgggaagagggcaaagaacggcgccaccatcgccgggaggagctggctccctatcccaagagcaagaaggcagtaagccgaaaggatgaagagttagaccccatggaccctagctcatactcagacgccccccggggcacgtggtcaacaggactccccaagcggaatgaggccaagactggcgctgacaccacagcagctgggcccctcttccagcagcggccgtatccatccccaggggctgtgctccgggccaatgcagaggcctcccgaaccaagcagcaggattgaagcttcggcctccctggccctgggttaaaataaaagctttctggtgatcctgcccacc

SEQ ID NO: 167296 - DNA, 664 bp, Homo sapiens
  Payload ID: 12920
  Gene Symbol: PQBP1
  Gene Name: polyglutamine binding protein 1
  Uniprot ID: O60828
  ENST ID: ENST00000247140
  CDS Start-End: 94-606
caggctcggggagtgaaggcctcgttgagagaaggtctcattcggtgttttgggaagagagtcgtgtgggcccaggtctgtctgctatcagctatgccgctgcccgttgcgctgcagacccgcttggccaagagaggcatcctcaaacatctggagcctgaaccagaggaagagatcattgccgaggactatgacgatgatcctgtggactacgaggccaccaggttggagggcctaccaccaagctggtacaaggtgttcgacccttcctgcgggctcccttactactggaatgcagacacagaccttgtatcctggctctccccacatgaccccaactccgtggttaccaaatcggccaagaagctcagaagcagtaatgcagcagtaagccgaaaggatgaagagttagaccccatggaccctagctcatactcagacgccccccggggcacgtggtcaacaggactccccaagcggaatgaggccaagactggcgctgacaccacagcagctgggcccctcttccagcagcggccgtatccatccccaggggctgtgctccgggccaatgcagaggcctcccgaaccaagcagcaggattgaagcttcggcctccctggccctgggttaaaataaaagctttctggtgatcctgcccacc

SEQ ID NO: 167297 - DNA, 1056 bp, Homo sapiens
  Payload ID: 12920
  Gene Symbol: PQBP1
  Gene Name: polyglutamine binding protein 1
  Uniprot ID: O60828
  ENST ID: ENST00000376563
  CDS Start-End: 201-998
tgcctcctgagcgtagtccagttactttcaggctcggggagtgaaggcctcgttgagagaaggtctcattcggtgttttgggaagagagtcgtgtgggcccaggtatcgtagcggcgacacgagagagacgggcggtgtgacagccttccactacctgcacgagtgtattggtaacgttggggtctgtctgctatcagctatgccgctgcccgttgcgctgcagacccgcttggccaagagaggcatcctcaaacatctggagcctgaaccagaggaagagatcattgccgaggactatgacgatgatcctgtggactacgaggccaccaggttggagggcctaccaccaagctggtacaaggtgttcgacccttcctgcgggctcccttactactggaatgcagacacagaccttgtatcctggctctccccacatgaccccaactccgtggttaccaaatcggccaagaagctcagaagcagtaatgcagatgctgaagaaaagttggaccggagccatgacaagtcggacaggggccatgacaagtcggaccgcagccatgagaaactagacaggggccacgacaagtcagaccggggccacgacaagtctgacagggatcgagagcgtggctatgacaaggtagacagagagagagagcgagacagggaacgggatcgggaccgcgggtatgacaaggcagaccgggaagagggcaaagaacggcgccaccatcgccgggaggagctggctccctatcccaagagcaagaaggcagtaagccgaaaggatgaagagttagaccccatggaccctagctcatactcagacgccccccggggcacgtggtcaacaggactccccaagcggaatgaggccaagactggcgctgacaccacagcagctgggcccctcttccagcagcggccgtatccatccccaggggctgtgctccgggccaatgcagaggcctcccgaaccaagcagcaggattgaagcttcggcctccctggccctgggttaaaataaaagctttctggtgatcctgcccacc

SEQ ID NO: 167298 - DNA, 760 bp, Homo sapiens
  Payload ID: 12920
  Gene Symbol: PQBP1
  Gene Name: polyglutamine binding protein 1
  Uniprot ID: O60828
  ENST ID: ENST00000376566
  CDS Start-End: 190-702
tgcctcctgagcgtagtccagttactttcaggctcggggagtgaaggcctcgttgagagaaggtctcattcggtgttttgggaagagagtcgtgtgggcccaggtatcgtagcggcgacacgagagagacgggcggtgtgacagccttccactacctgcacgagtgtattggtctgtctgctatcagctatgccgctgcccgttgcgctgcagacccgcttggccaagagaggcatcctcaaacatctggagcctgaaccagaggaagagatcattgccgaggactatgacgatgatcctgtggactacgaggccaccaggttggagggcctaccaccaagctggtacaaggtgttcgacccttcctgcgggctcccttactactggaatgcagacacagaccttgtatcctggctctccccacatgaccccaactccgtggttaccaaatcggccaagaagctcagaagcagtaatgcagcagtaagccgaaaggatgaagagttagaccccatggaccctagctcatactcagacgccccccggggcacgtggtcaacaggactccccaagcggaatgaggccaagactggcgctgacaccacagcagctgggcccctcttccagcagcggccgtatccatccccaggggctgtgctccgggccaatgcagaggcctcccgaaccaagcagcaggattgaagcttcggcctccctggccctgggttaaaataaaagctttctggtgatcctgcccacc

SEQ ID NO: 167299 - DNA, 965 bp, Homo sapiens
  Payload ID: 12920
  Gene Symbol: PQBP1
  Gene Name: polyglutamine binding protein 1
  Uniprot ID: O60828
  ENST ID: ENST00000396763
  CDS Start-End: 110-907
agaggaacagggccctggagcacctggtttcggggacagtagggttggtgggagttgcgatgatattgccacctacctcttacatcttttagtctgtctgctatcagctatgccgctgcccgttgcgctgcagacccgcttggccaagagaggcatcctcaaacatctggagcctgaaccagaggaagagatcattgccgaggactatgacgatgatcctgtggactacgaggccaccaggttggagggcctaccaccaagctggtacaaggtgttcgacccttcctgcgggctcccttactactggaatgcagacacagaccttgtatcctggctctccccacatgaccccaactccgtggttaccaaatcggccaagaagctcagaagcagtaatgcagatgctgaagaaaagttggaccggagccatgacaagtcggacaggggccatgacaagtcggaccgcagccatgagaaactagacaggggccacgacaagtcagaccggggccacgacaagtctgacagggatcgagagcgtggctatgacaaggtagacagagagagagagcgagacagggaacgggatcgggaccgcgggtatgacaaggcagaccgggaagagggcaaagaacggcgccaccatcgccgggaggagctggctccctatcccaagagcaagaaggcagtaagccgaaaggatgaagagttagaccccatggaccctagctcatactcagacgccccccggggcacgtggtcaacaggactccccaagcggaatgaggccaagactggcgctgacaccacagcagctgggcccctcttccagcagcggccgtatccatccccaggggctgtgctccgggccaatgcagaggcctcccgaaccaagcagcaggattgaagcttcggcctccctggccctgggttaaaataaaagctttctggtgatcctgcccacc

SEQ ID NO: 167300 - DNA, 1020 bp, Homo sapiens
  Payload ID: 12920
  Gene Symbol: PQBP1
  Gene Name: polyglutamine binding protein 1
  Uniprot ID: O60828
  ENST ID: ENST00000447146
  CDS Start-End: 171-968
agttactttcaggctcggggagtgaaggcctcgttgagagaaggtctcattcggtgttttgggaagagagtcgtgtgggcccaggtatcgtagcggcgacacgagagagacgggcggtgtgacagccttccactacctgcacgagtgtattggtctgtctgctatcagctatgccgctgcccgttgcgctgcagacccgcttggccaagagaggcatcctcaaacatctggagcctgaaccagaggaagagatcattgccgaggactatgacgatgatcctgtggactacgaggccaccaggttggagggcctaccaccaagctggtacaaggtgttcgacccttcctgcgggctcccttactactggaatgcagacacagaccttgtatcctggctctccccacatgaccccaactccgtggttaccaaatcggccaagaagctcagaagcagtaatgcagatgctgaagaaaagttggaccggagccatgacaagtcggacaggggccatgacaagtcggaccgcagccatgagaaactagacaggggccacgacaagtcagaccggggccacgacaagtctgacagggatcgagagcgtggctatgacaaggtagacagagagagagagcgagacagggaacgggatcgggaccgcgggtatgacaaggcagaccgggaagagggcaaagaacggcgccaccatcgccgggaggagctggctccctatcccaagagcaagaaggcagtaagccgaaaggatgaagagttagaccccatggaccctagctcatactcagacgccccccggggcacgtggtcaacaggactccccaagcggaatgaggccaagactggcgctgacaccacagcagctgggcccctcttccagcagcggccgtatccatccccaggggctgtgctccgggccaatgcagaggcctcccgaaccaagcagcaggattgaagcttcggcctccctggccctgggttaaaataaaagctttctggtgatcctg

SEQ ID NO: 167301 - DNA, 451 bp, Homo sapiens
  Payload ID: 12920
  Gene Symbol: PQBP1
  Gene Name: polyglutamine binding protein 1
  ENST ID: ENST00000456306
  CDS Start-End: 1-451
atattgccacctacctcttacatcttttagtgcaaccagaggaagagatcattgccgaggactatgacgatgatcctgtggactacgaggccaccaggttggagggcctaccaccaagctggtacaaggtgttcgacccttcctgcgggctcccttactactggaatgcagacacagaccttgtatcctggctctccccacatgaccccaactccgtggttaccaaatcggccaagaagctcagaagcagtaatgcagcagtaagccgaaaggatgaagagttagaccccatggaccctagctcatactcagacgccccccggggcacgtggtcaacaggactccccaagcggaatgaggccaagactggcgctgacaccacagcagctgggcccctcttccagcagcggccgtatccatccccaggggctgtgctccgggccaatgcaga

SEQ ID NO: 167302 - DNA, 744 bp, Homo sapiens
  Payload ID: 12920
  Gene Symbol: PQBP1
  Gene Name: polyglutamine binding protein 1
  ENST ID: ENST00000443648
  CDS Start-End: 106-744
gaacagggccctggagcacctggtttcggggacagtagggttggtgggagttgcgatgatattgccacctacctcttacatcttttagtctgtctgctatcagctatgccgctgcccgttgcgctgcagacccgcttggccaagagaggcatcctcaaacatctggagcctgaaccagaggaagagatcattgccgaggactatgacgatgatcctgtggactacgaggccaccaggttggagggcctaccaccaagctggtacaaggtgttcgacccttcctgcgggctcccttactactggaatgcagacacagaccttgtatcctggctctccccacatgaccccaactccgtggttaccaaatcggccaagaagctcagaagcagtaatgcagatgctgaagaaaagttggaccggagccatgacaagtcggacaggggccatgacaagtcggaccgcagccatgagaaactagacaggggccacgacaagtcagaccggggccacgacaagtctgacagggatcgagagcgtggctatgacaaggtagacagagagagagagcgagacagggaacgggatcgggaccgcgggtatgacaaggcagaccgggaagagggcaaagaacggcgccaccatcgccgggaggagctggctccctatcccaagagcaagaaggcagtaagccgaaaggatgaagagttagaccccatggaccctagctcatactcagacgccccc

SEQ ID NO: 167303 - DNA, 5033 bp, Homo sapiens
  Payload ID: 12921
  Gene Symbol: PHC1
  Gene Name: polyhomeotic homolog 1 (Drosophila)
  ENST ID: ENST00000433083
  CDS Start-End: 146-3025
ggccgagcgagcccccagcccagcctggcgactggggaccccggcacatgaggtggacgcccccggggaagacttgggtgcacagccaggcgagaaggtcttgagtcagacagagcaccagccttggggaccctggaccactatcatggagactgagagcgagcagaactccaattccaccaatgggagttctagctcagggggcagctctcggccccagatagctcaaatgtcactttatgaacgacaagcagtgcaggccacaattgctgccagtcggcaggccagctccccaaacaccagcactacacagcagcagactaccaccacccaggcctcgatcaatctggccaccacatcggccgcccagctcatcagccgatcccagagtgtgagctctcccagtgctaccaccttgacccaatctgtgctactggggaacaccacctccccacccctcaaccagtctcaggcccagatgtatctacgggtaaaccgaaccctgggtcggaatgtgcctctagcctcccaactcatcctgatgcctaatggggcggtggctgcagtccagcaggaggtgccatctgctcagtctcctggagttcatgcagatgcagatcaggttcagaacttggcagtaaggaatcaacaggcctcagctcaaggacctcagatgcaaggctccactcagaaggccattcctccaggagcctcccctgtctctagcctctcccaggcctctagccaggccctagcggtggcacaggcttcctctggggccacaaaccagtccctcaaccttagtcaagctggtggaggcagtgggaatagcatcccagggtccatgggtccaggtggaggtgggcaggcacatggtggtttgggtcagttgccttcctcaggaatgggtggtgggagctgtcccagaaagggtacaggagtggtgcagcccttgcctgcagcccaaacagtgactgtgagccagggcagccagacagaggcagaaagtgcagcagccaagaaggcagaagcagatgggagtggccagcagaatgtgggcatgaacctgacacggacagccacacctgcgcccagccagacacttattagctcagccacctacacacagatccagccccattcactgattcagcaacagcaacagatccacctccagcagaaacaggtggtgatccagcagcagattgccatccaccaccagcagcagttccagcaccggcagtcccagctccttcacacagctacacacctccagttggcgcagcagcagcagcagcaacaacagcaacagcagcaacagcagcagccgcaagccaccaccctcactgcccctcagccaccacaggtcccacctactcagcaggtcccaccttcccagtcccagcagcaagcccaaaccctggtcgttcagcccatgcttcagtcttcacccttgtctcttccacctgatgcagcccctaagccaccaattcccatccaatccaaaccacctgtagcacctatcaagccgcctcagttaggggccgctaagatgtcagctgcccagcaaccaccaccccatatccctgtgcaagttgtaggcactcgacagccaggtacagcccaggcacaggctttggggttggcacagctggcagctgctgtacctacttcccgggggatgccaggtacagtgcagtctggtcaggcccatttggcctcctcgccaccttcatcccaggctcctggtgcactgcaggagtgccctcccacattggcccctgggatgacccttgctcctgtgcaggggacagcacatgtggtaaagggtggggctaccacctcctcacctgttgtagcccaggtccctgctgccttctatatgcagtctgtgcacttgccgggtaaaccccagacattggctgtcaaacgcaaggctgactctgaggaggagagagatgatgtctccacattgggttcaatgcttcctgccaaggcatctccagtagcagaaagcccaaaagtcatggacgagaagagcagtcttggagaaaaagctgaatcagtggctaatgtgaatgctaatactccaagcagtgaactagtagccttgacccccgccccttcagtaccgcctcctacactagccatggtgtctagacaaatgggtgactcaaaacccccacaggccatcgtgaagccccagattctcacccacatcattgaaggctttgttatccaggaaggagcagaacctttcccggtgggttgttctcagttactgaaggagtctgagaagccactacagactggccttccgacagggctgactgagaatcagtcaggtggccctttgggagtggacagcccatctgctgagttagataagaaggcgaatctcctgaagtgcgagtactgtgggaagtacgcccccgcagagcagtttcgtggctctaagaggttctgctccatgacttgcgctaagaggtacaatgtgagctgtagccatcagttccggctgaagaggaaaaaaatgaaagagtttcaagaagccaactatgctcgcgttcgcaggcgtggaccccgccgcagctcctctgacattgcccgtgccaagattcagggcaagtgccaccggggtcaagaagactctagccggggttcagataattccagttatgatgaagcactctctccaacatctcctgggcctttatcagtaagagctgggcatggagaacgtgacctggggaatcccaatacagctccacctacaccggaattacatggcatcaaccctgtgttcctgtccagtaatcccagccgttggagtgtagaggaggtgtacgagtttattgcttctctccaaggctgccaagagattgcagaggaatttcgctcacaggagattgatggacaggcccttttattacttaaagaagaacatcttatgagtgccatgaacatcaagctgggccctgccctcaagatctgcgccaagataaatgtcctcaaggagacctaaggtggccctcttgcacaaaccagcctaaggcagacactctccactgtccaggttataacctggtaccagcagactttgcagggaagaaagagttgttccaatcatgtaaccttctgtaggggattactgagacagggaagagaagtgcaagaattggttgctggtgctacatggcggcagctttgacattttctctgggttctactttattttttaaaatctttacagttctcaccatttcacgtaccttaatccaatctttataaaagaggcagtctagagaactaggactgctcagccttatcctggagtggagcatttagcccaggtcttaattctccaagaggaggaatacatagtatggtaaggcaaggaactgggtggaatgtcaggttgcctgcccaatgggagaggtagggtttttctagcttgtgtgacagaagtagcaaaatctggtcctcccccctcccagtgtagctgtggctcagagttttttctttttgttgtcacttactcccttgtgattgaattttttctcctgcatccatggcaggatccccagccagtatagagacttggttggcatcttctgctgcagggactaaaagtatttgactggggcacatgtggctgttgtcattctttctgcatcccactgttcccctccaatttatgttattttctaccctgtttttcagttccatctctgctctgtcctatagctttataaaaccagagtgtgtggggctgaggtcaggagtataagtacctgccttaggcactattccttatataacaaaaatattaaatatttttttcctcagtaaaaggatgaaaattggtttcagttgtcttactctattccagtctttgcccactttcacacaaatgacaaggccaatatgttttgtttgttttttaatcattaagagtttttgtacaaaaggtgatggttttttttcttcattttaaaacaccagggtgtgggggagggatgcaaacaaataacaaaaaagatgcttttgtaacattattttccctgtttagaaagaaaaaaatcactccaatagtattgaaaagtccaaagatgaaatagtttcattttcttttcctaaggcttataaaaggccccctgcctgttgattccatccctcttttgtgtccagtggagccatgttactcttcagtggcccaggggttcactattaaagaaagatcagtccaggtttctgggcacatggcctaaacaggaagatggaagcatcagaggattaaaaacctttccccacagaaatgtgggcaagaagacacttccctgagccagcagaagggacaggtgcagcagcattccacacccagcgcagaggacagcagagccctcgatgtcccacttctgcttccgttccctttctagaagattgaaaaaaaggtcaaaaccacatgcctgtggagaaagtgcgacatgtttagaaatactggtagggaaccaggagtaagaaaagctttaccagcttttactacaaatggatgaaagacatcaggatcccaccaccgcaaggtaaagtgacttcccttttctggaacccctgtggcacaggagtaccaattttcctttccaacgaactggatttctggataggcattttggctgtatgtggacagataagaccacagtccttagcccaatcccagctatacagtcaccccaatttccacaaatgatgtgatggtaccgtataatcctgtaattgggaaatttcacatttttcctgtcctaatctcagaggtgggagaagcaagtctagaacatctccaggctcagactaaacgagagtacttggactgcaaccaagtaatcactgcaaagtagttccaagcagcaagaaataccagattctcatggaggctactatagggtacagaataacaacatgaaagcaatcaaccctgtataaataatgtttcttggcattttttttttaattaaagaaatccagtgtctcaaaaa

SEQ ID NO: 167304 - DNA, 642 bp, Homo sapiens
  Payload ID: 12921
  Gene Symbol: PHC1
  Gene Name: polyhomeotic homolog 1 (Drosophila)
  ENST ID: ENST00000539063
  CDS Start-End: 95-642
ggtggacgcccccggggaagacttgggtgcacagccaggcgagaaggtcttgagtcagacagagcaccagccttggggaccctggaccactatcatggagactgagagcgagcagaactccaattccaccaatgggagttctagctcagggggcagctctcggccccagatagctcaaatgtcactttatgaacgacaagcagtgcaggctctgcaagcactgcagcggcagcccaatgcagctcagtatttccaccagttcatgctccagcagcagctcagtaatgcccagctgcatagcctggctgccgtccagcaggccacaattgctgccagtcggcaggccagctccccaaacaccagcactacacagcagcagactaccaccacccaggcctcggtaaaccgaaccctgggtcggaatgtgcctctagcctcccaactcatcctgatgcctaatggggcggtggctgcagtccagcaggaggtgccatctgctcagtctcctggagttcatgcagatgcagatcaggttcagaacttggcagtaaggaatcaacaggcctcagctcaaggacctcagatgcaaggctccactcagaaggccattcctccaggagcctcccctgtctctagcctctc

SEQ ID NO: 167305 - DNA, 641 bp, Homo sapiens
  Payload ID: 12921
  Gene Symbol: PHC1
  Gene Name: polyhomeotic homolog 1 (Drosophila)
  ENST ID: ENST00000544539
  CDS Start-End: 104-641
ggcacatgaggtggacgcccccggggaagacttgggtgcacagccaggcgagaaggtcttgagtcagacagagcaccagccttggggaccctggaccactatcatggagactgagagcgagcagaactccaattccaccaatgggagttctagctcagggggcagctctcggccccagatagctcaaatgtcactttatgaacgacaagcagtgcaggctctgcaagcactgcagcggcagcccaatgcagctcagtatttccaccagttcatgctccagcagcagctcagtaatgcccagctgcatagcctggctgccgtccagcaggccacaattgctgccagtcggcaggccagctccccaaacaccagcactacacagcagcagactaccaccacccaggcctcgatcaatctggccaccacatcggccgcccagctcatcagccgatcccagagtgtgagctctcccagtgctaccaccttgacccaatctgtgctactggggaacaccacctccccacccctcaaccagtctcaggcccagatgtatctacggctgggaaacctattgcaggtaaaccgaaccctgggtcggaatgtgcctctagcctcccaactcatcctgatgcctaatgggg

SEQ ID NO: 167306 - DNA, 618 bp, Homo sapiens
  Payload ID: 12921
  Gene Symbol: PHC1
  Gene Name: polyhomeotic homolog 1 (Drosophila)
  ENST ID: ENST00000538657
  CDS Start-End: 104-618
ctcctaatgggttagctgtttctgcagcattctttcccgccttcttggagttgaggtcttgagtcagacagagcaccagccttggggaccctggaccactatcatggagactgagagcgagcagaactccaattccaccaatgggagttctagctcagggggcagctctcggccccagatagctcaaatgtcactttatgaacgacaagcagtgcaggctctgcaagcactgcagcggcagcccaatgcagctcagtatttccaccagttcatgctccagcagcagctcagtaatgcccagctgcatagcctggctgccgtccagcaggccacaattgctgccagtcggcaggccagctccccaaacaccagcactacacagcagcagactaccaccacccaggcctcgatcaatctggccaccacatcggccgcccagctcatcagccgatcccagagtgtgagctctcccagtgctaccaccttgacccaatctgtgctactggggaacaccacctccccacccctcaaccagtctcaggcccagatgtatctacggccacagctgggaaacctattgcaggtaaaccgaaccctgggtcggaatgtgcctctagc

SEQ ID NO: 167307 - DNA, 3626 bp, Homo sapiens
  Payload ID: 12921
  Gene Symbol: PHC1
  Gene Name: polyhomeotic homolog 1 (Drosophila)
  Uniprot ID: P78364
  ENST ID: ENST00000544916
  CDS Start-End: 136-3150
gcccccagcccagcctggcgactggggaccccggcacatgaggtggacgcccccggggaagacttgggtgcacagccaggcgagaaggtcttgagtcagacagagcaccagccttggggaccctggaccactatcatggagactgagagcgagcagaactccaattccaccaatgggagttctagctcagggggcagctctcggccccagatagctcaaatgtcactttatgaacgacaagcagtgcaggctctgcaagcactgcagcggcagcccaatgcagctcagtatttccaccagttcatgctccagcagcagctcagtaatgcccagctgcatagcctggctgccgtccagcaggccacaattgctgccagtcggcaggccagctccccaaacaccagcactacacagcagcagactaccaccacccaggcctcgatcaatctggccaccacatcggccgcccagctcatcagccgatcccagagtgtgagctctcccagtgctaccaccttgacccaatctgtgctactggggaacaccacctccccacccctcaaccagtctcaggcccagatgtatctacggccacagctgggaaacctattgcaggtaaaccgaaccctgggtcggaatgtgcctctagcctcccaactcatcctgatgcctaatggggcggtggctgcagtccagcaggaggtgccatctgctcagtctcctggagttcatgcagatgcagatcaggttcagaacttggcagtaaggaatcaacaggcctcagctcaaggacctcagatgcaaggctccactcagaaggccattcctccaggagcctcccctgtctctagcctctcccaggcctctagccaggccctagcggtggcacaggcttcctctggggccacaaaccagtccctcaaccttagtcaagctggtggaggcagtgggaatagcatcccagggtccatgggtccaggtggaggtgggcaggcacatggtggtttgggtcagttgccttcctcaggaatgggtggtgggagctgtcccagaaagggtacaggagtggtgcagcccttgcctgcagcccaaacagtgactgtgagccagggcagccagacagaggcagaaagtgcagcagccaagaaggcagaagcagatgggagtggccagcagaatgtgggcatgaacctgacacggacagccacacctgcgcccagccagacacttattagctcagccacctacacacagatccagccccattcactgattcagcaacagcaacagatccacctccagcagaaacaggtggtgatccagcagcagattgccatccaccaccagcagcagttccagcaccggcagtcccagctccttcacacagctacacacctccagttggcgcagcagcagcagcagcaacaacagcaacagcagcaacagcagcagccgcaagccaccaccctcactgcccctcagccaccacaggtcccacctactcagcaggtcccaccttcccagtcccagcagcaagcccaaaccctggtcgttcagcccatgcttcagtcttcacccttgtctcttccacctgatgcagcccctaagccaccaattcccatccaatccaaaccacctgtagcacctatcaagccgcctcagttaggggccgctaagatgtcagctgcccagcaaccaccaccccatatccctgtgcaagttgtaggcactcgacagccaggtacagcccaggcacaggctttggggttggcacagctggcagctgctgtacctacttcccgggggatgccaggtacagtgcagtctggtcaggcccatttggcctcctcgccaccttcatcccaggctcctggtgcactgcaggagtgccctcccacattggcccctgggatgacccttgctcctgtgcaggggacagcacatgtggtaaagggtggggctaccacctcctcacctgttgtagcccaggtccctgctgccttctatatgcagtctgtgcacttgccgggtaaaccccagacattggctgtcaaacgcaaggctgactctgaggaggagagagatgatgtctccacattgggttcaatgcttcctgccaaggcatctccagtagcagaaagcccaaaagtcatggacgagaagagcagtcttggagaaaaagctgaatcagtggctaatgtgaatgctaatactccaagcagtgaactagtagccttgacccccgccccttcagtaccgcctcctacactagccatggtgtctagacaaatgggtgactcaaaacccccacaggccatcgtgaagccccagattctcacccacatcattgaaggctttgttatccaggaaggagcagaacctttcccggtgggttgttctcagttactgaaggagtctgagaagccactacagactggccttccgacagggctgactgagaatcagtcaggtggccctttgggagtggacagcccatctgctgagttagataagaaggcgaatctcctgaagtgcgagtactgtgggaagtacgcccccgcagagcagtttcgtggctctaagaggttctgctccatgacttgcgctaagaggtacaatgtgagctgtagccatcagttccggctgaagaggaaaaaaatgaaagagtttcaagaagccaactatgctcgcgttcgcaggcgtggaccccgccgcagctcctctgacattgcccgtgccaagattcagggcaagtgccaccggggtcaagaagactctagccggggttcagataattccagttatgatgaagcactctctccaacatctcctgggcctttatcagtaagagctgggcatggagaacgtgacctggggaatcccaatacagctccacctacaccggaattacatggcatcaaccctgtgttcctgtccagtaatcccagccgttggagtgtagaggaggtgtacgagtttattgcttctctccaaggctgccaagagattgcagaggaatttcgctcacaggagattgatggacaggcccttttattacttaaagaagaacatcttatgagtgccatgaacatcaagctgggccctgccctcaagatctgcgccaagataaatgtcctcaaggagacctaaggtggccctcttgcacaaaccagcctaaggcagacactctccactgtccaggttataacctggtaccagcagactttgcagggaagaaagagttgttccaatcatgtaaccttctgtaggggattactgagacagggaagagaagtgcaagaattggttgctggtgctacatggcggcagctttgacattttctctgggttctactttattttttaaaatctttacagttctcaccatttcacgtaccttaatccaatctttataaaagaggcagtctagagaactaggactgctcagccttatcctggagtggagcatttagcccaggtcttaattctccaagaggaggaatacatagtatggtaaggcaaggaactgggtggaatgtcaggttgcctgcccaatgggagaggtagggtttttctagcttgtgtgacagaagtagcaaaatctggtcctcccccctcccagtgta

SEQ ID NO: 167308 - DNA, 4292 bp, Homo sapiens
  Payload ID: 12921
  Gene Symbol: PHC1
  Gene Name: polyhomeotic homolog 1 (Drosophila)
  Uniprot ID: P78364
  ENST ID: ENST00000543824
  CDS Start-End: 333-3347
cgggcaggaagtgacaggcccggagcgagccccggaggcctggctgagccgcggccgggcccgcacccggagcggcgggaggggcggggagccgcggtcgcgccgggcgcctcccaccccgccctcggcgcccccgcccctccaggaaggggaggaggcgaggggagcccgccgcggaggccgagcgagcccccagcccagcctggcgactggggaccccggcacatgaggtggacgcccccggggaagacttgggtgcacagccaggcgagaaggattcatgggtcttgagtcagacagagcaccagccttggggaccctggaccactatcatggagactgagagcgagcagaactccaattccaccaatgggagttctagctcagggggcagctctcggccccagatagctcaaatgtcactttatgaacgacaagcagtgcaggctctgcaagcactgcagcggcagcccaatgcagctcagtatttccaccagttcatgctccagcagcagctcagtaatgcccagctgcatagcctggctgccgtccagcaggccacaattgctgccagtcggcaggccagctccccaaacaccagcactacacagcagcagactaccaccacccaggcctcgatcaatctggccaccacatcggccgcccagctcatcagccgatcccagagtgtgagctctcccagtgctaccaccttgacccaatctgtgctactggggaacaccacctccccacccctcaaccagtctcaggcccagatgtatctacggccacagctgggaaacctattgcaggtaaaccgaaccctgggtcggaatgtgcctctagcctcccaactcatcctgatgcctaatggggcggtggctgcagtccagcaggaggtgccatctgctcagtctcctggagttcatgcagatgcagatcaggttcagaacttggcagtaaggaatcaacaggcctcagctcaaggacctcagatgcaaggctccactcagaaggccattcctccaggagcctcccctgtctctagcctctcccaggcctctagccaggccctagcggtggcacaggcttcctctggggccacaaaccagtccctcaaccttagtcaagctggtggaggcagtgggaatagcatcccagggtccatgggtccaggtggaggtgggcaggcacatggtggtttgggtcagttgccttcctcaggaatgggtggtgggagctgtcccagaaagggtacaggagtggtgcagcccttgcctgcagcccaaacagtgactgtgagccagggcagccagacagaggcagaaagtgcagcagccaagaaggcagaagcagatgggagtggccagcagaatgtgggcatgaacctgacacggacagccacacctgcgcccagccagacacttattagctcagccacctacacacagatccagccccattcactgattcagcaacagcaacagatccacctccagcagaaacaggtggtgatccagcagcagattgccatccaccaccagcagcagttccagcaccggcagtcccagctccttcacacagctacacacctccagttggcgcagcagcagcagcagcaacaacagcaacagcagcaacagcagcagccgcaagccaccaccctcactgcccctcagccaccacaggtcccacctactcagcaggtcccaccttcccagtcccagcagcaagcccaaaccctggtcgttcagcccatgcttcagtcttcacccttgtctcttccacctgatgcagcccctaagccaccaattcccatccaatccaaaccacctgtagcacctatcaagccgcctcagttaggggccgctaagatgtcagctgcccagcaaccaccaccccatatccctgtgcaagttgtaggcactcgacagccaggtacagcccaggcacaggctttggggttggcacagctggcagctgctgtacctacttcccgggggatgccaggtacagtgcagtctggtcaggcccatttggcctcctcgccaccttcatcccaggctcctggtgcactgcaggagtgccctcccacattggcccctgggatgacccttgctcctgtgcaggggacagcacatgtggtaaagggtggggctaccacctcctcacctgttgtagcccaggtccctgctgccttctatatgcagtctgtgcacttgccgggtaaaccccagacattggctgtcaaacgcaaggctgactctgaggaggagagagatgatgtctccacattgggttcaatgcttcctgccaaggcatctccagtagcagaaagcccaaaagtcatggacgagaagagcagtcttggagaaaaagctgaatcagtggctaatgtgaatgctaatactccaagcagtgaactagtagccttgacccccgccccttcagtaccgcctcctacactagccatggtgtctagacaaatgggtgactcaaaacccccacaggccatcgtgaagccccagattctcacccacatcattgaaggctttgttatccaggaaggagcagaacctttcccggtgggttgttctcagttactgaaggagtctgagaagccactacagactggccttccgacagggctgactgagaatcagtcaggtggccctttgggagtggacagcccatctgctgagttagataagaaggcgaatctcctgaagtgcgagtactgtgggaagtacgcccccgcagagcagtttcgtggctctaagaggttctgctccatgacttgcgctaagaggtacaatgtgagctgtagccatcagttccggctgaagaggaaaaaaatgaaagagtttcaagaagccaactatgctcgcgttcgcaggcgtggaccccgccgcagctcctctgacattgcccgtgccaagattcagggcaagtgccaccggggtcaagaagactctagccggggttcagataattccagttatgatgaagcactctctccaacatctcctgggcctttatcagtaagagctgggcatggagaacgtgacctggggaatcccaatacagctccacctacaccggaattacatggcatcaaccctgtgttcctgtccagtaatcccagccgttggagtgtagaggaggtgtacgagtttattgcttctctccaaggctgccaagagattgcagaggaatttcgctcacaggagattgatggacaggcccttttattacttaaagaagaacatcttatgagtgccatgaacatcaagctgggccctgccctcaagatctgcgccaagataaatgtcctcaaggagacctaaggtggccctcttgcacaaaccagcctaaggcagacactctccactgtccaggttataacctggtaccagcagactttgcagggaagaaagagttgttccaatcatgtaaccttctgtaggggattactgagacagggaagagaagtgcaagaattggttgctggtgctacatggcggcagctttgacattttctctgggttctactttattttttaaaatctttacagttctcaccatttcacgtaccttaatccaatctttataaaagaggcagtctagagaactaggactgctcagccttatcctggagtggagcatttagcccaggtcttaattctccaagaggaggaatacatagtatggtaaggcaaggaactgggtggaatgtcaggttgcctgcccaatgggagaggtagggtttttctagcttgtgtgacagaagtagcaaaatctggtcctcccccctcccagtgtagctgtggctcagagttttttctttttgttgtcacttactcccttgtgattgaattttttctcctgcatccatggcaggatccccagccagtatagagacttggttggcatcttctgctgcagggactaaaagtatttgactggggcacatgtggctgttgtcattctttctgcatcccactgttcccctccaatttatgttattttctaccctgtttttcagttccatctctgctctgtcctatagctttataaaaccagagtgtgtggggctgaggtcaggagtataagtacctgccttaggcactattccttatataacaaaaatattaaatatttttttcctcagtaaaaggatgaaaattggtttcagttgtcttactctattccagtctttgcccactttcacacaaatgacaaggccaatatgttttgtttgttttttaatcattaagagtttttgtacaaaa

SEQ ID NO: 167309 - DNA, 561 bp, Homo sapiens
  Payload ID: 12921
  Gene Symbol: PHC1
  Gene Name: polyhomeotic homolog 1 (Drosophila)
  ENST ID: ENST00000537610
  CDS Start-End: 1-561
ttattagctcagccacctacacacagatccagccccattcactgattcagcaacagcaacagatccacctccagcagaaacaggtggtgatccagcagcagattgccatccaccaccagcagcagttccagcaccggcagtcccagctccttcacacagctacacacctccagttggcgcagcagcagcagcagcaacaacagcaacagcagcaacagcagcagccgcaagccaccaccctcactgcccctcagccaccacaggtcccacctactcagcaggagtgccctcccacattggcccctgggatgacccttgctcctgtgcaggggacagcacatgtggtaaagggtggggctaccacctcctcacctgttgtagcccaggtccctgctgccttctatatgcagtctgtgcacttgccgggtaaaccccagacattggctgtcaaacgcaaggctgactctgaggaggagagagatgatgtctccacattgggttcaatgcttcctgccaaggcatctccagtagcagaaagcccaaaagtcatggacgagaaga

SEQ ID NO: 167310 - DNA, 3869 bp, Homo sapiens
  Payload ID: 12921
  Gene Symbol: PHC1
  Gene Name: polyhomeotic homolog 1 (Drosophila)
  ENST ID: ENST00000540574
  CDS Start-End: 359-913
caggaatcctggttttggtggcagtttcccttgattttattgagacttttaagttggtccctttacatttttatttctagttcacaatccaaaaaaaattattaatcagaattcaggtttgggaagacgaggggtcatacggtttgtattttcacatgtgaatgtaggaattatgttctctatacctagcaaaggggtctcgtgtctctgagtccagtgaactaaatccagtaatctataaaactgtgccgtgctgcctctaatccttacccactttttttcttcacatgctgataatgaggattcatgggtcttgagtcagacagagcaccagccttggggaccctggaccactatcatggagactgagagcgagcagaactccaattccaccaatgggagttctagctcagggggcagctctcggccccagatagctcaaatgtcactttatgaacgacaagcagtgcaggctctgcaagcactgcagcggcagcccaatgcagctcagtatttccaccagttcatgctccagcagcagctcagtaatgcccagctgcatagcctggctgccgtccagcaggccacaattgctgccagtcggcaggccagctccccaaacaccagcactacacagcagcagactaccaccacccaggcctcgatcaatctggccaccacatcggccgcccagctcatcagccgatcccagagtgtgagctctcccagtgctaccaccttgacccaatctgtgctactggggaacaccacctccccacccctcaaccagtctcaggcccagatgtatctacggccacagctgggaaacctattgcagtccagcaggaggtgccatctgctcagtctcctggagttcatgcagatgcagatcaggttcagaacttggcagtaaggaatcaacaggcctcagctcaaggacctcagatgcaaggctccactcagaaggccattcctccaggagcctcccctgtctctagcctctcccaggcctctagccaggccctagcggtggcacaggcttcctctggggccacaaaccagtccctcaaccttagtcaagctggtggaggcagtgggaatagcatcccagggtccatgggtccaggtggaggtgggcaggcacatggtggtttgggtcagttgccttcctcaggaatgggtggtgggagctgtcccagaaagggtacaggagtggtgcagcccttgcctgcagcccaaacagtgactgtgagccagggcagccagacagaggcagaaagtgcagcagccaagaaggcagaagcagatgggagtggccagcagaatgtgggcatgaacctgacacggacagccacacctgcgcccagccagacacttattagctcagccacctacacacagatccagccccattcactgattcagcaacagcaacagatccacctccagcagaaacaggtggtgatccagcagcagattgccatccaccaccagcagcagttccagcaccggcagtcccagctccttcacacagctacacacctccagttggcgcagcagcagcagcagcaacaacagcaacagcagcaacagcagcagccgcaagccaccaccctcactgcccctcagccaccacaggtcccacctactcagcagggtaaaccccagacattggctgtcaaacgcaaggctgactctgaggaggagagagatgatgtctccacattgggttcaatgcttcctgccaaggcatctccagtagcagaaagcccaaaagtcatggacgagaagagcagtcttggagaaaaagctgaatcagtggctaatgtgaatgctaatactccaagcagtgaactagtagccttgacccccgccccttcagtaccgcctcctacactagccatggtgtctagacaaatgggtgactcaaaacccccacaggccatcgtgaagccccagattctcacccacatcattgaaggctttgttatccaggaaggagcagaacctttcccggtgggttgttctcagttactgaaggagtctgagaagccactacagactggccttccgacagggctgactgagaatcagtcaggtggccctttgggagtggacagcccatctgctgagttagataagaaggcgaatctcctgaagtgcgagtactgtgggaagtacgcccccgcagagcagtttcgtggctctaagaggttctgctccatgacttgcgctaagaggtacaatgtgagctgtagccatcagttccggctgaagaggaaaaaaatgaaagagtttcaagaagccaactatgctcgcgttcgcaggcgtggaccccgccgcagctcctctgacattgcccgtgccaagattcagggcaagtgccaccggggtcaagaagactctagccggggttcagataattccagttatgatgaagcactctctccaacatctcctgggcctttatcagtaagagctgggcatggagaacgtgacctggggaatcccaatacagctccacctacaccggaattacatggcatcaaccctgtgttcctgtccagtaatcccagccgttggagtgtagaggaggtgtacgagtttattgcttctctccaaggctgccaagagattgcagaggaatttcgctcacaggagattgatggacaggcccttttattacttaaagaagaacatcttatgagtgccatgaacatcaagctgggccctgccctcaagatctgcgccaagataaatgtcctcaaggagacctaaggtggccctcttgcacaaaccagcctaaggcagacactctccactgtccaggttataacctggtaccagcagactttgcagggaagaaagagttgttccaatcataggcagtctagagaactaggactgctcagccttatcctggagtggagcatttagcccaggtcttaattctccaagaggaggaatacatagtatggcttataaaaggccccctgcctgttgattccatccctcttttgtgtccagtggagccatgttactcttcagtggcccaggggttcactattaaagaaagatcagtccaggtttctgggcacatggcctaaacaggaagatggaagcatcagaggattaaaaacctttccccacagaaatgtgggcaagaagacacttccctgagccagcagaagggacaggtgcagcagcattccacacccagcgcagaggacagcagagccctcgatgtcccacttctgcttccgttccctttctagaagattgaaaaaaaggtcaaaaccacatgcctgtggagaaagtgcgacatgtttagaaatactggtagggaaccaggagtaagaaaagctttaccagcttttactacaaatggatgaaagacatcaggatcccaccaccgcaaggtaaagtgacttcccttttctggaacccctgtggcacaggagtaccaattttcctttccaacgaactggatttctggataggcattttggctgtatgtggacagataagaccacagtccttagcccaatcccagctatacagtcaccccaatttccacaaatgatgtgatggtaccgtataatcctgtaattgggaaatttcacatttttcctgtcctaatctcagaggtgggagaagcaagtctagaacatctccaggctcagactaaacgagagtacttggactgcaaccaagtaatcactgcaaagtagttccaagcagcaagaaataccagattctcatggaggctactatagggtacagaataacaacatgaaagcaatcaaccctgtataaataatgtttcttggcattttttttttaattaaagaaatccagtgtctcaaaaa

SEQ ID NO: 167311 - DNA, 572 bp, Homo sapiens
  Payload ID: 12921
  Gene Symbol: PHC1
  Gene Name: polyhomeotic homolog 1 (Drosophila)
  ENST ID: ENST00000535510
  CDS Start-End: 1-395
ccttctatatgcagtctgtgcacttgccgggtaaaccccagacattggctgtcaaacgcaaggctgactctgaggaggagagagatgatgtctccacattgggttcaatgcttcctgccaaggcatctccagtagcagaaagcccaaaagtcatggacgagaagagcagtcttggagaaaaagctgaatcagtggctaatgtgaatgctaatactccaagcagtgaactagtagccttgacccccgccccttcagtaccgcctcctacactagccatggtgtctagacaaatgggtgactcaaaacccccacaggccatcgtgaagccccagattctcacccacatcattgaaggctttgttatccaggaaggagcagaacctttcccgagttagataagaaggcgaatctcctgaagtgcgagtactgtgggaagtacgcccccgcagagcagtttcgtggctctaagaggttctgctccatgacttgcgctaagaggtacaatgtgagctgtagccatcagttccggctgaagaggaaaaaaatgaaagagtttcaagaagccaactatg

SEQ ID NO: 167312 - DNA, 497 bp, Homo sapiens
  Payload ID: 12921
  Gene Symbol: PHC1
  Gene Name: polyhomeotic homolog 1 (Drosophila)
  ENST ID: ENST00000541181
  CDS Start-End: 24-497
cttggggaccctggaccactatcatggagactgagagcgagcagaactccaattccaccaatgggagttctagctcagggggcagctctcggccccagatagctcaaatgtcactttatgaacgacaagcagtgcaggctctgcaagcactgcagcggcagcccaatgcagctcagtatttccaccagttcatgctccagcagcagctcagtaatgcccagctgcatagcctggctgccgtccagcaggtgagaggtcagcagccagctggcccgagagggaggggacaggcactacaggccacaattgctgccagtcggcaggccagctccccaaacaccagcactacacagcagcagactaccaccacccaggcctcgatcaatctggccaccacatcggccgcccagctcatcagccgatcccagagtgtgagctctcccagtgctaccaccttgacccaatctgtgctactggggaacaccacctccccaccc

SEQ ID NO: 167313 - DNA, 483 bp, Homo sapiens
  Payload ID: 12921
  Gene Symbol: PHC1
  Gene Name: polyhomeotic homolog 1 (Drosophila)
  ENST ID: ENST00000542346
  CDS Start-End: 1-300
gtgccatctgctcagtctcctggagttcatgcagatgcagatcaggttcagaacttggcagtaaggaatcaacaggcctcagctcaaggacctcagatgcaaggctccactcagaaggccattcctccaggagcctcccctgtctctagcctctcccaggcctctagccaggccctagcggtggcacaggcttcctctggggccacaaaccagtccctcaaccttagtcaagctggtggaggcagtgggaatagcatcccagggtccatgggtccaggtggagaggtagggtttttctagcttgtgtgacagaagtagcaaaatctggtcctcccccctcccagtgtagctgtggctcagagttttttctttttgttgtcacttactcccttgtgattgaattttttctcctgcatccatggcaggatccccagccagtatagagacttggttggcatcttctgctgcagggactaaaagtat

SEQ ID NO: 167314 - DNA, 3870 bp, Homo sapiens
  Payload ID: 12922
  Gene Symbol: PHC2
  Gene Name: polyhomeotic homolog 2 (Drosophila)
  Uniprot ID: Q8IXK0
  ENST ID: ENST00000257118
  CDS Start-End: 55-2631
catctgcctgcccttctgccatccgagcgccctgactgcgccacactgcaggccatggagaatgagctgccagtcccacatacatctagcagtgcctgtgccaccagcagtaccagcggggccagtagcagcagtggctgcaacaacagcagcagtggtggaagtggccgccccaccgggccccagatttctgtgtacagtggtattccagaccggcagaccgtgcaggtgatccagcaggccctgcacagacagcccagcacggccgctcagtacctgcagcagatgtacgccgcccagcagcagcacctcatgctgcagaccgcggcgctccagcagcagcacctcagcagcgcccagctccagagcctggcagccgtacagcaggcaagcctggtatccaatagacaaggaagcacttcaggcagcaatgtgtctgcgcaggccccggcccagtcatcttcgatcaacctggcagcctccccagcagcagcccagctcctcaaccgggcccagagtgtgaactctgcagcagcctcaggcatcgctcagcaggctgtgctcttgggcaacacgtcttccccagccctgactgcaagccaagcacagatgtatctgagggcacagatgctcatcttcacgcccacggccaccgtcgctactgtgcagcctgagctcggcactggctcccccgcccggccccccacccccgcccaggtacagaacttgaccctccgaacacagcagacaccagcggcagcagcctcgggccccacccccactcagcctgtcctgcccagcttggccctgaaacccacgccgggcggtagccagcctctgcctaccccagcacagagcagaaatactgctcaggcttcccctgcaggtgccaagcctggcatagctgacagtgtgatggagccacacaagaaaggagatggcaacagcagtgtgccagggagcatggaaggccgggctgggctcagccggacggttcctgctgtggctgcccaccccctcattgcaccagcctatgctcagctgcagccacaccagctcctcccacagccatcctcaaagcacctgcagccccaatttgtgatccagcagcagccacagccacaacagcagcagccgccgccccagcagtcacggcctgtgctccaagctgagccccacccccagctcgcctcagtctctccaagcgtggccctccagcccagctcagaggcccatgccatgccactaggcccggttacacccgccctgccactccagtgtcccactgccaacctgcacaagcctggcggcagtcagcagtgtcaccctcccacacctgatactgggcctcagaatggacatcccgagggcgtgccccacacccctcaacgcaggttccagcacacttcagctgtcatcttacaactgcagcctgcttcaccaccccagcagtgtgtccctgatgactggaaagaagtggcaccaggggagaaaagtgtgcctgagacgcggtctggcccatcaccacatcagcaggctattgtcactgccatgcctggtggcctgcctgtacccacgagccctaacatccagccgtccccagctcacgagacagggcagggcattgttcatgcactgaccgacctcagcagccccggcatgacctcagggaacggaaactctgcctccagcatcgccggcactgccccccagaatggtgagaataaaccaccacaggccattgtgaaaccccaaatcctgacgcatgttatcgaagggtttgtgatccaggagggggcggagcctttcccggtgggacgctcgtccctgctggtggggaatctcaagaagaagtatgcacaggggttcctgcctgagaaacttccacagcaggatcacaccaccaccactgactcggagatggaggagccctatctgcaagaatccaaagaggagggtgctcccctcaaactcaagtgtgagctctgtggccgggtggactttgcctataagttcaagcgttccaagcgcttctgttccatggcttgtgcaaagaggtacaacgtgggatgcaccaaacgggtgggacttttccactcagaccggagcaagctgcagaaggcaggagctgcgacccacaaccgccgtcgggccagcaaagccagtctgccaccacttaccaaggataccaagaagcagccaacaggcactgtgcccctttcggttactgctgctttgcagctaacacacagccaggaagactccagccgttgctcagataactcaagctatgaggaacccttgtcacccatctcagccagctcatctacttcccgccggcgacaaggccagcgggacctggagctccccgacatgcatatgcgggacctggtgggcatgggacaccacttcctgccaagtgagcccaccaagtggaatgtagaagacgtctacgaattcatccgctctctgccaggctgccaggagatagcagaggaattccgtgcccaggaaatcgacgggcaagccctgctgctgctcaaggaggaccacctgatgagcgccatgaacatcaagctggggcccgccctgaagatctacgcccgcatcagcatgctcaaggactcctagggctggtggcagccaggattctggcccagggcgcctcctcccgactgagcagagccagacagacattcctgaggggcccagaaatggggccggttggagggcaggggctctccctaggggcatagctggtgaggaggtctgggcacctcctccatggctctcaggggcctttcatttctgtgggaggggcagagaggtaggtggcacagaagatggggctttatgcttgtaaatattgatagcactggcttcctccaaagtcccaatactctagccccgctctcttcccctctttctgtcccccattttccagggggtatatggtcagggctccccaacctgagttgggttacttcaagggcagccagcaggcctggatggaggcctagaaagcccttgccttccttcctcccacttctttctccaggcctggttaactcttccgttgtcagcttctcccccttcagcctgtttctgcagcagccagggttctcccccctacaccctctgcaggtggagagagagaagctgggcccagccgggccgtgcctgctggcacagacgccttaacgctgtgtgtatgactgtgtgactgtgtgggagcctggactgacagataggccaagggctactctctggcatctccaggtgttttgtagcaaacagccacttagtgctttgtcctggactccactcagcctcaggatggggaatagccaagaatggcagcctcagcgcagaggcaaggtcagaaagagacggcgcttcagagtttcctttccagacacccctccccgcactgtgaagttcccctgaccgccctcctggttcacaaagagcattaagaaagctgcggtggtctgagcaacatagcccaaagggctgagcctcctggcctgcctgcccgcccaccctgggagtcccagtggtgaggctcagagaactgctaaggggaaagaacagctggagtttctgttgatgtgaagaaggcagctcttggcctcccactcccacacttctttgcctataaatcttcctagcagcaatttgagctacctgaggaggaggcagggcagaaagggcgagggcctgcctctgacctgccgtgtcctttgcaggaaggaggtaggcacctttctgagcttattctattccccacccacacccccaggcagggttggaaatgaaggacttttttaacctttgttttgttttttaaaaataaatctgtaaaatctg

SEQ ID NO: 167315 - DNA, 2550 bp, Homo sapiens
  Payload ID: 12922
  Gene Symbol: PHC2
  Gene Name: polyhomeotic homolog 2 (Drosophila)
  Uniprot ID: Q8IXK0
  ENST ID: ENST00000373418
  CDS Start-End: 340-1311
gcggctgcagccctcgagcgcccgccgcgcgcgcgcgcgcaaccccggccgccgcccgcgctcccgccccggcctcgcgcccccgtcccggcctcgcgccccggccgccctttgttgacgccggccaggccggtgcggtcggatgcgccgcggcagccccgggccccggctcggaggctcccggcggagaggaggcggcccgcccgggcccgggaccccgcgcgagtcggcgcccggccgaggggctgcgtaggccccgcccggccaggcccagccgggccctggacagagacagggcagggcattgttcatgcactgaccgacctcagcagccccggcatgacctcagggaacggaaactctgcctccagcatcgccggcactgccccccagaatggtgagaataaaccaccacaggccattgtgaaaccccaaatcctgacgcatgttatcgaagggtttgtgatccaggagggggcggagcctttcccggtgggacgctcgtccctgctggtggggaatctcaagaagaagtatgcacaggggttcctgcctgagaaacttccacagcaggatcacaccaccaccactgactcggagatggaggagccctatctgcaagaatccaaagaggagggtgctcccctcaaactcaagtgtgagctctgtggccgggtggactttgcctataagttcaagcgttccaagcgcttctgttccatggcttgtgcaaagaggtacaacgtgggatgcaccaaacgggtgggacttttccactcagaccggagcaagctgcagaaggcaggagctgcgacccacaaccgccgtcgggccagcaaagccagtctgccaccacttaccaaggataccaagaagcagccaacaggcactgtgcccctttcggttactgctgctttgcagctaacacacagccaggaagactccagccgttgctcagataactcaagctatgaggaacccttgtcacccatctcagccagctcatctacttcccgccggcgacaaggccagcgggacctggagctccccgacatgcatatgcgggacctggtgggcatgggacaccacttcctgccaagtgagcccaccaagtggaatgtagaagacgtctacgaattcatccgctctctgccaggctgccaggagatagcagaggaattccgtgcccaggaaatcgacgggcaagccctgctgctgctcaaggaggaccacctgatgagcgccatgaacatcaagctggggcccgccctgaagatctacgcccgcatcagcatgctcaaggactcctagggctggtggcagccaggattctggcccagggcgcctcctcccgactgagcagagccagacagacattcctgaggggcccagaaatggggccggttggagggcaggggctctccctaggggcatagctggtgaggaggtctgggcacctcctccatggctctcaggggcctttcatttctgtgggaggggcagagaggtaggtggcacagaagatggggctttatgcttgtaaatattgatagcactggcttcctccaaagtcccaatactctagccccgctctcttcccctctttctgtcccccattttccagggggtatatggtcagggctccccaacctgagttgggttacttcaagggcagccagcaggcctggatggaggcctagaaagcccttgccttccttcctcccacttctttctccaggcctggttaactcttccgttgtcagcttctcccccttcagcctgtttctgcagcagccagggttctcccccctacaccctctgcaggtggagagagagaagctgggcccagccgggccgtgcctgctggcacagacgccttaacgctgtgtgtatgactgtgtgactgtgtgggagcctggactgacagataggccaagggctactctctggcatctccaggtgttttgtagcaaacagccacttagtgctttgtcctggactccactcagcctcaggatggggaatagccaagaatggcagcctcagcgcagaggcaaggtcagaaagagacggcgcttcagagtttcctttccagacacccctccccgcactgtgaagttcccctgaccgccctcctggttcacaaagagcattaagaaagctgcggtggtctgagcaacatagcccaaagggctgagcctcctggcctgcctgcccgcccaccctgggagtcccagtggtgaggctcagagaactgctaaggggaaagaacagctggagtttctgttgatgtgaagaaggcagctcttggcctcccactcccacacttctttgcctataaatcttcctagcagcaatttgagctacctgaggaggaggcagggcagaaagggcgagggcctgcctctgacctgccgtgtcctttgcaggaaggaggtaggcacctttctgagcttattctattccccacccacacccccaggcagggttggaaatgaaggacttttttaacctttgttttgttttttaaaaataaatctgtaaaatctg

SEQ ID NO: 167316 - DNA, 2799 bp, Homo sapiens
  Payload ID: 12922
  Gene Symbol: PHC2
  Gene Name: polyhomeotic homolog 2 (Drosophila)
  ENST ID: ENST00000373422
  CDS Start-End: 166-1560
tcaaagcacctgcagccccaatttgtgatccagcagcagccacagccacaacagcagcagccgccgccccagcagtcacggcctgtgctccaagctgagccccacccccagctcgcctcagtctctccaagcgtggccctccagcccagctcagaggcccatgccatgccactaggcccggttacacccgccctgccactccagtgtcccactgccaacctgcacaagcctggcggcagtcagcagtgtcaccctcccacacctgatactgggcctcagaatggacatcccgagggcgtgccccacacccctcaacgcaggttccagcacacttcagctgtcatcttacaactgcagcctgcttcaccagtgccccagcagtgtgtccctgatgactggaaagaagtggcaccaggggagaaaagtgtgcctgagacgcggtctggcccatcaccacatcagcaggctattgtcactgccatgcctggtggcctgcctgtacccacgagccctaacatccagccgtccccagctcacgagacagggcagggcattgttcatgcactgaccgacctcagcagccccggcatgacctcagggaacggaaactctgcctccagcatcgccggcactgccccccagaatggtgagaataaaccaccacaggccattgtgaaaccccaaatcctgacgcatgttatcgaagggtttgtgatccaggagggggcggagcctttcccggtgggacgctcgtccctgctggtggggaatctcaagaagaagtatgcacaggggttcctgcctgagaaacttccacagcaggatcacaccaccaccactgactcggagatggaggagccctatctgcaagaatccaaagaggagggtgctcccctcaaactcaagtgtgagctctgtggccgggtggactttgcctataagttcaagcgttccaagcgcttctgttccatggcttgtgcaaagaggtacaacgtgggatgcaccaaacgggtgggacttttccactcagaccggagcaagctgcagaaggcaggagctgcgacccacaaccgccgtcgggccagcaaagccagtctgccaccacttaccaaggataccaagaagcagccaacaggcactgtgcccctttcggttactgctgctttgcagctaacacacagccaggaagactccagccgttgctcagataactcaagctatgaggaacccttgtcacccatctcagccagctcatctacttcccgccggcgacaaggccagcgggacctggagctccccgacatgcatatgcgggacctggtgggcatgggacaccacttcctgccaagtgagcccaccaagtggaatgtagaagacgtctacgaattcatccgctctctgccaggctgccaggagatagcagaggaattccgtgcccaggaaatcgacgggcaagccctgctgctgctcaaggaggaccacctgatgagcgccatgaacatcaagctggggcccgccctgaagatctacgcccgcatcagcatgctcaaggactcctagggctggtggcagccaggattctggcccagggcgcctcctcccgactgagcagagccagacagacattcctgaggggcccagaaatggggccggttggagggcaggggctctccctaggggcatagctggtgaggaggtctgggcacctcctccatggctctcaggggcctttcatttctgtgggaggggcagagaggtaggtggcacagaagatggggctttatgcttgtaaatattgatagcactggcttcctccaaagtcccaatactctagccccgctctcttcccctctttctgtcccccattttccagggggtatatggtcagggctccccaacctgagttgggttacttcaagggcagccagcaggcctggatggaggcctagaaagcccttgccttccttcctcccacttctttctccaggcctggttaactcttccgttgtcagcttctcccccttcagcctgtttctgcagcagccagggttctcccccctacaccctctgcaggtggagagagagaagctgggcccagccgggccgtgcctgctggcacagacgccttaacgctgtgtgtatgactgtgtgactgtgtgggagcctggactgacagataggccaagggctactctctggcatctccaggtgttttgtagcaaacagccacttagtgctttgtcctggactccactcagcctcaggatggggaatagccaagaatggcagcctcagcgcagaggcaaggtcagaaagagacggcgcttcagagtttcctttccagacacccctccccgcactgtgaagttcccctgaccgccctcctggttcacaaagagcattaagaaagctgcggtggtctgagcaacatagcccaaagggctgagcctcctggcctgcctgcccgcccaccctgggagtcccagtggtgaggctcagagaactgctaaggggaaagaacagctggagtttctgttgatgtgaagaaggcagctcttggcctcccactcccacacttctttgcctataaatcttcctagcagcaatttgagctacctgaggaggaggcagggcagaaagggcgagggcctgcctctgacctgccgtgtcctttgcaggaaggaggtaggcacctttctgagcttattctattccccacccacacccccaggcagggttggaaatgaaggacttttttaacctttgttttgttttttaaaaataaatctgtaaaatctg

SEQ ID NO: 167317 - DNA, 3789 bp, Homo sapiens
  Payload ID: 12922
  Gene Symbol: PHC2
  Gene Name: polyhomeotic homolog 2 (Drosophila)
  ENST ID: ENST00000431992
  CDS Start-End: 55-2547
catctgcctgcccttctgccatccgagcgccctgactgcgccacactgcaggccatggagaatgagctgccagtcccacatacatctagcagtgcctgtgccaccagcagtaccagcggggccagtagcagcagtggctgcaacaacagcagcagtggtggaagtggccgccccaccgggccccagatttctgtgtacagtggtattccagaccggcagaccgtgcaggtgatccagcaggccctgcacagacagcccagcacggccgctcagtacctgcagcagatgtacgccgcccagcagcagcacctcatgctgcagaccgcggcgctccagcagcagcacctcagcagcgcccagctccagagcctggcagccgtacagcaggcaagcctggtatccaatagacaaggaagcacttcaggcagcaatgtgtctgcgcaggccccggcccagtcatcttcgatcaacctggcagcctccccagcagcagcccagctcctcaaccgggcccagagtgtgaactctgcagcagcctcaggcatcgctcagcaggctgtgctcttgggcaacacgtcttccccagccctgactgcaagccaagcacagatgtatctgagggcacagatggtacagaacttgaccctccgaacacagcagacaccagcggcagcagcctcgggccccacccccactcagcctgtcctgcccagcttggccctgaaacccacgccgggcggtagccagcctctgcctaccccagcacagagcagaaatactgctcaggcttcccctgcaggtgccaagcctggcatagctgacagtgtgatggagccacacaagaaaggagatggcaacagcagtgtgccagggagcatggaaggccgggctgggctcagccggacggttcctgctgtggctgcccaccccctcattgcaccagcctatgctcagctgcagccacaccagctcctcccacagccatcctcaaagcacctgcagccccaatttgtgatccagcagcagccacagccacaacagcagcagccgccgccccagcagtcacggcctgtgctccaagctgagccccacccccagctcgcctcagtctctccaagcgtggccctccagcccagctcagaggcccatgccatgccactaggcccggttacacccgccctgccactccagtgtcccactgccaacctgcacaagcctggcggcagtcagcagtgtcaccctcccacacctgatactgggcctcagaatggacatcccgagggcgtgccccacacccctcaacgcaggttccagcacacttcagctgtcatcttacaactgcagcctgcttcaccagtgccccagcagtgtgtccctgatgactggaaagaagtggcaccaggggagaaaagtgtgcctgagacgcggtctggcccatcaccacatcagcaggctattgtcactgccatgcctggtggcctgcctgtacccacgagccctaacatccagccgtccccagctcacgagacagggcagggcattgttcatgcactgaccgacctcagcagccccggcatgacctcagggaacggaaactctgcctccagcatcgccggcactgccccccagaatggtgagaataaaccaccacaggccattgtgaaaccccaaatcctgacgcatgttatcgaagggtttgtgatccaggagggggcggagcctttcccggtgggacgctcgtccctgctggtggggaatctcaagaagaagtatgcacaggggttcctgcctgagaaacttccacagcaggatcacaccaccaccactgactcggagatggaggagccctatctgcaagaatccaaagaggagggtgctcccctcaaactcaagtgtgagctctgtggccgggtggactttgcctataagttcaagcgttccaagcgcttctgttccatggcttgtgcaaagaggtacaacgtgggatgcaccaaacgggtgggacttttccactcagaccggagcaagctgcagaaggcaggagctgcgacccacaaccgccgtcgggccagcaaagccagtctgccaccacttaccaaggataccaagaagcagccaacaggcactgtgcccctttcggttactgctgctttgcagctaacacacagccaggaagactccagccgttgctcagataactcaagctatgaggaacccttgtcacccatctcagccagctcatctacttcccgccggcgacaaggccagcgggacctggagctccccgacatgcatatgcgggacctggtgggcatgggacaccacttcctgccaagtgagcccaccaagtggaatgtagaagacgtctacgaattcatccgctctctgccaggctgccaggagatagcagaggaattccgtgcccaggaaatcgacgggcaagccctgctgctgctcaaggaggaccacctgatgagcgccatgaacatcaagctggggcccgccctgaagatctacgcccgcatcagcatgctcaaggactcctagggctggtggcagccaggattctggcccagggcgcctcctcccgactgagcagagccagacagacattcctgaggggcccagaaatggggccggttggagggcaggggctctccctaggggcatagctggtgaggaggtctgggcacctcctccatggctctcaggggcctttcatttctgtgggaggggcagagaggtaggtggcacagaagatggggctttatgcttgtaaatattgatagcactggcttcctccaaagtcccaatactctagccccgctctcttcccctctttctgtcccccattttccagggggtatatggtcagggctccccaacctgagttgggttacttcaagggcagccagcaggcctggatggaggcctagaaagcccttgccttccttcctcccacttctttctccaggcctggttaactcttccgttgtcagcttctcccccttcagcctgtttctgcagcagccagggttctcccccctacaccctctgcaggtggagagagagaagctgggcccagccgggccgtgcctgctggcacagacgccttaacgctgtgtgtatgactgtgtgactgtgtgggagcctggactgacagataggccaagggctactctctggcatctccaggtgttttgtagcaaacagccacttagtgctttgtcctggactccactcagcctcaggatggggaatagccaagaatggcagcctcagcgcagaggcaaggtcagaaagagacggcgcttcagagtttcctttccagacacccctccccgcactgtgaagttcccctgaccgccctcctggttcacaaagagcattaagaaagctgcggtggtctgagcaacatagcccaaagggctgagcctcctggcctgcctgcccgcccaccctgggagtcccagtggtgaggctcagagaactgctaaggggaaagaacagctggagtttctgttgatgtgaagaaggcagctcttggcctcccactcccacacttctttgcctataaatcttcctagcagcaatttgagctacctgaggaggaggcagggcagaaagggcgagggcctgcctctgacctgccgtgtcctttgcaggaaggaggtaggcacctttctgagcttattctattccccacccacacccccaggcagggttggaaatgaaggacttttttaacctttgttttgttttttaaaaataaatctgtaaaatctgtct

SEQ ID NO: 167318 - DNA, 680 bp, Homo sapiens
  Payload ID: 12923
  Gene Symbol: PHC3
  Gene Name: polyhomeotic homolog 3 (Drosophila)
  ENST ID: ENST00000486042
  CDS Start-End: 1-670
gtcagaagaggaacttccagctgcagaagctttggtccagttgccatttcagactcttcctcctccacagactgttgcggtaaacctacaagtgcaaccaccagcacctgttgatccaccagtgggaatgcatttgaaccagtgtcatctgcacaaagttttttctcttaaggtttatcaggtagaagatgtgtgtgaagaagaaatgccagaagagtcagatgaatgtgtccggatggatagaaccccaccaccacccactttgtctccagcagctataacagtggggagaggagaagatttgacttctgaacatcctttgttagagcaagtggaattacctgctgtggcatcagtcagtgcttcagtaattaaatctccatcagatccctcacatgtttctgttccaccacctccattgttacttccagctgccaccacaaggagtaacagtacatctatgcacagtagcattcccagtatagagaacaaacctccacaggctattgttaaaccacagatcctaacccatgttattgaaggctttgtgattcaggagggattggagccatttcctgtaagtagcaagcatatttgtgtgtgtgtttgtaatttatataacattattttaaaagttacatattactgttctctaataaaaagcttgtaattttatttca

SEQ ID NO: 167319 - DNA, 1075 bp, Homo sapiens
  Payload ID: 12923
  Gene Symbol: PHC3
  Gene Name: polyhomeotic homolog 3 (Drosophila)
  ENST ID: ENST00000481639
  CDS Start-End: 33-476
gcgcagcccatgttagtgatggaggagagaagatggcggaagcggaatttaaggaccatagtacagctatggatactgaaccaaacccgggaacatcttctgtgtcaacaacaaccagcagtaccaccaccaccaccatcaccacttcctcctctcgaatgcagcagccacagatctctgtctacagtggttcagaccgacatgctgtacaggcattgcatcggccccccagctcagctgctcagtaccttcagcaaatgtatgcagcccaacaacagcacttgatgctgcatactgcagctcttcagcagcagcatttaagcagctcccagcttcagagccttgctgctgttcaggcaagtttgtccagtggaagaccatctacatctcccacaggaagtgtcacacagcagtcaagtatgtcccaaacgtctgtaagttccctaaatttttttttcctggatttaaaattttaaagaattgttttccaaaagtaaactgttgttatttatgaagctgttattataatttgttgcatgctgtttaaagtaacaattgcccagaaatagaaatgataaaattcaagaattcagaactaatgttaaacttatgaaaatctgagtcttaaaaaaatctttttgtattatttcttgtatatccatttgcactgatcatgttcagatcttatgtggtttcagctttctgtgtgtattgaaagcctaaaatatacaatgcagggatattggccatgaatttactgtgatatacaatagtatgtcatgtccttggtagacatctaagcatttctaactttgtgcaattcacattttagaaattatactttcagcttacatgagttatttgggttcaatttgcaagtatccattcaagatagggtaatttattttgagaaaggagtaaaagaaagctgattcgctatattgcacatatatattgggaaattgtgccaagtttcccaggtaaaataaatttatgggcatggtaatacttgtttagcttttaattttggtataattttaaactgcaataataataaaaaaatttctgtatctac

SEQ ID NO: 167320 - DNA, 987 bp, Homo sapiens
  Payload ID: 12923
  Gene Symbol: PHC3
  Gene Name: polyhomeotic homolog 3 (Drosophila)
  ENST ID: ENST00000479467
  CDS Start-End: 33-632
gcgcagcccatgttagtgatggaggagagaagatggcggaagcggaatttaaggaccatagtacagctatggatactgaaccaaacccgggaacatcttctgtgtcaacaacaaccagcagtaccaccaccaccaccatcaccacttcctcctctcgaatgcagcagccacagatctctgtctacagtggttcagaccgacatgctgtacaggtaattcaacaggcattgcatcggccccccagctcagctgctcagtaccttcagcaaatgtatgcagcccaacaacagcacttgatgctgcatactgcagctcttcagcagcagcatttaagcagctcccagcttcagagccttgctgctgttcaggcaagtttgtccagtggaagaccatctacatctcccacaggaagtgtcacacagcagtcaaatcaacctctccacttctcctacacctgcacagttaataagccgttcccaggcttccagttctaccagcggcagtattacccaacagactatgttactagggagtacttcccctaccctaacggcaagccaagctcaaatgtatctccgagctcaaatgctgattttcacacccgctaccactgtggctgctgtacagtctgacattcctgttgtctcgtcgtcatcgtcatcttcctgtcagtctgcagctactcaggttcagaatttaacattacgcagccagaagttgggtgtattatctagctcacagaatggtccaccaaaaagcactagtcaaactcagtcattgacaatttgtcataacaaaacaacagtgaccagttctaaaatcagccaacgagatccttctccagaaagtaataagaaaggagagagcccaagcctggaatcacgaagcacagctgtcacccggacatcaagtattcaccagttaatagcaccaggtgggataaaacttttgttgaaaatagttgtattattcattttcttagcagac

SEQ ID NO: 167321 - DNA, 580 bp, Homo sapiens
  Payload ID: 12923
  Gene Symbol: PHC3
  Gene Name: polyhomeotic homolog 3 (Drosophila)
  ENST ID: ENST00000466189
  CDS Start-End: 35-580
atgcgcagcccatgttagtgatggaggagagaagatggcggaagcggaatttaaggaccatagtacagctatggatactgaaccaaacccgggaacatcttctgtgtcaacaacaaccagcagtaccaccaccaccaccatcaccacttcctcctctcgaatgcagcagccacagatctctgtctacagtggttcagaccgacatgctgtacaggtaattcaacaggcattgcatcggccccccagctcagctgctcagtaccttcagcaaatgtatgcagcccaacaacagcacttgatgctgcatactgcagctcttcagcagcagcatttaagcagctcccagcttcagagccttgctgctgttcaggcaagtttgtccagtggaagaccatctacatctcccacaggaagtgtcacacagcagtcaagtatgtcccaaacgtctgttcagaatttaacattacgcagccagaagttgggtgtattatctagctcacagaatggtccaccaaaaagcactagtcaaactcagtcattgacaatttgtcataacaaaacaacagtgaccagttctaaa

SEQ ID NO: 167322 - DNA, 657 bp, Homo sapiens
  Payload ID: 12923
  Gene Symbol: PHC3
  Gene Name: polyhomeotic homolog 3 (Drosophila)
  ENST ID: ENST00000484931
  CDS Start-End: 16-657
gatggaggagagaagatggcggaagcggaatttaaggaccatagtacagctatggatactgaaccaaacccgggaacatcttctgtgtcaacaacaaccagcagtaccaccaccaccaccatcaccacttcctcctctcgaatgcagcagccacagatctctgtctacagtggttcagaccgacatgctgtacaggtaattcaacaggcattgcatcggccccccagctcagctgctcagtaccttcagcaaatgtatgcagcccaacaacagcacttgatgctgcatactgcagctcttcagcagcagcatttaagcagctcccagcttcagagccttgctgctgttcaggcaagtttgtccagtggaagaccatctacatctcccacaggaagtgtcacacagcagtcaacttcatattctccaattcagcctcattctctaataaaacatcagcagattcctcttcattcaccaccttccaaagtttcccatcatcagctgatattacaacagcagcaacagcaaattcagccaatcacacttcagaattcaactcaagacccacccccatcccagcactgtataccactccagaaccatggccttcctccagctcccagtaatgcccagtcacagcattgttcaccgattcag

SEQ ID NO: 167323 - DNA, 913 bp, Homo sapiens
  Payload ID: 12923
  Gene Symbol: PHC3
  Gene Name: polyhomeotic homolog 3 (Drosophila)
  ENST ID: ENST00000484068
  CDS Start-End: 1-485
gtcgttggaatcgtaagcctgataatcaaagtcttgggcatcgtggccgtcgtccaagtggccctgatggggcagcgagagaacatatccttaggcagcttccaattacttatccatctgcagaagaagacttggcttctcatgaagattctgtgccatctgctatgacaactcgtctgcgcaggcagagcgagcgggaaagagaacgtgagcttcgggatgtgagaattcggaaaatgcctgagaacagtgacttgctaccagttgcacaaacagagccatctatatggacagttgatgatgtctgggccttcatccattctttgcctggctgccaggatatcgcagatgaattcagagcacaggagattgatggacaggcccttctcttgctgaaagaagaccatctcatgagtgcaatgaatatcaagctaggcccagccctgaagatctgtgcacgcatcaactctctgaaggaatcttaacaggaacatgaagccttgataaaacagcagttttacttttctcacaaaaacttgtaagatctgatcatagagaggtggacatatgattgaagtcaggttgaacagtcattccccgggactgtatatttgaagaagttaggagatgctttaagtaagtgtaattaattatgaaagccctgagctgctggcagccagaacacccactttgtggacacaaaatggaaaccgacaactcagagagattctcctagtagtttactaagtaagttcttgccaatatccagcttgttcttagaatggctcaggttgagtttgtattacctgctactcaaagaattcttgactgactctccaggagcatttcccaacttgtctttatagatgcttaattaattaattttagctaattaaagagacttgtgtgctca

SEQ ID NO: 167324 - DNA, 2595 bp, Homo sapiens
  Payload ID: 12923
  Gene Symbol: PHC3
  Gene Name: polyhomeotic homolog 3 (Drosophila)
  ENST ID: ENST00000467570
  CDS Start-End: 35-2521
atgcgcagcccatgttagtgatggaggagagaagatggcggaagcggaatttaaggaccatagtacagctatggatactgaaccaaacccgggaacatcttctgtgtcaacaacaaccagcagtaccaccaccaccaccatcaccacttcctcctctcgaatgcagcagccacagatctctgtctacagtggttcagaccgacatgctgtacaggtaattcaacaggcattgcatcggccccccagctcagctgctcagtaccttcagcaaatgtatgcagcccaacaacagcacttgatgctgcatactgcagctcttcagcagcagcatttaagcagctcccagcttcagagccttgctgctgttcaggcaagtttgtccagtggaagaccatctacatctcccacaggaagtgtcacacagcagtcaagtatgtcccaaacgtctctgattttcacacccgctaccactgtggctgctgtacagtctgacattcctgttgtctcgtcgtcatcgtcatcttcctgtcagtctgcagctactcaggttcagaatttaacattacgcagccagaagttgggtgtattatctagctcacagaatggtccaccaaaaagcactagtcaaactcagtcattgacaatttgtcataacaaaacaacagtgaccagttctaaaatcagccaacgagatccttctccagaaagtaataagaaaggagagagcccaagcctggaatcacgaagcacagctgtcacccggacatcaagtattcaccagttaatagcaccagcttcatattctccaattcagcctcattctctaataaaacatcagcagattcctcttcattcaccaccttccaaagtttcccatcatcagctgatattacaacagcagcaacagcaaattcagccaatcacacttcagaattcaactcaagacccacccccatcccagcactgtataccactccagaaccatggccttcctccagctcccagtaatgcccagtcacagcattgttcaccgattcagagtcatccctctcctttaacagtgtctcctaatcagtcacagtcagcacagcagtctgtagtggtgtctcctccaccacctcattcaccaagtcagtctcctactataattattcatccacaagcacttattcagccacaccctcttgtgtcatcagctctccagccagggccaaatttgcagcagtccactgctaatcaggtgcaagctacagcacagttgaatcttccatcccatcttccacttccagcttcccctgttgtacacattggcccagttcagcagtctgccttggtatccccaggccagcagattgtctctccatcacaccagcaatattcatccctgcagtcctctccaatcccaattgcaagtcctccacagatgtcgacatctcctccagctcagattccaccactgcccttgcagtctatgcagtctttacaagtgcagcctgaaattctgtcccagggccaggttttggtgcagaatgctttggtgtcagaagaggaacttccagctgcagaagctttggtccagttgccatttcagactcttcctcctccacagactgttgcggtaaacctacaagtgcaaccaccagcacctgttgatccaccagtggtttatcaggtagaagatgtgtgtgaagaagaaatgccagaagagtcagatgaatgtgtccggatggatagaaccccaccaccacccactttgtctccagcagctataacagtggggagaggagaagatttgacttctgaacatcctttgttagagcaagtggaattacctgctgtggcatcagtcagtgcttcagtaattaaatctccatcagatccctcacatgtttctgttccaccacctccattgttacttccagctgccaccacaaggagtaacagtacatctatgcacagtagcattcccagtatagagaacaaacctccacaggctattgttaaaccacagatcctaacccatgttattgaaggctttgtgattcaggagggattggagccatttcctgtgagtcgttcctctttgctaatagaacagcctgtgaaaaaacggcctcttttggataatcaggtgataaattcagtgtgtgttcagccagagctacagaataatacaaaacatgcggataattcatctgacacagagatggaagacatgattgctgaagagacattagaagaaatggacagtgagttgctcaagtgtgaattctgtgggaaaatgggatatgctaatgaatttttgcggtcaaaacgattctgcactatgtcatgtgccaaaaggtacaatgttagctgttctaaaaaatttgcacttagtcgttggaatcgtaagcctgataatcaaagtcttgggcatcgtggccgtcgtccaagtggccctgatggggcagcgagagaacatatccttaggcagaagaagacttggcttctcatgaagattctgtgccatctgctatgacaactcgtctgcgcaggcagagcgagcgggaaagagaacgtgagcttcgggatgtgagaattcggaaaatgcct

SEQ ID NO: 167325 - DNA, 772 bp, Homo sapiens
  Payload ID: 12923
  Gene Symbol: PHC3
  Gene Name: polyhomeotic homolog 3 (Drosophila)
  ENST ID: ENST00000475729
  CDS Start-End: 31-772
gcagcccatgttagtgatggaggagagaagatggcggaagcggaatttaaggaccatagtacagctatggatactgaaccaaacccgggaacatcttctgtgtcaacaacaaccagcagtaccaccaccaccaccatcaccacttcctcctctcgaatgcagcagccacagatctctgtctacagtggttcagaccgacatgctgtacaggtaattcaacaggcattgcatcggccccccagctcagctgctcagtaccttcagcaaatgtatgcagcccaacaacagcacttgatgctgcatactgcagctcttcagcagcagcatttaagcagctcccagcttcagagccttgctgctgttcaggcaagtttgtccagtggaagaccatctacatctcccacaggaagtgtcacacagcagtcaagtatgtcccaaacgtctatcaacctctccacttctcctacacctgcacagttaataagccgttcccaggcttccagttctaccagcggcagtattacccaacagactatgttactagggagtacttcccctaccctaacggcaagccaagctcaaatgtatctccgagctcaaatgctgattttcacacccgctaccactgtggctgctgtacagtctgacattcctgttgtctcgtcgtcatcgtcatcttcctgtcagtctgcagctactcaggttcagaatttaacattacgcagccagaagttgggtgtattatctagctcacagaatggtccaccaaaaa

SEQ ID NO: 167326 - DNA, 5030 bp, Homo sapiens
  Payload ID: 12923
  Gene Symbol: PHC3
  Gene Name: polyhomeotic homolog 3 (Drosophila)
  Uniprot ID: Q8NDX5
  ENST ID: ENST00000494943
  CDS Start-End: 70-3021
agtgatggaggagagaagatggcggaagcggagtgagtgactagatgatttaaggaccatagtacagctatggatactgaaccaaacccgggaacatcttctgtgtcaacaacaaccagcagtaccaccaccaccaccatcaccacttcctcctctcgaatgcagcagccacagatctctgtctacagtggttcagaccgacatgctgtacaggtaattcaacaggcattgcatcggccccccagctcagctgctcagtaccttcagcaaatgtatgcagcccaacaacagcacttgatgctgcatactgcagctcttcagcagcagcatttaagcagctcccagcttcagagccttgctgctgttcaggcaagtttgtccagtggaagaccatctacatctcccacaggaagtgtcacacagcagtcaagtatgtcccaaacgtctatcaacctctccacttctcctacacctgcacagttaataagccgttcccaggcttccagttctaccagcggcagtattacccaacagactatgttactagggagtacttcccctaccctaacggcaagccaagctcaaatgtatctccgagctcaaatgctgattttcacacccgctaccactgtggctgctgtacagtctgacattcctgttgtctcgtcgtcatcgtcatcttcctgtcagtctgcagctactcaggttcagaatttaacattacgcagccagaagttgggtgtattatctagctcacagaatggtccaccaaaaagcactagtcaaactcagtcattgacaatttgtcataacaaaacaacagtgaccagttctaaaatcagccaacgagatccttctccagaaagtaataagaaaggagagagcccaagcctggaatcacgaagcacagctgtcacccggacatcaagtattcaccagttaatagcaccagcttcatattctccaattcagcctcattctctaataaaacatcagcagattcctcttcattcaccaccttccaaagtttcccatcatcagctgatattacaacagcagcaacagcaaattcagccaatcacacttcagaattcaactcaagacccacccccatcccagcactgtataccactccagaaccatggccttcctccagctcccagtaatgcccagtcacagcattgttcaccgattcagagtcatccctctcctttaacagtgtctcctaatcagtcacagtcagcacagcagtctgtagtggtgtctcctccaccacctcattcaccaagtcagtctcctactataattattcatccacaagcacttattcagccacaccctcttgtgtcatcagctctccagccagggccaaatttgcagcagtccactgctaatcaggtgcaagctacagcacagttgaatcttccatcccatcttccacttccagcttcccctgttgtacacattggcccagttcagcagtctgccttggtatccccaggccagcagattgtctctccatcacaccagcaatattcatccctgcagtcctctccaatcccaattgcaagtcctccacagatgtcgacatctcctccagctcagattccaccactgcccttgcagtctatgcagtctttacaagtgcagcctgaaattctgtcccagggccaggttttggtgcagaatgctttggtgtcagaagaggaacttccagctgcagaagctttggtccagttgccatttcagactcttcctcctccacagactgttgcggtaaacctacaagtgcaaccaccagcacctgttgatccaccagtggtttatcaggtagaagatgtgtgtgaagaagaaatgccagaagagtcagatgaatgtgtccggatggatagaaccccaccaccacccactttgtctccagcagctataacagtggggagaggagaagatttgacttctgaacatcctttgttagagcaagtggaattacctgctgtggcatcagtcagtgcttcagtaattaaatctccatcagatccctcacatgtttctgttccaccacctccattgttacttccagctgccaccacaaggagtaacagtacatctatgcacagtagcattcccagtatagagaacaaacctccacaggctattgttaaaccacagatcctaacccatgttattgaaggctttgtgattcaggagggattggagccatttcctgtgagtcgttcctctttgctaatagaacagcctgtgaaaaaacggcctcttttggataatcaggtgataaattcagtgtgtgttcagccagagctacagaataatacaaaacatgcggataattcatctgacacagagatggaagacatgattgctgaagagacattagaagaaatggacagtgagttgctcaagtgtgaattctgtgggaaaatgggatatgctaatgaatttttgcggtcaaaacgattctgcactatgtcatgtgccaaaaggtacaatgttagctgttctaaaaaatttgcacttagtcgttggaatcgtaagcctgataatcaaagtcttgggcatcgtggccgtcgtccaagtggccctgatggggcagcgagagaacatatccttaggcagcttccaattacttatccatctgcagaagaagacttggcttctcatgaagattctgtgccatctgctatgacaactcgtctgcgcaggcagagcgagcgggaaagagaacgtgagcttcgggatgtgagaattcggaaaatgcctgagaacagtgacttgctaccagttgcacaaacagagccatctatatggacagttgatgatgtctgggccttcatccattctttgcctggctgccaggatatcgcagatgaattcagagcacaggagattgatggacaggcccttctcttgctgaaagaagaccatctcatgagtgcaatgaatatcaagctaggcccagccctgaagatctgtgcacgcatcaactctctgaaggaatcttaacaggaacatgaagccttgataaaacagcagttttacttttctcacaaaaacttgtaaggtaaaggcctaacttggtctagaatatgacacttattgtggtggatagccaagcacattgggatctccacatcaaatactgacatttcttctacaggtataataattcatcatgcattttcataattaataaacattggtaaaattaattttacaggttacatgaaacattgaaagacttgttacagagggccatgatatttttcaaagaaatgtgttatactagataatttttttaaaggtgatgtttatcattaatataaagaatccttttaaaagtaatttaatgatttacatttctcctcttttgattcaattttcttatacattttttctaccctattagttttctaaaggttgtcatgagaggtatattatggaataatttagtagtccagtgacagaatcgtatgaaatcagtgtacattttaaaaaacatgtcttttagacatatgctttatctataaaaaaggaattgtgttctagtatgaacaatactgatctggaagtgagaagagttagtttctattccaaacttgaccaagaatttggtttgactgagaacgttttcctctcagtttttgtacatttatttagagcagtggttctcagtggaggtcagttttgatcgccaggggacatctggcaatgttgagacattttggttgtcacagcttgggggtgggttcaggggagggttgctactggtgtctagtagttagaagccagagatgtttctaaacatcttataatgcacaggacagcacccctccactgtaaagaattattggttcaaaaatatcggtactgccaaggttgagaaactctgatatagaaggagtgataaatattgttttcacccaaaggaatacttttaaaggatgaagcttactaaacatatatgatggaagtattattcagataacattaatattctgctgaataattttttctagtttaatcatactagaaaaagaaaaaaaatctacaaattgtcctataaaataaggacaaacatgcaaataatttaactctcagaaagtactaattcattctgattatctttcatacctctgtgctcctctgcactgacgaagacataatatgattatacctatgaactagtgcacagccttttctggcaagaaaatagtttgtagcagatacgtggttgctctttggatttttttctattgttgaacatgctgggactagctagaatgcacattcctacttcctttaccaaacgtttgcatgcttcctgcaaagcacttaccaagtgatttctcttgaaccatcggatataattttgtatgtacatgtttgaggaaaaaaatgtaaagcaaaaccttttactgaacagtgttctatagaattatgacactaaaacaaaattgtttgtggaagccctgaaagctttatagtcctggacatcaaaaattttatttgagatgatgaatgttttgttttcatcttttcttatattaccacaattgagatattttagtaattgaaggaacatacacagatatttggcagaagtcgagtaaggaggggaaaaaaagagtccgtgagtttcagtcattttcactgctcttttcaaaaagattgtgttgagctggtagaagactaaagatgtcactgaagacatcacagatactatatttatcttttggctttgtgtacattagagaatgttgattatttttatacaaaaatacagcgggtaatttttttaatctttagatgcctcttgtttgaatgtatgctttgtggaattctttgtgtagtaatgttttaaaaaaagatgtttactgatagttacatgtaggattagaatatgtaatataatataaggctcatgttccagacctacgatagcttgtagtctatgttacgtatttctttatatcacatttttaatcattggattaaagtatcaaggaaagcta

SEQ ID NO: 167327 - DNA, 12666 bp, Homo sapiens
  Payload ID: 12923
  Gene Symbol: PHC3
  Gene Name: polyhomeotic homolog 3 (Drosophila)
  Uniprot ID: Q8NDX5
  ENST ID: ENST00000495893
  CDS Start-End: 33-3020
gcgcagcccatgttagtgatggaggagagaagatggcggaagcggaatttaaggaccatagtacagctatggatactgaaccaaacccgggaacatcttctgtgtcaacaacaaccagcagtaccaccaccaccaccatcaccacttcctcctctcgaatgcagcagccacagatctctgtctacagtggttcagaccgacatgctgtacaggtaattcaacaggcattgcatcggccccccagctcagctgctcagtaccttcagcaaatgtatgcagcccaacaacagcacttgatgctgcatactgcagctcttcagcagcagcatttaagcagctcccagcttcagagccttgctgctgttcaggcaagtttgtccagtggaagaccatctacatctcccacaggaagtgtcacacagcagtcaagtatgtcccaaacgtctatcaacctctccacttctcctacacctgcacagttaataagccgttcccaggcttccagttctaccagcggcagtattacccaacagactatgttactagggagtacttcccctaccctaacggcaagccaagctcaaatgtatctccgagctcaaatgctgattttcacacccgctaccactgtggctgctgtacagtctgacattcctgttgtctcgtcgtcatcgtcatcttcctgtcagtctgcagctactcaggttcagaatttaacattacgcagccagaagttgggtgtattatctagctcacagaatggtccaccaaaaagcactagtcaaactcagtcattgacaatttgtcataacaaaacaacagtgaccagttctaaaatcagccaacgagatccttctccagaaagtaataagaaaggagagagcccaagcctggaatcacgaagcacagctgtcacccggacatcaagtattcaccagttaatagcaccagcttcatattctccaattcagcctcattctctaataaaacatcagcagattcctcttcattcaccaccttccaaagtttcccatcatcagctgatattacaacagcagcaacagcaaattcagccaatcacacttcagaattcaactcaagacccacccccatcccagcactgtataccactccagaaccatggccttcctccagctcccagtaatgcccagtcacagcattgttcaccgattcagagtcatccctctcctttaacagtgtctcctaatcagtcacagtcagcacagcagtctgtagtggtgtctcctccaccacctcattcaccaagtcagtctcctactataattattcatccacaagcacttattcagccacaccctcttgtgtcatcagctctccagccagggccaaatttgcagcagtccactgctaatcaggtgcaagctacagcacagttgaatcttccatcccatcttccacttccagcttcccctgttgtacacattggcccagttcagcagtctgccttggtatccccaggccagcagattgtctctccatcacaccagcaatattcatccctgcagtcctctccaatcccaattgcaagtcctccacagatgtcgacatctcctccagctcagattccaccactgcccttgcagtctatgcagtctttacaagtgcagcctgaaattctgtcccagggccaggttttggtgcagaatgctttggtgtcagaagaggaacttccagctgcagaagctttggtccagttgccatttcagactcttcctcctccacagactgttgcggtaaacctacaagtgcaaccaccagcacctgttgatccaccagtggtttatcaggtagaagatgtgtgtgaagaagaaatgccagaagagtcagatgaatgtgtccggatggatagaaccccaccaccacccactttgtctccagcagctataacagtggggagaggagaagatttgacttctgaacatcctttgttagagcaagtggaattacctgctgtggcatcagtcagtgcttcagtaattaaatctccatcagatccctcacatgtttctgttccaccacctccattgttacttccagctgccaccacaaggagtaacagtacatctatgcacagtagcattcccagtatagagaacaaacctccacaggctattgttaaaccacagatcctaacccatgttattgaaggctttgtgattcaggagggattggagccatttcctgtgagtcgttcctctttgctaatagaacagcctgtgaaaaaacggcctcttttggataatcaggtgataaattcagtgtgtgttcagccagagctacagaataatacaaaacatgcggataattcatctgacacagagatggaagacatgattgctgaagagacattagaagaaatggacagtgagttgctcaagtgtgaattctgtgggaaaatgggatatgctaatgaatttttgcggtcaaaacgattctgcactatgtcatgtgccaaaaggtacaatgttagctgttctaaaaaatttgcacttagtcgttggaatcgtaagcctgataatcaaagtcttgggcatcgtggccgtcgtccaagtggccctgatggggcagcgagagaacatatccttaggcagcttccaattacttatccatctgcagaagaagacttggcttctcatgaagattctgtgccatctgctatgacaactcgtctgcgcaggcagagcgagcgggaaagagaacgtgagcttcgggatgtgagaattcggaaaatgcctgagaacagtgacttgctaccagttgcacaaacagagccatctatatggacagttgatgatgtctgggccttcatccattctttgcctggctgccaggatatcgcagatgaattcagagcacaggagattgatggacaggcccttctcttgctgaaagaagaccatctcatgagtgcaatgaatatcaagctaggcccagccctgaagatctgtgcacgcatcaactctctgaaggaatcttaacaggaacatgaagccttgataaaacagcagttttacttttctcacaaaaacttgtaaggtaaaggcctaacttggtctagaatatgacacttattgtggtggatagccaagcacattgggatctccacatcaaatactgacatttcttctacaggtataataattcatcatgcattttcataattaataaacattggtaaaattaattttacaggttacatgaaacattgaaagacttgttacagagggccatgatatttttcaaagaaatgtgttatactagataatttttttaaaggtgatgtttatcattaatataaagaatccttttaaaagtaatttaatgatttacatttctcctcttttgattcaattttcttatacattttttctaccctattagttttctaaaggttgtcatgagaggtatattatggaataatttagtagtccagtgacagaatcgtatgaaatcagtgtacattttaaaaaacatgtcttttagacatatgctttatctataaaaaaggaattgtgttctagtatgaacaatactgatctggaagtgagaagagttagtttctattccaaacttgaccaagaatttggtttgactgagaacgttttcctctcagtttttgtacatttatttagagcagtggttctcagtggaggtcagttttgatcgccaggggacatctggcaatgttgagacattttggttgtcacagcttgggggtgggttcaggggagggttgctactggtgtctagtagttagaagccagagatgtttctaaacatcttataatgcacaggacagcacccctccactgtaaagaattattggttcaaaaatatcggtactgccaaggttgagaaactctgatatagaaggagtgataaatattgttttcacccaaaggaatacttttaaaggatgaagcttactaaacatatatgatggaagtattattcagataacattaatattctgctgaataattttttctagtttaatcatactagaaaaagaaaaaaaatctacaaattgtcctataaaataaggacaaacatgcaaataatttaactctcagaaagtactaattcattctgattatctttcatacctctgtgctcctctgcactgacgaagacataatatgattatacctatgaactagtgcacagccttttctggcaagaaaatagtttgtagcagatacgtggttgctctttggatttttttctattgttgaacatgctgggactagctagaatgcacattcctacttcctttaccaaacgtttgcatgcttcctgcaaagcacttaccaagtgatttctcttgaaccatcggatataattttgtatgtacatgtttgaggaaaaaaatgtaaagcaaaaccttttactgaacagtgttctatagaattatgacactaaaacaaaattgtttgtggaagccctgaaagctttatagtcctggacatcaaaaattttatttgagatgatgaatgttttgttttcatcttttcttatattaccacaattgagatattttagtaattgaaggaacatacacagatatttggcagaagtcgagtaaggaggggaaaaaaagagtccgtgagtttcagtcattttcactgctcttttcaaaaagattgtgttgagctggtagaagactaaagatgtcactgaagacatcacagatactatatttatcttttggctttgtgtacattagagaatgttgattatttttatacaaaaatacagcgggtaatttttttaatctttagatgcctcttgtttgaatgtatgctttgtggaattctttgtgtagtaatgttttaaaaaaagatgtttactgatagttacatgtaggattagaatatgtaatataatataaggctcatgttccagacctacgatagcttgtagtctatgttacgtatttctttatatcacatttttaatcattggattaaagtatcaaggaaagctaggtactctataatgagttttcatttattagcagttaatcatcatgacagaattgtcatatgcttgacttttccctcttcttggaatttcagaacacaaatacaggctaagcattagtaagagatggcccacagtatgagagagagaggtgcaacggaaaatctcgcctggaattaaaacttttcatagattatccacggttaatacaaaatttattatatggggatagactgctccagcaataatgattacatcctataactgtattacctatggcctttaaggtatcaattttgaactgtgttgtaggctctccttttatttgttctctttcctaatagcagccattctgtacttattgaaagcccctgtgcctactgctgtcttaagtattcaggaggggcttacaagagggttttctattggagaataccgtataatcttaaatctagtccagatctctgttgtccccactcaaaacatacacaaaatatgcacttgcttttttcaagtgagtttttatttaaaaatggcttgtttgctatcacattggtgcagctgtttctttcaagatgagttaatcatcttaatttcaaagcttcagctatatataatggatatatagacaacactgagcatccacctctctcctgagctttaaagcagagtttcagtatgatataggtggggagagtaaattgttttcatatcctttcatactactactaatagttttaggattttgactggggagagataatgacaaacagaaagggaacatggaggttcttcctacttttgctacctaagtttgcattttctgacttccttgcagtgttgcactctttgtcccattgggataaaaagcataagtttgaaattttgctttaagccttgtgttcctggggaagttaaacaactaagagagctgatttgtaaaaattattttttatatgacattaatattcatcaagccttgtgtaggcatgtgtaagacacagctatgcagctttgagtagtcaatatagtatgagatagagtgttgtcccaaatcctcctgtcactttttaagtagcatattatttccctgatggtcctgttactttgctgttgaatgctctaaacagaactttttaaaaggtgtgttttaagagcagtcacctaggagtagacaaggtggaatgggaggagagaaatggtaatgcaaaagcttgagcatgggaagagtcagaggaggaggccatcatccttgttagcttagcctacttcaacactgagcacatttctgcacttttgaagtgaaattcatgttttacttagaagaaataattttctttcattagggatcccagttgatttttgtttcctggtgtatcaaaatacttagaactatgaaacaagtattattgtgatcatgcctttgaataatttttgacgtagcttatcttcatgtatcaagtataaaattataatgagacatctattcacaaatacaagtcttagattgaattgaaatgtgttatagtgccctgtctcccactgacttgttcagttaaatgtcttaaagtacattatgtacatcttcaggcttttggtaccacaatggcacaagtatggtagggaggcaatatagtcttaggctatatgcctatattaagtgtgtataaacaatttttgaaagaatacactattatagatgtatgtgagtgatgctgacctgacagccatatccagtggatgaaactgactggacacactgttaaaatgttttaaagatgtattttcagccagaacagcctggttatagtttgtggttttcaccttggtggattgcaggaacacatgcagcctactggcattgagcattagctaatggcatgaaagggcctcatctcactacctctctaaggcctctagctccaagaaaaccatgaaaacttctttcttggagagatctttgtctcagaatccttagagaggatttcgtatgggggctaactttaggaagggaggcagctggggcaggactttctgatacctgacagtcatgttccagagcaacctttgggcagtggaaactggcgcatctatgcaaaatgattgctcaatctctatcttgtgtactacatatgtaactagctgggccctaaggaaggttttctagggggaaggatagggaagtagaggaggagacaagtaggaggaacaaagcattctagacccaagaggatagaagatatttaggatagatatggctttcatccatagttcaaaataatgcgttttgttagatgccagttatagcagtaaataggttatagtttttatatgtcaagatttacctgtaatcagactcattctttcactctctatacccactgtctccatgcttgggagcatggatattaatagttccagtgatgtagaagttagtgatttttgatttctgaaaaaggtgagaaccttttattacagttggagaatatttgtcaaaaattcaaaggttgttgtaattgagttgccagaattacagagtttccattttcagatatcacagttgaatcacctctgtagattgttataaagagaggcattttaagatagtattttatttgctaggttgtgtctcagtctaagaattgggaaaagaagagctataggtttctctttcctagtctggatttcagtaaacacaagcctacctctgcttctttggttcacagcagtgtggatcatgaaatgaactgtttacccacattcatcaatattggtattttacaaatctacttggagcatttaatttcatctcaaagattgtgatccactttagataagcacaaatacagtattaggaaaagtaaatatgcaatcttactaaaatttcaacttgttaagctgtatatcttaaaagaaattatttggggctgggcatggtggctcacacctgtaatcccagcactttgggaggctgaggtgggtagatcacctgaggtcaggagttcgagaccagcctgaccaatatggtgaaaccctatctctactaaaaacacaaaaattagctgggtgtggtggcatgcacctgtaattccagctacttgggaggctgagacaggagaattgcttgaacccaggtggtggaggttgcagtgagccaagatcacacccctgcactccagcctgggtgacagagcgagactccatctcaaaaaaacaaaacaaaaaattatttgggaagatacgtcctcttttattagaagttcataaaatgtatcatatagttttgttcacagtagttatataagctttcttcaaataaatttaaaattagattaccttctttggaaaaagaatttcctaaatttttaagaattttcaaagttttacatattagtttttagaacctaatccgttttaaaattgtactatgagaaagcttttttttgaaagttgtaaagcattaatacaaataatacaaatataattattaccatcacattccagagaatatggctttttctaaactttcaatttagaaaacatacattaagggagaatctctgccctccttttcagctctgaagatcagcttttctactcagacacatgcacacaccccttccaagtgtcatgtttatgggaacatttgggaaatgttttccagatgttttattttttcccttttatagtttgttgacatttaattttacttaaagatgacaattttaatcggaaatgttagaggtacaacatagtgaggttctagctagctttatacttttgaaaaatatttttgtttctactgctttttacaagtactagtcctctcagtgatactggtggtgttcagtatgaatccatagaaagaaaacaaaatttgttgtttaaaaaaagcagagtaatgaatgaatttcagttttgaaaacaacataatttgaaaacactgttatactaacatggcaaggtgttaattaaatataagagtaaggtagtaagttcttttagagcacctgtttaaatttactccagtaatcatcttaaggattgatagtcaccatcacttattggcttaaaagttatatttcatggaatattatcagtgttaaatccaagctttgtggagctttaagtgatggtggtgaaaaagttggtgtttatgagagagtggtggggtgtctagtcattagtgaagttaaacatcaacctgttttagaaagaattttttagtcttgcctaaagtaaaccagaagtgtctagtgtttaaatctttatttagaatgcttctcttaaaagtattttttgttttgggtagtattaaataatcagtaaataatctatttcagtagtaaataatgaattaagatgatgatgaatgaggattaacacactggtctggagactggggttttatttcagtgggttagctgtgtgtgacatgttgggcaattactcagctgttttaacagcttccagatatgcagtatggtgcctgtactactcaaaagttgattttggtttaattcatctttaaggtacctcccagctctaaaactatgattctaggctgtgtaatggggttattcctactttattctctttccttttttaagggttcattttatacttaataagcatccatttcttgggtcacctacagtctttgttctcctaaggattaaaatagaaaattcatacataacaagcaaatgatgacattttcctaaatgctccttattggttaaccactgaatatatgaacacatatgaatattgtcattcatgtacttaaattcatttagcaaactatttgaacacttacatgtgcagtgtttggtgaacatgacatgaggaactagtagtaagtaaaatcttccccccaaaattcattgtggcttaaataaatatgaacataatcattactacttaatatactgagagggaatcttaataaacttggaactgggagggaatatttgtatacattgggtaaagggttaggctagatgacatctaaggggtctgagtgaatcatatcataatttttataacacatttcacatactaaacatcagttggccccatacctgattaagttacaaaatttaggagacttaacattaaggacttacaggttgagacagcccgtatttcacaacattattttgacacttgactctattccagagttgttgctatacaaggcatgtggcagaacaaaaaaaaagctggtgttgatataagagctttttacccagtattgacagtgagcaactttctttctttttttttttttttcttttttttttttttgagatgggttcgctctgttgcccaggctggtgtgcagtggtgcgatctcagctcactgcaacctccacctcccgggttgaagcgattgtcttgcctcagccttccaagtagctggaattacaggtgcccgccgccacacctggctaatttttgtatttttagtagagacggggcttcaccatgttggccaggctagtctcgaactcttgacctcaagtgatccacctgccttggcctccctaagtgctgggattacaggcatgagccaccacacctgtccgacagtgtagcaactttctaaaactgaaaaatctcaaaggagatcattggaactgacttgttcatttattttttgtttttaaattaagaaagattacacaaaataagtgttactgtactttaagctattacaaatatccaacttttaaagatatgtaagaatcagtaatattctagaaagcacatatatagtaaaagggcatcctttaaatgtagaacgggtaaacatgaaacagttccatgcttgaattgttaagtatctagggggtaaacattgaatgggagaatcatttattgggttaaggtcccttccttgtcattctgggatctgtgaatcacattgtaattcctgttgacaaagctttacttgttaacatcagttgatactgacattctccataaagatatagaatgaaaatatctattaaaaatagtttatcattgttttagcttttttgttttgtttgttttgagacagagtctcactgtcacccaggcttgagtgcagcggtgtgatcttggctcaatgcaacctccacctcccaggttcaatagattctcccaccttggcctcccaagtagctgggattactggcatgcaccactatgcctggccagttttttgtatttttagtagagatggggtttcaccatgttggccaggctggactcgaactcctgacctcaagtgatccgcccacctcagcctcccaaagtgccgggattataggcatgagccactgcgcctagcctgttgcagctttttaaagcaggaaaatatccatataaactgttgggttagaatctatattagaatctttcaaactaattgaaaacaggaagactatcatctaagtagccagataatctgggtttcaaaaagttattccatggtactggtttaaaaaatacttttcaagtgttttaatttttaaagtgtaactaattcttcaaatatgttatgctgttaaaatatgtattccataagtactttttgtatatgtattcttaaattttaaaaagtcaactgaatgcgcaaagatgatataattttggatgtagacatttaaactagattcccagtcctctccttcaaaagcttggtctttgtttttcctatagggaaaaaagtcaaaataagttccaaaaactatcctcaaagtagtattgtgcttgtagtaaatgaaggttggatggatggatactgacaatggtggcaggcatttcaagccttttaaattagtactttttgtcgtcttgcttattaaaattttgttaattttagcaaagaccaattgttgtgataaactggtgttttttggatgcttcaagcacacgttaaccaattttttaattccccttttggttcctcccattgttctaaaataggactttcatattattaaaacctcaaaagatgatccacccaggatgaacaaagatcaccaaggggaaagaaaacattttttatctttacagaaaacatgttaagattatatatagatgtattctttacattggatattgtattagagtcctccttacaagaaatgaaatagtttttagcactcttagcattagagttcctagattggtgttgatagctacagttttaaaatgtataacctgaaaatgaaggttaattttgcattgtaagagcacatttgatctatgtaaaaagtgtccatttggtgtatttttttaaaaaagagaaagcactttcatattaagtagcatgtgtatgaatttagattttcatatttgttgtgtctgtattcagtgaagtaaattgagcatttaaatgtttgttgatggcaacattaactattaaattaaagcaccttatactctgctgcttaacttgcttgtaattgcacctttgttacctgcacattttcatatagaatattgttgtaacattgcttcatgtgggtctggatggaagattagtgggcctacaggatcatttatttatattgtttatattacaataatatattgtagatcagttgtaagttcatttctttacaaataaaagcctcttccatttga

SEQ ID NO: 167328 - DNA, 2087 bp, Homo sapiens
  Payload ID: 12923
  Gene Symbol: PHC3
  Gene Name: polyhomeotic homolog 3 (Drosophila)
  Uniprot ID: Q8NDX5
  ENST ID: ENST00000497658
  CDS Start-End: 19-474
agtgatggaggagagaagatggcggaagcggaatttaaggaccatagtacagctatggatactgaaccaaacccgggaacatcttctgtgtcaacaacaaccagcagtaccaccaccaccaccatcaccacttcctcctctcgaatgcagcagccacagatctctgtctacagtggttcagaccgacatgctgtacaggtaattcaacaggcattgcatcggccccccagctcagctgctcagtaccttcagcaaatgtatgcagcccaacaacagcacttgatgctgcatactgcagctcttcagcagcagcatttaagcagctcccagcttcagagccttgctgctgttcaggcaagtttgtccagtggaagaccatctacatctcccacaggaagtgtcacacagcagtcaagtatgtcccaaacgtctgtaagttccctaaatttttttttcctggatttaaaattttaaagaattgttttccaaaagtaaactgttgttatttatgaagctgttattataatttgttgcatgctgtttaaagtaacaattgcccagaaatagaaatgataaaattcaagaattcagaactaatgttaaacttatgaaaatctgagtcttaaaaaaatctttttgtattatttcttgtatatccatttgcactgatcatgttcagatcttatgtggtttcagctttctgtgtgtattgaaagcctaaaatatacaatgcagggatattggccatgaatttactgtgatatacaatagtatgtcatgtccttggtagacatctaagcatttctaactttgtgcaattcacattttagaaattatactttcagcttacatgagttatttgggttcaatttgcaagtatccattcaagatagggtaatttattttgagaaaggagtaaaagaaagctgattcgctatattgcacatatatattgggaaattgtgccaagtttcccaggtaaaataaatttatgggcatggtaatacttgtttagcttttaattttggtataattttaaactgcaataataataaaaaaatttctgtatctactctactcagattaatcaattattgcatattgccccattactttatcattcattcttttccactacatgtatacatatttttttctgagtcatttgtaagttgagatatgttcctttattcctaaatactttgatgtgtatttcctaagaacaaggctattgttttttgaagccacagaaaaattactaaattcaggaaatataacattgatacagtgcagttcattttcacatttcatcatttgtctcaggtttcccaacctcatcactatggacattatgagccagataattctttgttgtcaggggctatcgtgtaatttataggatgtttagcagcatccctggctactagatgccggcagcttgtggtctttctccttcctctagtgtgacaactataggtgtttcctggtggggggcaaactgcctgtagttgagaacctaataatgtcctttctagatattttttcctggtccagaatggtaatactttgatacttcataaaattggctccaatacaatatagtttgtaggttgttaaggaattgaaggttaaggaattgtgctctatttcttcagctaagggtatggtctttgctaactacatgctgtggtcagcatatagctgtggttttttttgttgtttggtttttttttctggctgttgatctgactttttttttttggcgtgggaatgtcctggagtgtgaacaagattagtttaaaaagttccctatgacttgaagatgttagattaaatgaaaaacttaaataatgtaacctagctcttaagcattaatactggagtttttgtcattgacatcagatgtctttaatacaatggtaattaaggaaaggagtggtaaatattttgtgggctactgaaggaaattatatagacaaattctttattctgtgaaatactggaataacaataggatgtatttgtatagatatgttattttgaatttttttccttcatgttattaaaaggtatctttttaaactgtc

SEQ ID NO: 167329 - DNA, 609 bp, Homo sapiens
  Payload ID: 12923
  Gene Symbol: PHC3
  Gene Name: polyhomeotic homolog 3 (Drosophila)
  ENST ID: ENST00000472330
  CDS Start-End: 60-233
gagagaagatggcggaagcggagtgagtgactagatgatttaaggaccatagtacagctatggatactgaaccaaacccgggaacatcttctgtgtcaacaacaaccagcagtaccaccaccaccaccatcaccacttcctcctctcgaatgcagcagccacagatctctgtctacagtggttcagaccgacatgctgtacaggagctatatagccttgggtatgagacataatccccttgagcctcagaaaactaaaatgagggtaattcaacaggcattgcatcggccccccagctcagctgctcagtaccttcagcaaatgtatgcagcccaacaacagcacttgatgctgcatactgcagctcttcagcagcagcatttaagcagctcccagcttcagagccttgctgctgttcaggcaagtttgtccagtggaagaccatctacatctcccacaggaagtgtcacacagcagtcaagtatgtcccaaacgtctatcaacctctccacttctcctacacctgcacagttaataagccgttcccaggcttccagttctaccagcggcagtattacccaacagactatgttactagggagtacttcc

SEQ ID NO: 167330 - DNA, 2289 bp, Homo sapiens
  Payload ID: 12924
  Gene Symbol: POLI
  Gene Name: polymerase (DNA directed) iota
  ENST ID: ENST00000217800
  CDS Start-End: 1-2037
gttcatgatcaagtgttgcccacaccaaatgcttcatccagagtcatagtacatgtggatctggattgcttttatgcacaagtagaaatgatctcaaatccagagctaaaagacaaacctttaggggttcaacagaaatatttggtggttacctgcaactatgaagctaggaaacttggagttaagaaacttatgaatgtcagagatgcaaaagaaaagtgtccacagttggtattagttaatggagaagacctgacccgctacagagaaatgtcttataaggttacagaaatggttgagaagagactacagcagctgcaaagtgatgaactttctgcggtgactgtgtcgggtcatgtatacaataatcagtctataaacctgcttgacgtcttgcacatcagactacttgttggatctcagattgcagcagagatgcgggaagccatgtataatcagttggggctcactggctgtgctggagtggcttctaataaactgttggcaaaattagtttctggtgtctttaaaccaaatcaacaaacagtcttattacctgaaagttgtcaacatcttattcatagtttgaatcacataaaggaaatacctggtattggctataaaactgccaaatgtcttgaagcactgggtatcaatagtgtgcgtgatctccaaaccttttcacccaaaattttagaaaaagaattaggaatttcagttgctcagcgtatccaaaagctcagttttggagaggataactcccctgtgatactctcaggaccacctcagtcctttagtgaagaagattcatttaaaaaatgttcatctgaagttgaagctaaaaataagattgaagaactacttgctagtcttttaaacagagtatgccaagatggaaggaagcctcatacagtgagattaataatccgtcggtattcctctgagaagcactatggtcgtgagagtcgtcagtgccctattccttcacatgtaattcagaaattagggacaggaaattatgatgtgatgaccccaatggttgatatacttatgaaactttttcgaaatatggtgaatgtgaagatgccatttcaccttacccttctaagtgtgtgcttctgcaaccttaaagcactaaatactgctaagaaagggcttattgattattatttaatgccatcattatcaactacttcacgctctggcaagcacagttttaaaatgaaagacactcatatggaagattttcccaaagacaaagaaacaaaccgggatttcctaccaagtggaagaattgaaagtacaagaactagggagtctccactagataccacaaatttttctaaagaaaaagacattaatgaattcccactctgttcacttcctgaaggtgttgaccaagaagtcttcaagcagcttccagtagatattcaagaagaaatcctttctggaaaatctagggaaaaatttcaagggaaaggaagtgtgagttgtccattacatgcctctagaggagtattatctttcttttctaaaaaacaaatgcaagatattcccataaatcctagagatcatttatccagtagcaaacaggtatcctctgtatctccttgtgaaccgggaacatcaggctttaatagcagtagttcttcttacatgtctagccaaaaggattattcatattatttagataatagattaaaagatgaacgaataagtcaaggacctaaagaacctcaaggattccactttacaaattcaaaccctgctgtgtctgcttttcattcatttccaaacttgcagagtgagcaacttttctccagaaaccacactacagatagccataagcaaacagtagcaacagactctcatgaaggacttacagaaaatagagagccagattctgttgatgagaaaattactttcccttctgacattgatcctcaagttttctatgaactaccagaagcagtacaaaaggaactgctggcagagtggaagagagcaggatcagatttccacattggacataaataagcatattcagcaaaaaggtctgaaaagcaagggaataccattattttcggattagcggtttattaagctcttctatattaaacactaatagatattcaataacggagtaaactgttccagataaagcaagaatagttgcaagaagtaaattctggcacaaagcgtaaaaatataacagaagaaataatgtaaaatactatcttttatgtctaaagccattttatattacttttcaataaaaagaatatcatg

SEQ ID NO: 167331 - DNA, 2030 bp, Homo sapiens
  Payload ID: 12924
  Gene Symbol: POLI
  Gene Name: polymerase (DNA directed) iota
  ENST ID: ENST00000406285
  CDS Start-End: 29-2014
aagtagcgctgcggttggcagcggcgggatggagaagctgggggtggagccggaggaggaaggcggcggcgacgacgacgaggaagacgccgaggcctgggccatggaactggcggacgtgggggcggcagccagctcgcagggagttcatgatcaagtgttgcccacaccaaatgcttcatccagagtcatagtacatgtggatctggattgcttttatgcacaagtagaaatgatctcaaatccagagctaaaagacaaacctttaggggttcaacagaaatatttggtggttacctgcaactatgaagctaggaaacttggagttaagaaacttatgaatgtcagagatgcaaaagaaaagtgtccacagttggtattagttaatggagaagacctgacccgctacagagaaatgtcttataaggttacagaattactggaagaatttagtccagttgttgagagacttggatttgatgaaaattttgtggatctaacagaaatggttgagaagagactacagcagctgcaaagtgatgaactttctgcggtgactgtgtcgggtcatgtatacaataatcagtgtattggctataaaactgccaaatgtcttgaagcactgggtatcaatagtgtgcgtgatctccaaaccttttcacccaaaattttagaaaaagaattaggaatttcagttgctcagcgtatccaaaagctcagttttggagaggataactcccctgtgatactctcaggaccacctcagtcctttagtgaagaagattcatttaaaaaatgttcatctgaagttgaagctaaaaataagattgaagaactacttgctagtcttttaaacagagtatgccaagatggaaggaagcctcatacagtgagattaataatccgtcggtattcctctgagaagcactatggtcgtgagagtcgtcagtgccctattccttcacatgtaattcagaaattagggacaggaaattatgatgtgatgaccccaatggttgatatacttatgaaactttttcgaaatatggtgaatgtgaagatgccatttcaccttacccttctaagtgtgtgcttctgcaaccttaaagcactaaatactgctaagaaagggcttattgattattatttaatgccatcattatcaactacttcacgctctggcaagcacagttttaaaatgaaagacactcatatggaagattttcccaaagacaaagaaacaaaccgggatttcctaccaagtggaagaattgaaagtacaagaactagggagtctccactagataccacaaatttttctaaagaaaaagacattaatgaattcccactctgttcacttcctgaaggtgttgaccaagaagtcttcaagcagcttccagtagatattcaagaagaaatcctttctggaaaatctagggaaaaatttcaagggaaaggaagtgtgagttgtccattacatgcctctagaggagtattatctttcttttctaaaaaacaaatgcaagatattcccataaatcctagagatcatttatccagtagcaaacaggtatcctctgtatctccttgtgaaccgggaacatcaggctttaatagcagtagttcttcttacatgtctagccaaaaggattattcatattatttagataatagattaaaagatgaacgaataagtcaaggacctaaagaacctcaaggattccactttacaaattcaaaccctgctgtgtctgcttttcattcatttccaaacttgcagagtgagcaacttttctccagaaaccacactacagatagccataagcaaacagtagcaacagactctcatgaaggacttacagaaaatagagagccagattctgttgatgagaaaattactttcccttctgacattgatcctcaagttttctatgaactaccagaagcagtacaaaaggaactgctggcagagtggaagagagcaggatcagatttccacattggacataaataagcatattcagcaaaaa

SEQ ID NO: 167332 - DNA, 577 bp, Homo sapiens
  Payload ID: 12924
  Gene Symbol: POLI
  Gene Name: polymerase (DNA directed) iota
  ENST ID: ENST00000580880
  CDS Start-End: 142-577
gcttaataaatcccaatccagcctagctgatttactgaagaacaaagggatgactagtttttgctacgccaaggggttcaacagaaatatttggtggttacctgcaactatgaagctaggaaacttggagttaagaaacttatgaatgtcagagatgcaaaagaaaagtgtccacagttggtattagttaatggagaagacctgacccgctacagagaaatgtcttataaggttacagaattactggaagaatttagtccagttgttgagagacttggatttgatgaaaattttgtggatctaacagaaatggttgagaagagactacagcagctgcaaagtgatgaactttctgcggtgactgtgtcgggtcatgtatacaataatcagtctataaacctgcttgacgtcttgcacatcagactacttgttggatctcagattgcagcagagatgcgggaagccatgtataatcagttggggctcactggctgtgctggagtggcttctaataaactgttggcaaaattagtttctggtgtctttaaaccaaatcaacaaacagtcttattacctg

SEQ ID NO: 167333 - DNA, 754 bp, Homo sapiens
  Payload ID: 12924
  Gene Symbol: POLI
  Gene Name: polymerase (DNA directed) iota
  ENST ID: ENST00000581950
  CDS Start-End: 1-258
gccaaatgtcttgaagcactgggtatcaatagtgtgcgtgatctccaaaccttttcacccaaaattttagaaaaagaattaggaatttcagttgctcagcgtatccaaaagctcagttttggagaggataactcccctgtgatactctcaggaccacctcagtcctttagtgaagaagattcatttaaaaaatgttcatctgaagttgaagctaaaaataagattgaagaactacttgctagtcttttaaacaggtgattttcaatccattttgccaagtcatcctatgtattcattctatatacgagtatgccaagatggaaggaagcctcatacagtgagattaataatccgtcggtattcctctgagaagcactatggtcgtgagagtcgtcagtgccctattccttcacatgtaattcagaaattagggacaggaaattatgatgtgatgaccccaatggttgatatacttatgaaactttttcgaaatatggtgaatgtgaagatgccatttcaccttacccttctaagtgtgtgcttctgcaaccttaaagcactaaatactgctaagaaagggcttattgattattatttaatgccatcattatcaactacttcacgctctggcaagcacagttttaaaatgaaagacactcatatggaagattttcccaaagacaaagaaacaaaccgggatttcctaccaagtggaagaattgaaagtacaagaactagggagtctccactagat

SEQ ID NO: 167334 - DNA, 6133 bp, Homo sapiens
  Payload ID: 12924
  Gene Symbol: POLI
  Gene Name: polymerase (DNA directed) iota
  Uniprot ID: Q9UNA4
  ENST ID: ENST00000579534
  CDS Start-End: 144-2366
atgcgtgtcactctgggcaacaggctggtcggccacgactgcgcaggcgagaggcacagagcgactggagactgtagtcccccggtttccctggagaccaggcggaagcggccggaagtagcgctgcggttggcagcggcgggatggagaagctgggggtggagccggaggaggaaggcggcggcgacgacgacgaggaagacgccgaggcctgggccatggaactggcggacgtgggggcggcagccagctcgcagggagttcatgatcaagtgttgcccacaccaaatgcttcatccagagtcatagtacatgtggatctggattgcttttatgcacaagtagaaatgatctcaaatccagagctaaaagacaaacctttaggggttcaacagaaatatttggtggttacctgcaactatgaagctaggaaacttggagttaagaaacttatgaatgtcagagatgcaaaagaaaagtgtccacagttggtattagttaatggagaagacctgacccgctacagagaaatgtcttataaggttacagaattactggaagaatttagtccagttgttgagagacttggatttgatgaaaattttgtggatctaacagaaatggttgagaagagactacagcagctgcaaagtgatgaactttctgcggtgactgtgtcgggtcatgtatacaataatcagtctataaacctgcttgacgtcttgcacatcagactacttgttggatctcagattgcagcagagatgcgggaagccatgtataatcagttggggctcactggctgtgctggagtggcttctaataaactgttggcaaaattagtttctggtgtctttaaaccaaatcaacaaacagtcttattacctgaaagttgtcaacatcttattcatagtttgaatcacataaaggaaatacctggtattggctataaaactgccaaatgtcttgaagcactgggtatcaatagtgtgcgtgatctccaaaccttttcacccaaaattttagaaaaagaattaggaatttcagttgctcagcgtatccaaaagctcagttttggagaggataactcccctgtgatactctcaggaccacctcagtcctttagtgaagaagattcatttaaaaaatgttcatctgaagttgaagctaaaaataagattgaagaactacttgctagtcttttaaacagagtatgccaagatggaaggaagcctcatacagtgagattaataatccgtcggtattcctctgagaagcactatggtcgtgagagtcgtcagtgccctattccttcacatgtaattcagaaattagggacaggaaattatgatgtgatgaccccaatggttgatatacttatgaaactttttcgaaatatggtgaatgtgaagatgccatttcaccttacccttctaagtgtgtgcttctgcaaccttaaagcactaaatactgctaagaaagggcttattgattattatttaatgccatcattatcaactacttcacgctctggcaagcacagttttaaaatgaaagacactcatatggaagattttcccaaagacaaagaaacaaaccgggatttcctaccaagtggaagaattgaaagtacaagaactagggagtctccactagataccacaaatttttctaaagaaaaagacattaatgaattcccactctgttcacttcctgaaggtgttgaccaagaagtcttcaagcagcttccagtagatattcaagaagaaatcctttctggaaaatctagggaaaaatttcaagggaaaggaagtgtgagttgtccattacatgcctctagaggagtattatctttcttttctaaaaaacaaatgcaagatattcccataaatcctagagatcatttatccagtagcaaacaggtatcctctgtatctccttgtgaaccgggaacatcaggctttaatagcagtagttcttcttacatgtctagccaaaaggattattcatattatttagataatagattaaaagatgaacgaataagtcaaggacctaaagaacctcaaggattccactttacaaattcaaaccctgctgtgtctgcttttcattcatttccaaacttgcagagtgagcaacttttctccagaaaccacactacagatagccataagcaaacagtagcaacagactctcatgaaggacttacagaaaatagagagccagattctgttgatgagaaaattactttcccttctgacattgatcctcaagttttctatgaactaccagaagcagtacaaaaggaactgctggcagagtggaagagagcaggatcagatttccacattggacataaataagcatattcagcaaaaaggtctgaaaagcaagggaataccattattttcggattagcggtttattaagctcttctatattaaacactaatagatattcaataacggagtaaactgttccagataaagcaagaatagttgcaagaagtaaattctggcacaaagcgtaaaaatataacagaagaaataatgtaaaatactatcttttatgtctaaagccattttatattacttttcaataaaaagaatatcatggtcaacatagaatatttttcatgaattggtggggagatgtatatgtttatatataaaaaatagccaaatcgttgcaatgatatggtaaaggacacattttttttttttttttcctgtgaaatgtggaatatctcaaattcagcctcttaggctgaatagcaaatcctactgccaactaacctattaaaaatatagatagttttgactaaagtactacattacatttagtatgttgacttttaaaataccaaagcaatttatattcaattaatgcttcttcatacaccaagaatctaccacaatacacagcacacaaaggccgttcaataaacattgaatgaatgaatggtttggctagggccagggtggggagttaaagtgagaggagggtatatgttatagagaacagtggtagaaggaactctccgtgcaagtaaattaagggaaagatggacaccagaaaggcaaggtgatgggcctataagcatactggataatggaagaagtccatttctttctagctagtttgaagggcctaaaagcactgagatgtttttgtatcttccctacatttggagatgatattaggttgtcataacaaccacaaatatagaccattactaaattggtggatgtcctctttctcccattgttattgccttcctcttttgcctgctaaactaaaaattggatataagattgagaatgtattatataatttgcaagacatagaggatgtttatagaatatactaaagtatccctcagcaccaatatgggagtatcctggtctcaagtttataatttttgcacatataatctaaagaagagactttaaaaataaagtacacaaatatgaaccaaagagtagcttaaaaatactttcttctaggtctgaaattttcttttctttctttttttgttttggagacagagtctcactctgtcgcccagggtggagtacagtggcgcaatcccagctcactacaacctccgcctcccaggttcaagcaattctcctgcctcagcctcctgagtagctgggattacacgcatgccctaccacacccagcaaatttttgtatttttagtagagatgacatttcaccatattggccaggctggtctcgaactcctggtctcaggtgatcctccaccttggcctcccaaagtgctgggattacaggtgtgagccattgctcctggccccagctctgaaattttaacttagttttggattccttggaatttgaaaatatgctaacacgaaggattgtaaataggtagtttgaggttatcaggaacagtaacttgaagcaagaacatcagaaattgttcaccatgcaaatatttagtactctgaatcaaggaacatagtattttttacatgagtattccagtaaggtaattaaacttatgaaaagggtatataactttttgtaaatcattaaaacattttatagtccttgtaatgatttcaggaccttggacagctagaaggggcttaagaaaaaatggctaagaaaacaaagtaaatggttttggccagcttaaaaagagaaagcaaaatagttaaaaatacatttcatagattgagaatgtacgggctatgtcacagttacgctacttattttgtggttttaagttagtctcaacatctttgggcctcagaatcaacttttttatgggatcttttttctctgtttttaagattatctcttttttctttggtgctttgcaggtttactgtattatttggaagtgcgaatttatttttattcttagtatatactggcttcttcctgtatcttttaattcatgttctgtaaaattctcaaccactagctcttcaaatatttcttctctattctaggactgtatacaaatgatagactttcttactgtatccttcatgtctcttaatttctcatatttttcatcctcttgtttctctttactgcattttgggtaatttcatcagctctatctttctgtttactagttcatttttcagtagcatctcacctgctatttaaaacaatgatggttttaatttcaataaatatatttttcatttgattctttttaacttcccgtttactcattacagtcccttgtaagtctgtttctaatttttaaaagtcaaatatatgatatttttgataatttcaatattttaagtctttataagtctacatttaaggttattattgcatatcattgtgacttatttccttgagtatgtgttaatctgcgagaagacagagggcctaaattgtgtatgttttccttcagtatgatttgagttcgttgcttctctgggtgaggtggtacaaactccttggcatactctattcacctttgtggatcctgattgaatgccttgtcttaagtgtaagctccctgacccttactactagccgaaggttttgtctctgcaggtcaattccaaactaacaggcagatgctgttagctatctgcctccagggataaaccccatctttcaagcttgcttcttgcttgatgctttctgctgctttcttgcttttgtttcagctcgagtttgttgttgttttttttttttcctgtttctgtcttgaatgtagagggtatttttatttttattttttctgtttctctcttgagtgtatagtgtagagggggtttctgtcttgagtgtaggcctggagatttcccttatatggtacaaaccagcaatgaattaagaggtctcttttctccaagatctagtgttttgtactaggagaactctaaaaagtatctattccactgtagtgccaaagtacaaatttatttggatttattttttgccatcttattttttaatatatttctttttctatgttgtgcttctttcccacctttatctctcctcctatcttttgggatcagttgggttttctatttaatcatatattttccctttactgatttggaatgtgaatgttacaagtccttttgattatccttaaacatctaaaaatgctaccctctttccaaacaacacaaaggtattgaaataacattaattctaattaaattccacaagttctttattaaatctccaaattggatattattagtattttatatagtcaatgtttatttttttgatgggacatggtgggggcttaccttttttcttgtgtgtcagatgttccttctaggtagaattctttataccttctgaaattatgtccttagagctgtagatttagaactgacatctcttgagctgttctaagataatatcttttactttggagatacgcagtttttattatatgtctagctatagatttatcatggatttaggttcattatgaatctgcagatttgtgtcttccatcaaatctggattgttttcaatattaaaaaaacttctattttaaaatctgtatatagaaaggtacataaacataaatgaacatgttaatgagtaattgtaacaactatgtaactgtccaagtcaagaaataaaacatatcaagtaa

SEQ ID NO: 167335 - DNA, 2705 bp, Homo sapiens
  Payload ID: 12924
  Gene Symbol: POLI
  Gene Name: polymerase (DNA directed) iota
  ENST ID: ENST00000579434
  CDS Start-End: 535-2448
gccggaggaggaaggcggcggcgacgacgacgaggaagacgccgaggcctgggccatggaactggcggacgtgggggcggcagccagctcgcagggtgcgccgcagccagaggagccagcggcctccttgggtgtaaatgagaagggtggggcaggcggacgctcggggcggcggccactggggcgcgaccgtccccgccccactcggctcctctaagagagggctgcctccctctgccttgtgttacgcggcgggtacctctagaggaatggcttcacccagcaggagtagggtggggcgcgtccacactacaaatacgtgtcgagggtttatctgcgccgtcctttcctctgtgaggggcgaggtggggcgggaatccctcagccagcccgacgaaaactgcagaggcttctgggccttttaactttggagaagttgaggaccttgtcgctcatttggcagaaggggttcaacagaaatatttggtggttacctgcaactatgaagctaggaaacttggagttaagaaacttatgaatgtcagagatgcaaaagaaaagtgtccacagttggtattagttaatggagaagacctgacccgctacagagaaatgtcttataaggttacagaattactggaagaatttagtccagttgttgagagacttggatttgatgaaaattttgtggatctaacagaaatggttgagaagagactacagcagctgcaaagtgatgaactttctgcggtgactgtgtcgggtcatgtatacaataatcagtctataaacctgcttgacgtcttgcacatcagactacttgttggatctcagattgcagcagagatgcgggaagccatgtataatcagttggggctcactggctgtgctggagtggcttctaataaactgttggcaaaattagtttctggtgtctttaaaccaaatcaacaaacagtcttattacctgaaagttgtcaacatcttattcatagtttgaatcacataaaggaaatacctggtattggctataaaactgccaaatgtcttgaagcactgggtatcaatagtgtgcgtgatctccaaaccttttcacccaaaattttagaaaaagaattaggaatttcagttgctcagcgtatccaaaagctcagttttggagaggataactcccctgtgatactctcaggaccacctcagtcctttagtgaagaagattcatttaaaaaatgttcatctgaagttgaagctaaaaataagattgaagaactacttgctagtcttttaaacagagtatgccaagatggaaggaagcctcatacagtgagattaataatccgtcggtattcctctgagaagcactatggtcgtgagagtcgtcagtgccctattccttcacatgtaattcagaaattagggacaggaaattatgatgtgatgaccccaatggttgatatacttatgaaactttttcgaaatatggtgaatgtgaagatgccatttcaccttacccttctaagtgtgtgcttctgcaaccttaaagcactaaatactgctaagaaagggcttattgattattatttaatgccatcattatcaactacttcacgctctggcaagcacagttttaaaatgaaagacactcatatggaagattttcccaaagacaaagaaacaaaccgggatttcctaccaagtggaagaattgaaagtacaagaactagggagtctccactagataccacaaatttttctaaagaaaaagacattaatgaattcccactctgttcacttcctgaaggtgttgaccaagaagtcttcaagcagcttccagtagatattcaagaagaaatcctttctggaaaatctagggaaaaatttcaagggaaaggaagtgtgagttgtccattacatgcctctagaggagtattatctttcttttctaaaaaacaaatgcaagatattcccataaatcctagagatcatttatccagtagcaaacaggtatcctctgtatctccttgtgaaccgggaacatcaggctttaatagcagtagttcttcttacatgtctagccaaaaggattattcatattatttagataatagattaaaagatgaacgaataagtcaaggacctaaagaacctcaaggattccactttacaaattcaaaccctgctgtgtctgcttttcattcatttccaaacttgcagagtgagcaacttttctccagaaaccacactacagatagccataagcaaacagtagcaacagactctcatgaaggacttacagaaaatagagagccagattctgttgatgagaaaattactttcccttctgacattgatcctcaagttttctatgaactaccagaagcagtacaaaaggaactgctggcagagtggaagagagcaggatcagatttccacattggacataaataagcatattcagcaaaaaggtctgaaaagcaagggaataccattattttcggattagcggtttattaagctcttctatattaaacactaatagatattcaataacggagtaaactgttccagataaagcaagaatagttgcaagaagtaaattctggcacaaagcgtaaaaatataacagaagaaataatgtaaaatactatcttttatgtctaaagccattttatattacttttcaataaaaagaatatcatggtcaa

SEQ ID NO: 167336 - DNA, 654 bp, Homo sapiens
  Payload ID: 12924
  Gene Symbol: POLI
  Gene Name: polymerase (DNA directed) iota
  ENST ID: ENST00000579823
  CDS Start-End: 1-428
tttcacccaaaattttagaaaaagaattaggaatttcagttgctcagcgtatccaaaagctcagttttggagaggataactcccctgtgatactctcaggaccacctcagtcctttagtgaagaagattcatttaaaaaatgttcatctgaagttgaagctaaaaataagattgaagaactacttgctagtcttttaaacagagtatgccaagatggaaggaagcctcatacagtgagattaataatccgtcggtattcctctgagaagcactatggtcgtgagagtcgtcagtgccctattccttcacatgtaattcagaaattagggacaggtctccagtccccagatttctgtgcatcctctctcatgcaaagaaggctggaagacaaacttgtgaagctagagggtgtttttactaaacactaaaggagttttactaaaggagtttcaaattcatgtgaccacgccacagtcaacacacagaacaggtttatcacaaggatccctcctgccaccctttcaaagcgaaagccactttctttctgctcctcccccacctccctaaccccagaaaccactaattctgttcatctttatcattttgtcatttcaaaaatgttaaataaatggaagaatccactatttaacctta

SEQ ID NO: 167337 - DNA, 1204 bp, Homo sapiens
  Payload ID: 12924
  Gene Symbol: POLI
  Gene Name: polymerase (DNA directed) iota
  ENST ID: ENST00000583136
  CDS Start-End: 538-1204
cggcgacgacgacgaggaagacgccgaggcctgggccatggaactggcggacgtgggggcggcagccagctcgcagggtgcgccgcagccagaggagccagcggcctccttgggtgtaaatgagaagggtggggcaggcggacgctcggggcggcggccactggggcgcgaccgtccccgccccactcggctcctctaagagagggctgcctccctctgccttgtgttacgcggcgggtacctctagaggaatggcttcacccagcaggagtagggtggggcgcgtccacactacaaatacgtgtcgagggtttatctgcgccgtcctttcctctgtgaggggcgaggtggggcgggaatccctcagccagcccgacgaaaactgcagaggcttctgggccttttaactttggagaagttgaggaccttgtcgctcatttggcagaaggagttcatgatcaagtgttgcccacaccaaatgcttcatccagagtcatagtacatgtggatctggattgcttttatgcacaagtagaaatgatctcaaatccagagctaaaagacaaacctttaggggttcaacagaaatatttggtggttacctgcaactatgaagctaggaaacttggagttaagaaacttatgaatgtcagagatgcaaaagaaaagtgtccacagttggtattagttaatggagaagacctgacccgctacagagaaatgtcttataaggttacagaattactggaagaatttagtccagttgttgagagacttggatttgatgaaaattttgtggatctaacagaaatggttgagaagagactacagcagctgcaaagtgatgaactttctgcggtgactgtgtcgggtcatgtatacaataatcagtctataaacctgcttgacgtcttgcacatcagactacttgttggatctcagattgcagcagagatgcgggaagccatgtataatcagttggggctcactggctgtgctggagtggcttctaataaactgttggcaaaattagtttctggtgtctttaaaccaaatcaacaaacagtcttattacctgaaagttgtcaacatcttattcatagtttgaatcacataaaggaaatacctggtattggctataaaactgccaaatgtcttgaagcactgggtatcaatagtgtgcgtgatctccaaaccttttcac

SEQ ID NO: 167338 - DNA, 1734 bp, Homo sapiens
  Payload ID: 12924
  Gene Symbol: POLI
  Gene Name: polymerase (DNA directed) iota
  ENST ID: ENST00000585023
  CDS Start-End: 1-159
tgtcttgaagcactgggtatcaatagtgtgcgtgatctccaaaccttttcacccaaaattttagaaaaagaattaggaatttcagttgctcagcgtatccaaaagctcagttttggagaggataactcccctgtgatactctcaggaccacctcagtgagtacaatagcttgcagataaaaaactgttaatataaaagtgaactaaatggctcaaactaaggacaagagtcctttagtgaagaagattcatttaaaaaatgttcatctgaagttgaagctaaaaataagattgaagaactacttgctagtcttttaaacagagtatgccaagatggaaggaagcctcatacagtgagattaataatccgtcggtattcctctgagaagcactatggtcgtgagagtcgtcagtgccctattccttcacatgtaattcagaaattagggacaggaaattatgatgtgatgaccccaatggttgatatacttatgaaactttttcgaaatatggtgaatgtgaagatgccatttcaccttacccttctaagtgtgtgcttctgcaaccttaaagcactaaatactgctaagaaagggcttattgattattatttaatgccatcattatcaactacttcacgctctggcaagcacagttttaaaatgaaagacactcatatggaagattttcccaaagacaaagaaacaaaccgggatttcctaccaagtggaagaattgaaagtacaagaactagggagtctccactagataccacaaatttttctaaagaaaaagacattaatgaattcccactctgttcacttcctgaaggtgttgaccaagaagtcttcaagcagcttccagtagatattcaagaagaaatcctttctggaaaatctagggaaaaatttcaagggaaaggaagtgtgagttgtccattacatgcctctagaggagtattatctttcttttctaaaaaacaaatgcaagatattcccataaatcctagagatcatttatccagtagcaaacaggtatcctctgtatctccttgtgaaccgggaacatcaggctttaatagcagtagttcttcttacatgtctagccaaaaggattattcatattatttagataatagattaaaagatgaacgaataagtcaaggacctaaagaacctcaaggattccactttacaaattcaaaccctgctgtgtctgcttttcattcatttccaaacttgcagagtgagcaacttttctccagaaaccacactacagatagccataagcaaacagtagcaacagactctcatgaaggacttacagaaaatagagagccagattctgttgatgagaaaattactttcccttctgacattgatcctcaagttttctatgaactaccagaagcagtacaaaaggaactgctggcagagtggaagagagcaggatcagatttccacattggacataaataagcatattcagcaaaaaggtctgaaaagcaagggaataccattattttcggattagcggtttattaagctcttctatattaaacactaatagatattcaataacggagtaaactgttccagataaagcaagaatagttgcaagaagtaaattctggcacaaagcgtaaaaatataacagaagaaataatgtaaaatactatcttttatgtctaaagccattttatattacttttcaataaaaagaatatcatggtcaa

SEQ ID NO: 167339 - DNA, 585 bp, Homo sapiens
  Payload ID: 12924
  Gene Symbol: POLI
  Gene Name: polymerase (DNA directed) iota
  ENST ID: ENST00000577612
  CDS Start-End: 1-585
agaagctgggggtggagccggaggaggaaggcggcggcgacgacgacgaggaagacgccgaggcctgggccatggaactggcggacgtgggggcggcagccagctcgcagggggttcaacagaaatatttggtggttacctgcaactatgaagctaggaaacttggagttaagaaacttatgaatgtcagagatgcaaaagaaaagtgtccacagttggtattagttaatggagaagacctgacccgctacagagaaatgtcttataaggttacagaattactggaagaatttagtccagttgttgagagacttggatttgatgaaaattttgtggatctaacagaaatggttgagaagagactacagcagctgcaaagtgatgaactttctgcggtgactgtgtcgggtcatgtatacaataatcagtctataaacctgcttgacgtcttgcacatcagactacttgttggatctcagattgcagcagagatgcgggaagccatgtataatcagttggggctcactggctgtgctggagtggcttctaataaactgttggcaaaattagtttctggtgtcttta

SEQ ID NO: 167340 - DNA, 5911 bp, Homo sapiens
  Payload ID: 12925
  Gene Symbol: POLK
  Gene Name: polymerase (DNA directed) kappa
  Uniprot ID: Q9UBT6
  ENST ID: ENST00000241436
  CDS Start-End: 173-2785
tacctccggctctcccgggtgacgacgggtagaaaagcaggaggagcggagaaaggagagggcggggtagggatgcagctgtgctgcattctgggaagggcgttggtccgtcgctcgcgcagcctcctgggagttgtagtcgcgatcctgaggtaacggataagtttataccatggatagcacaaaggagaagtgtgacagttacaaagatgatcttctgcttaggatgggacttaatgataataaagcaggaatggaaggattagataaagagaaaattaacaaaattataatggaagccacgaaggggtccagattttatggaaatgagctcaagaaagaaaagcaagtcaaccaacgaattgaaaatatgatgcaacaaaaagctcaaatcaccagccaacagctaagaaaagcacaattacaggttgacagatttgcaatggaattagaacaaagccgaaatttgagcaataccatagtgcacattgacatggatgctttctatgcagctgtagaaatgagggacaatccagaattgaaggataaacccattgctgtaggatcaatgagtatgctgtctacttcaaattaccatgcaaggagatttggtgttcgtgcagccatgccaggatttattgctaagaggctgtgcccacaacttataatagtgccccccaactttgacaaataccgagctgtgagtaaagaggttaaggaaatacttgctgattatgatcccaattttatggccatgagtcttgatgaagcctacttgaatataacaaagcacttagaagaaagacaaaattggcctgaggataaaagaaggtatttcatcaaaatgggaagctctgtagaaaatgataatccaggaaaggaagttaataaactgagtgagcatgaacgatccatctctccactactttttgaagagagtccttctgatgtgcagcccccaggagatcctttccaagtgaactttgaagaacaaaacaatcctcaaatactccaaaactcagttgtttttggaacatcagcccaggaagtggtaaaggaaattcgtttcagaattgagcagaaaacaacactgacagccagtgcaggcattgccccaaatacaatgttagcaaaagtatgcagtgataagaataaaccaaatggacaataccaaattcttcccaatagacaagctgtgatggacttcatcaaggatttacccattagaaaggtttctggaataggaaaagttacagagaaaatgttaaaggcccttggaattattacatgtacagaactttaccaacagagggcattgctttctctccttttctctgaaacatcttggcattatttccttcatatctccttgggtctaggttcaacacacctgacgagggatggagagaggaaaagtatgagcgttgagaggacattcagtgagataaataaagcggaagagcaatacagcctatgtcaagaactttgcagtgagcttgctcaggatctacagaaagaaagacttaagggtagaactgttaccattaagttgaagaatgtgaattttgaagtaaaaactcgtgcatctacagtttcatctgttgtttctactgcagaagaaatatttgccattgctaaggaattgctaaaaacagaaattgatgctgattttccacatcccttgagattaaggcttatgggtgttcggatatctagttttcccaatgaagaggacaggaaacaccaacaaaggagcattattggctttttacaggctggaaaccaagccctgtcagccactgagtgtacattagagaaaactgacaaagataagtttgtaaaacctctagaaatgtctcataagaagagtttctttgataaaaaacgatcagaaaggaaatggagtcaccaagatacatttaaatgtgaagccgtgaataaacaaagtttccagacatcacaaccattccaagttttaaagaagaagatgaatgagaatttggaaatatcagagaattcagatgactgtcagatacttacctgtcctgtttgctttagggctcaagggtgcatcagtctggaagccttgaataaacatgtagatgaatgtcttgatggaccttcaatcagtgaaaactttaaaatgttctcgtgttcacatgtttctgctaccaaagttaacaagaaagaaaatgttcctgcttcttcactttgtgagaagcaagattatgaagcccatccaaaaattaaagaaatatcttcagtagattgtatagctttagtagatactatagataactcatctaaagcagaaagcatagatgctttaagtaataagcatagcaaggaagaatgttctagtctcccaagcaagtcttttaatattgaacactgtcatcagaattcttcttctactgtttcattggaaaacgaagatgttggatcatttagacaagaataccgccagccttacttatgtgaagtgaaaacaggccaagctctagtttgtcctgtttgtaacgtagaacaaaagacttcagatctaaccctgttcaatgtgcatgtggatgtttgcttaaataaaagttttatccaagaattaagaaaggataaatttaacccagttaatcaacccaaagaaagctccagaagtactggtagctcaagtggagtacagaaggctgtaacaagaacaaaaaggccaggattgatgacaaagtactcaacatcaaagaaaataaaaccaaacaatcccaaacatacccttgatatattttttaagtaaacattgaacattttatcattaatttttaattgaaactagttattttataatcaatgaatttgttctttctgattttaagtttgcagatttatttagtgaaggcaagtgcaataatccttcctcagatgatgtttgcttttctaagatacatatactgattctgtgtatcttttttataaccatgagaattttacttccattatacatcaattggaaatcaatcctgttaagagataattcttaaaagggaaattaggaatgggataagaaggtgatttttttattatttttatactgaatataaaaacatttgtaagggctctcaaagattcacacatgcctatattatcataagaatttttcagcacttaactactttgttggcattgatcctagtgtctttaaatacttcatgagcattcataattaaaatttatcttaagttctatgaagagtattaatgtaactagcataagtggttttcttcaggaaaataaatatcacagtattatctgtgttaaaatggtttttgcctaaaatataatttttaatttggcttttcttatttaaaattccattatcttatgaataagcacttgaatcagtttttaaaatatttagtctaagatgattcaaagtagttttattttaatacaggacttttaaatggcagtatttcatttcttgtcaattatgttggtactttccacaaatctataaagaaggataaattgtaccatcattttattataatcctcaagagaaaatgtgtaattcaaaagattaatgtgtattaaaacacattatgtatcttagttacatttctatcagtacttttattaatatttgtgaaagaagacagcttaatagtagttagcttaagtagtttctccaagtacttttgtgctatcaatgagttcttctcaaaaaataattagttaggccaggcacaatggctcacacctgtaatgccagccctttgggaggccgaatgggcagatcacttgaggtcaggagtttgagaccagcctcgccaacatggtgagaccctgtctctactaaaacgataaaaaaaaaaaaaaaattagccaggcttggtggcacacgcctgtaatcccagctactcagatggctgaggcaggagaactacttgaacctgggaggtcaaagctgcagtcagccaagatcttgccactgtactccagcctgaagagcgagactctgtctcaataatataataatagttattatttaattgcaacatgaagttggaagccattttctgttacttctttaaggagctaaatcttttatatttttgttttctctccccttgcgtttcatattttagcttatgatctaaatatatattttgtatattataatattttaggaatagcttaattaagaactcacagactttgacaaagtggtaactagacttttaattactagattcttcaaattaggcttaatgcctgctagcatgccaatccaatcccatgactgatgttattatacactatggcaaatacaaagttgtagtattatggttcttgatggtgtgatttacttatgtaaattatgtacaaatttaagttcaatgaaacactgatttaatgtactgaaaggtaaatagtaccatagtgaattattttctgtcttgccttaggtttatttttattatcttcaatattagaataaatgctaaattattttcatttaaggatttatgtagttgaatattatcatttagtaatatttaatcatttgaaataaaatttaaagctttaattgatctaatagagatggttttctacttttccactcttcctccctcttatgccttcacttttgttttctgtgcccagaattttcttcacattctttactacctgttttgtctattatatccaacccattttctttttattataattttgatttggggcatttgaagaaaatacagcaaaactacaagaactggtaataagcatgcataatctcacctacttagtgaacctaatataaacctaatataaagaaccaccgtatttgcaatatatataactggtgaaaaactagtgtccagaatatataaatgatccctatgaatcagtaagaaaaagacagtcaatagaaatttggacaaaagactttatatggcatttcaagtgaaaggaaatccagatgaccaagaaacatgaaaatattcccagccatattaatatttgagaagtaaaaaataaaactacaaggaggtattacatctttaccttatttgcaaaaatgaaatgatctaatgatactaagttttggtgatgatgtcagctcttacattgaaaacaatcactgtggaaaaatttgtccctcagtaaatttaaagataaacatgctcaaaacctagcaattgcactctgaagtatacatctttgcaggttatctttcattacagttatttttttccctgtcaggaccctaactaatacaatgccttgggaaaactaatgaacatgtatcctaggaagcatgtacaagaaagttcttcccagtcaggaaggtggccaagaaaaaaattttttaatgttcatagcagcactgcaatatccaaaagttagaaatgaaccaaatattcagcaatggtagaatggttaaattgtaccatggcatttatattgaaacagtagaattctacacagtggtgaaaatgaaggaaatagctaaccacaacatagatgaatatcacagacatagcatagagcaaaagaagcaaatcacagaaggatgccatcaacatgattccatttgtataaagtttaaaacagtataaactgaacaactatattgttttaagggtatatagttatatatatgagatacaactgtaaagaaaagcaagtgttttgctgtccccagaaccagaataatgatttcctctgtggagaagtacagcagtgtgattggggagtggcacctggtgcttctgggatgctggcaatgttctatttcttgtcttgggtggtgattgcatggatgttcacttttaaaatactctttatacatatatattttatatattcttgttcatatataacctttataataaagagaaaaaaatggcaaaaa

SEQ ID NO: 167341 - DNA, 1594 bp, Homo sapiens
  Payload ID: 12925
  Gene Symbol: POLK
  Gene Name: polymerase (DNA directed) kappa
  ENST ID: ENST00000511527
  CDS Start-End: 1-273
atggatagcacaaaggagaagtgtgacagttacaaagatgatcttctgcttaggatgggacttaatgataataaagcaggaatggaaggattagataaagagaaaattaacaaaattataatggaagccacgaaggggtccagattttatggaaatgagctcaagaaagaaaagcaagtcaaccaacgaattgaaaatatgatgcaacaaaaagctcaaatcaccagccaacagctaagaaaagcacaattacagattaacatcaaattttaacattataaaagcaattctacagaggaacatttacattatgctacagtatcttcagttgtaccttcctgttcagcataaacatcatatgccaaagaggttgacagatttgcaatggaattagaacaaagccgaaatttgagcaataccatagtgcacattgacatggatgctttctatgcagctgtagaaatgagggacaatccagaattgaaggataaacccattgctgtaggatcaatgagtatgctgtctacttcaaattaccatgcaaggagatttggtgttcgtgcagccatgccaggatttattgctaagaggctgtgcccacaacttataatagtgccccccaactttgacaaataccgagctgtgagtaaagaggttaaggaaatacttgctgattatgatcccaattttatggccatgagtcttgatgaagcctacttgaatataacaaagcacttagaagaaagacaaaattggcctgaggataaaagaaggtatttcatcaaaatgggaagctctgtagaaaatgataatccaggaaaggaagttaataaactgagtgagcatgaacgatccatctctccactactttttgaagagagtccttctgatgtgcagcccccaggagatcctttccaagtgaactttgaagaacaaaacaatcctcaaatactccaaaactcagttgtttttggaacatcagcccaggaagtggtaaaggaaattcgtttcagaattgagcagaaaacaacactgacagccagtgcaggcattgccccaaatacaatgttagcaaaagtatgcagtgataagaataaaccaaatggacaataccaaattcttcccaatagacaagctgtgatggacttcatcaaggatttacccattagaaaggtttctggaataggaaaagttacagagaaaatgttaaaggcccttggaattattacatgtacagaactttaccaacagagggcattgctttctctccttttctctgaaacatcttggcattatttccttcatatctccttgggtctaggttcaacacacctgacgagggatggagagaggaaaagtatgagcgttgagaggacattcagtgagataaataaagcggaagagcaatacagcctatgtcaagaactttgcagtgagcttgctcaggatctacagaaagaaagacttaaggtagctcaagtggagtacagaaggctgtaacaagaacaaaaaggccaggattgatgacaaagtactcaacatcaaagaaaataaaaccaaacaatcccaaacatacccttgatatattttttaa

SEQ ID NO: 167342 - DNA, 565 bp, Homo sapiens
  Payload ID: 12925
  Gene Symbol: POLK
  Gene Name: polymerase (DNA directed) kappa
  ENST ID: ENST00000505774
  CDS Start-End: 167-439
gacgtgagagagctttccgctgaagatgacgggcctgctttccagggcggcttgtcgaaagcccgggagcatctggccgcttccgcctcaaccatgggctggggttttgtgagctactagtgccaagggttttctttccaccagaccaccgctataagtttataccatggatagcacaaaggagaagtgtgacagttacaaagatgatcttctgcttaggatgggacttaatgataataaagcaggaatggaaggattagataaagagaaaattaacaaaattataatggaagccacgaaggggtccagattttatggaaatgagctcaagaaagaaaagcaagtcaaccaacgaattgaaaatatgatgcaacaaaaagctcaaatcaccagccaacagctaagaaaagcacaattacagattaacatcaaattttaacattataaaagcaattctacagaggaacatttacattatgctacagtatcttcagttgtaccttcctgttcagcataaacatcatatgccaaagaggttgacagatttgcaatggaattagaacaa

SEQ ID NO: 167343 - DNA, 2482 bp, Homo sapiens
  Payload ID: 12925
  Gene Symbol: POLK
  Gene Name: polymerase (DNA directed) kappa
  ENST ID: ENST00000503479
  CDS Start-End: 134-1324
tctgggaagggcgttggtccgtcgctcgcgcagcctcctgggagttgtagtcgcgatcctgaggtaacgggggtccagattttatggaaatgagctcaagaaagaaaagcaagtcaaccaacgaattgaaaatatgatgcaacaaaaagctcaaatcaccagccaacagctaagaaaagcacaattacaggttgacagatttgcaatggaattagaacaaagccgaaatttgagcaataccatagtgcacattgacatggatgctttctatgcagctgtagaaatgagggacaatccagaattgaaggataaacccattgctgtaggatcaatgagtatgctgtctacttcaaattaccatgcaaggagatttggtgttcgtgcagccatgccaggatttattgctaagaggctgtgcccacaacttataatagtgccccccaactttgacaaataccgagctgtgagtaaagaggttaaggaaatacttgctgattatgatcccaattttatggccatgagtcttgatgaagcctacttgaatataacaaagcacttagaagaaagacaaaattggcctgaggataaaagaaggtatttcatcaaaatgggaagctctgtagaaaatgataatccaggaaaggaagttaataaactgagtgagcatgaacgatccatctctccactactttttgaagagagtccttctgatgtgcagcccccaggagatcctttccaagtgaactttgaagaacaaaacaatcctcaaatactccaaaactcagttgtttttggaacatcagcccaggaagtggtaaaggaaattcgtttcagaattgagcagaaaacaacactgacagccagtgcaggcattgccccaaatacaatgttagcaaaagtatgcagtgataagaataaaccaaatggacaataccaaattcttcccaatagacaagctgtgatggacttcatcaaggatttacccattagaaaggtttctggaataggaaaagttacagagaaaatgttaaaggcccttggaattattacatgtacagaactttaccaacagagggcattgctttctctccttttctctgaaacatcttggcattatttccttcatatctccttgggtctaggttcaacacacctgacgagggatggagagaggaaaagtatgagcgttgagaggacattcagtgagataaataaagcggaagagcaatacagcctatgtcaagaactttgcagtgagcttgctcaggatctacagaaagaaagacttaagaagaaatatttgccattgctaaggaattgctaaaaacagaaattgatgctgattttccacatcccttgagattaaggcttatgggtgttcggatatctagttttcccaatgaagaggacaggaaacaccaacaaaggagcattattggctttttacaggctggaaaccaagccctgtcagccactgagtgtacattagagaaaactgacaaagataagtttgtaaaacctctagaaatgtctcataagaagagtttctttgataaaaaacgatcagaaaggaaatggagtcaccaagatacatttaaatgtgaagccgtgaataaacaaagtttccagacatcacaaccattccaagttttaaagaagaagatgaatgagaatttggaaatatcagagaattcagatgactgtcagatacttacctgtcctgtttgctttagggctcaagggtgcatcagtctggaagccttgaataaacatgtagatgaatgtcttgatggaccttcaatcagtgaaaactttaaaatgttctcgtgttcacatgtttctgctaccaaagttaacaagaaagaaaatgttcctgcttcttcactttgtgagaagcaagattatgaagcccatccaaaaattaaagaaatatcttcagtagattgtatagctttagtagatactatagataactcatctaaagcagaaagcatagatgctttaagtaataagcatagcaaggaagaatgttctagtctcccaagcaagtcttttaatattgaacactgtcatcagaattcttcttctactgtttcattggaaaacgaagatgttggatcatttagacaagaataccgccagccttacttatgtgaagtgaaaacaggccaagctctagtttgtcctgtttgtaacgtagaacaaaagacttcagatctaaccctgttcaatgtgcatgtggatgtttgcttaaataaaagttttatccaagaattaagaaaggataaatttaacccagttaatcaacccaaagaaagctccagaagtactggtagctcaagtggagtacagaaggctgtaacaagaacaaaaaggccaggattgatgacaaagtactcaacatcaaagaaaataaaaccaaacaatcccaaacatacccttgatatattttttaagtaaacattgaacattttatcattaa

SEQ ID NO: 167344 - DNA, 2677 bp, Homo sapiens
  Payload ID: 12925
  Gene Symbol: POLK
  Gene Name: polymerase (DNA directed) kappa
  Uniprot ID: Q9UBT6
  ENST ID: ENST00000510815
  CDS Start-End: 274-1392
gtagtcgcgatcctgaggtaacgggggtccagattttatggaaatgagctcaagaaagaaaagcaagtcaaccaacgaattgaaaatatgatgcaacaaaaagctcaaatcaccagccaacagctaagaaaagcacaattacagattaacatcaaattttaacattataaaagcaattctacagaggaacatttacattatgctacagtatcttcagttgtaccttcctgttcagcataaacatcatatgccaaagaggttgacagatttgcaatggaattagaacaaagccgaaatttgagcaataccatagtgcacattgacatggatgctttctatgcagctgtagaaatgagggacaatccagaattgaaggataaacccattgctgtaggatcaatgagtatgctgtctacttcaaattaccatgcaaggagatttggtgttcgtgcagccatgccaggatttattgctaagaggctgtgcccacaacttataatagtgccccccaactttgacaaataccgagctgtgagtaaagaggttaaggaaatacttgctgattatgatcccaattttatggccatgagtcttgatgaagcctacttgaatataacaaagcacttagaagaaagacaaaattggcctgaggataaaagaaggtatttcatcaaaatgggaagctctgtagaaaatgataatccaggaaaggaagttaataaactgagtgagcatgaacgatccatctctccactactttttgaagagagtccttctgatgtgcagcccccaggagatcctttccaagtgaactttgaagaacaaaacaatcctcaaatactccaaaactcagttgtttttggaacatcagcccaggaagtggtaaaggaaattcgtttcagaattgagcagaaaacaacactgacagccagtgcaggcattgccccaaatacaatgttagcaaaagtatgcagtgataagaataaaccaaatggacaataccaaattcttcccaatagacaagctgtgatggacttcatcaaggatttacccattagaaaggtttctggaataggaaaagttacagagaaaatgttaaaggcccttggaattattacatgtacagaactttaccaacagagggcattgctttctctccttttctctgaaacatcttggcattatttccttcatatctccttgggtctaggttcaacacacctgacgagggatggagagaggaaaagtatgagcgttgagaggacattcagtgagataaataaagcggaagagcaatacagcctatgtcaagaactttgcagtgagcttgctcaggatctacagaaagaaagacttaagaagaaatatttgccattgctaaggaattgctaaaaacagaaattgatgctgattttccacatcccttgagattaaggcttatgggtgttcggatatctagttttcccaatgaagaggacaggaaacaccaacaaaggagcattattggctttttacaggctggaaaccaagccctgtcagccactgagtgtacattagagaaaactgacaaagataagtttgtaaaacctctagaaatgtctcataagaagagtttctttgataaaaaacgatcagaaaggaaatggagtcaccaagatacatttaaatgtgaagccgtgaataaacaaagtttccagacatcacaaccattccaagttttaaagaagaagatgaatgagaatttggaaatatcagagaattcagatgactgtcagatacttacctgtcctgtttgctttagggctcaagggtgcatcagtctggaagccttgaataaacatgtagatgaatgtcttgatggaccttcaatcagtgaaaactttaaaatgttctcgtgttcacatgtttctgctaccaaagttaacaagaaagaaaatgttcctgcttcttcactttgtgagaagcaagattatgaagcccatccaaaaattaaagaaatatcttcagtagattgtatagctttagtagatactatagataactcatctaaagcagaaagcatagatgctttaagtaataagcatagcaaggaagaatgttctagtctcccaagcaagtcttttaatattgaacactgtcatcagaattcttcttctactgtttcattggaaaacgaagatgttggatcatttagacaagaataccgccagccttacttatgtgaagtgaaaacaggccaagctctagtttgtcctgtttgtaacgtagaacaaaagacttcagatctaaccctgttcaatgtgcatgtggatgtttgcttaaataaaagttttatccaagaattaagaaaggataaatttaacccagttaatcaacccaaagaaagctccagaagtactggtagctcaagtggagtacagaaggctgtaacaagaacaaaaaggccaggattgatgacaaagtactcaacatcaaagaaaataaaaccaaacaatcccaaacatacccttgatatattttttaagtaaacattgaacattttatcattaatttttaattgaaactagttattttataatcaatgaatttgttctttctgattttaagtttgcagatttatttagtgaaggcaagtgcaataatccttcctcagatgatgtttgcttttctaagatac

SEQ ID NO: 167345 - DNA, 4345 bp, Homo sapiens
  Payload ID: 12925
  Gene Symbol: POLK
  Gene Name: polymerase (DNA directed) kappa
  ENST ID: ENST00000514141
  CDS Start-End: 14-1297
ataagtttataccatggatagcacaaaggagaagtgtgacagttacaaagatgatcttctgcttaggatgggacttaatgataataaagcaggaatggaaggattagataaagagaaaattaacaaaattataatggaagccacgaaggggtccagattttatggaaatgagctcaagaaagaaaagcaagtcaaccaacgaattgaaaatatgatgcaacaaaaagctcaaatcaccagccaacagctaagaaaagcacaattacaggttgacagatttgcaatggaattagaacaaagccgaaatttgagcaataccatagtgcacattgacatggatgctttctatgcagctgtagaaatgagggacaatccagaattgaaggataaacccattgctgtaggatcaatgagtatgctgtctacttcaaattaccatgcaaggagatttggtgttcgtgcagccatgccaggatttattgctaagaggctgtgcccacaacttataatagtgccccccaactttgacaaataccgagctgtgagtaaagaggttaaggaaatacttgctgattatgatcccaattttatggccatgagtcttgatgaagcctacttgaatataacaaagcacttagaagaaagacaaaattggcctgaggataaaagaaggtatttcatcaaaatgggaagctctgtagaaaatgataatccaggaaaggaagttaataaactgagtgagcatgaacgatccatctctccactactttttgaagagagtccttctgatgtgcagcccccaggagatcctttccaagtgaactttgaagaacaaaacaatcctcaaatactccaaaactcagttgtttttggaacatcagcccaggaagtggtaaaggaaattcgtttcagaattgagcagaaaacaacactgacagccagtgcaggcattgccccaaatacaatgttagcaaaagtatgcagtgataagaataaaccaaatggacaataccaaattcttcccaatagacaagctgtgatggacttcatcaaggatttacccattagaaaggtttctggaataggaaaagttacagagaaaatgttaaaggcccttggaattattacatgtacagaactttaccaacagagggcattgctttctctccttttctctgaaacatcttggcattatttccttcatatctccttgggtctaggttcaacacacctgacgagggatggagagaggaaaagtatgagcgttgagagggtagaactgttaccattaagttgaagaatgtgaattttgaagtaaaaactcgtgcatctacagtttcatctgttgtttctactgcagaagaaatatttgccattgctaaggaattgctaaaaacagaaattgatgctgattttccacatcccttgagattaaggcttatgggtgttcggatatctagttttcccaatgaagaggacaggaaacaccaacaaaggagcattattggctttttacaggctggaaaccaagccctgtcagccactgagtgtacattagagaaaactgacaaagataagtttgtaaaacctctagaaatgtctcataagaagagtttctttgataaaaaacgatcagaaaggaaatggagtcaccaagatacatttaaatgtgaagccgtgaataaacaaagtttccagacatcacaaccattccaagttttaaagaagaagatgaatgagaatttggaaatatcagagaattcagatgactgtcagatacttacctgtcctgtttgctttagggctcaagggtgcatcagtctggaagccttgaataaacatgtagatgaatgtcttgatggaccttcaatcagtgaaaactttaaaatgttctcgtgttcacatgtttctgctaccaaagttaacaagaaagaaaatgttcctgcttcttcactttgtgagaagcaagattatgaagcccatccaaaaattaaagaaatatcttcagtagattgtatagctttagtagatactatagataactcatctaaagcagaaagcatagatgctttaagtaataagcatagcaaggaagaatgttctagtctcccaagcaagtcttttaatattgaacactgtcatcagaattcttcttctactgtttcattggaaaacgaagatgttggatcatttagacaagaataccgccagccttacttatgtgaagtgaaaacaggccaagctctagtttgtcctgtttgtaacgtagaacaaaagacttcagatctaaccctgttcaatgtgcatgtggatgtttgcttaaataaaagttttatccaagaattaagaaaggataaatttaacccagttaatcaacccaaagaaagctccagaagtactggtagctcaagtggagtacagaaggctgtaacaagaacaaaaaggccaggattgatgacaaagtactcaacatcaaagaaaataaaaccaaacaatcccaaacatacccttgatatattttttaagtaaacattgaacattttatcattaatttttaattgaaactagttattttataatcaatgaatttgttctttctgattttaagtttgcagatttatttagtgaaggcaagtgcaataatccttcctcagatgatgtttgcttttctaagatacatatactgattctgtgtatcttttttataaccatgagaattttacttccattatacatcaattggaaatcaatcctgttaagagataattcttaaaagggaaattaggaatgggataagaaggtgatttttttattatttttatactgaatataaaaacatttgtaagggctctcaaagattcacacatgcctatattatcataagaatttttcagcacttaactactttgttggcattgatcctagtgtctttaaatacttcatgagcattcataattaaaatttatcttaagttctatgaagagtattaatgtaactagcataagtggttttcttcaggaaaataaatatcacagtattatctgtgttaaaatggtttttgcctaaaatataatttttaatttggcttttcttatttaaaattccattatcttatgaataagcacttgaatcagtttttaaaatatttagtctaagatgattcaaagtagttttattttaatacaggacttttaaatggcagtatttcatttcttgtcaattatgttggtactttccacaaatctataaagaaggataaattgtaccatcattttattataatcctcaagagaaaatgtgtaattcaaaagattaatgtgtattaaaacacattatgtatcttagttacatttctatcagtacttttattaatatttgtgaaagaagacagcttaatagtagttagcttaagtagtttctccaagtacttttgtgctatcaatgagttcttctcaaaaaataattagttaggccaggcacaatggctcacacctgtaatgccagccctttgggaggccgaatgggcagatcacttgaggtcaggagtttgagaccagcctcgccaacatggtgagaccctgtctctactaaaacgataaaaaaaaaaaaaaaattagccaggcttggtggcacacgcctgtaatcccagctactcagatggctgaggcaggagaactacttgaacctgggaggtcaaagctgcagtcagccaagatcttgccactgtactccagcctgaagagcgagactctgtctcaataatataataatagttattatttaattgcaacatgaagttggaagccattttctgttacttctttaaggagctaaatcttttatatttttgttttctctccccttgcgtttcatattttagcttatgatctaaatatatattttgtatattataatattttaggaatagcttaattaagaactcacagactttgacaaagtggtaactagacttttaattactagattcttcaaattaggcttaatgcctgctagcatgccaatccaatcccatgactgatgttattatacactatggcaaatacaaagttgtagtattatggttcttgatggtgtgatttacttatgtaaattatgtacaaatttaagttcaatgaaacactgatttaatgtactgaaaggtaaatagtaccatagtgaattattttctgtcttgccttaggtttatttttattatcttcaatattagaataaatgctaaattattttcatttaaggatttatgtagttgaatattatcatttagtaatatttaatcatttgaaataaaatttaaagctttaattgatctaatagagatggtttt

SEQ ID NO: 167346 - DNA, 2441 bp, Homo sapiens
  Payload ID: 12925
  Gene Symbol: POLK
  Gene Name: polymerase (DNA directed) kappa
  Uniprot ID: Q9UBT6
  ENST ID: ENST00000509126
  CDS Start-End: 1-1470
atggatagcacaaaggagaagtgtgacagttacaaagatgatcttctgcttaggatgggacttaatgataataaagcaggaatggaaggattagataaagagaaaattaacaaaattataatggaagccacgaaggggtccagattttatggaaatgagctcaagaaagaaaagcaagtcaaccaacgaattgaaaatatgatgcaacaaaaagctcaaatcaccagccaacagctaagaaaagcacaattacaggttgacagatttgcaatggaattagaacaaagccgaaatttgagcaataccatagtgcacattgacatggatgctttctatgcagctgtagaaatgagggacaatccagaattgaaggataaacccattgctgtaggatcaatgagtatgctgtctacttcaaattaccatgcaaggagatttggtgttcgtgcagccatgccaggatttattgctaagaggctgtgcccacaacttataatagtgccccccaactttgacaaataccgagctgtgagtaaagaggttaaggaaatacttgctgattatgatcccaattttatggccatgagtcttgatgaagcctacttgaatataacaaagcacttagaagaaagacaaaattggcctgaggataaaagaaggtatttcatcaaaatgggaagctctgtagaaaatgataatccaggaaaggaagttaataaactgagtgagcatgaacgatccatctctccactactttttgaagagagtccttctgatgtgcagcccccaggagatcctttccaagtgaactttgaagaacaaaacaatcctcaaatactccaaaactcagttgtttttggaacatcagcccaggaagtggtaaaggaaattcgtttcagaattgagcagaaaacaacactgacagccagtgcaggcattgccccaaatacaatgttagcaaaagtatgcagtgataagaataaaccaaatggacaataccaaattcttcccaatagacaagctgtgatggacttcatcaaggatttacccattagaaaggtttctggaataggaaaagttacagagaaaatgttaaaggcccttggaattattacatgtacagaactttaccaacagagggcattgctttctctccttttctctgaaacatcttggcattatttccttcatatctccttgggtctaggttcaacacacctgacgagggatggagagaggaaaagtatgagcgttgagaggacattcagtgagataaataaagcggaagagcaatacagcctatgtcaagaactttgcagtgagcttgctcaggatctacagaaagaaagacttaaggtgttcggatatctagttttcccaatgaagaggacaggaaacaccaacaaaggagcattattggctttttacaggctggaaaccaagccctgtcagccactgagtgtacattagagaaaactgacaaagataagtttgtaaaacctctagaaatgtctcataagaagagtttctttgataaaaaacgatcagaaaggaaatggagtcaccaagatacatttaaatgtgaagccgtgaataaacaaagtttccagacatcacaaccattccaagttttaaagaagaagatgaatgagaatttggaaatatcagagaattcagatgactgtcagatacttacctgtcctgtttgctttagggctcaagggtgcatcagtctggaagccttgaataaacatgtagatgaatgtcttgatggaccttcaatcagtgaaaactttaaaatgttctcgtgttcacatgtttctgctaccaaagttaacaagaaagaaaatgttcctgcttcttcactttgtgagaagcaagattatgaagcccatccaaaaattaaagaaatatcttcagtagattgtatagctttagtagatactatagataactcatctaaagcagaaagcatagatgctttaagtaataagcatagcaaggaagaatgttctagtctcccaagcaagtcttttaatattgaacactgtcatcagaattcttcttctactgtttcattggaaaacgaagatgttggatcatttagacaagaataccgccagccttacttatgtgaagtgaaaacaggccaagctctagtttgtcctgtttgtaacgtagaacaaaagacttcagatctaaccctgttcaatgtgcatgtggatgtttgcttaaataaaagttttatccaagaattaagaaaggataaatttaacccagttaatcaacccaaagaaagctccagaagtactggtagctcaagtggagtacagaaggctgtaacaagaacaaaaaggccaggattgatgacaaagtactcaacatcaaagaaaataaaaccaaacaatcccaaacatacccttgatatattttttaagtaa

SEQ ID NO: 167347 - DNA, 1438 bp, Homo sapiens
  Payload ID: 12925
  Gene Symbol: POLK
  Gene Name: polymerase (DNA directed) kappa
  Uniprot ID: Q9UBT6
  ENST ID: ENST00000515295
  CDS Start-End: 14-1432
ataagtttataccatggatagcacaaaggagaagtgtgacagttacaaagatgatcttctgcttaggatgggacttaatgataataaagcaggaatggaaggattagataaagagaaaattaacaaaattataatggaagccacgaaggggtccagattttatggaaatgagctcaagaaagaaaagcaagtcaaccaacgaattgaaaatatgatgcaacaaaaagctcaaatcaccagccaacagctaagaaaagcacaattacaggttgacagatttgcaatggaattagaacaaagccgaaatttgagcaataccatagtgcacattgacatggatgctttctatgcagctgtagaaatgagggacaatccagaattgaaggataaacccattgctgtaggatcaatgagtatgctgtctacttcaaattaccatgcaaggagatttggtgttcgtgcagccatgccaggatttattgctaagaggctgtgcccacaacttataatagtgccccccaactttgacaaataccgagctgtgagtaaagaggttaaggaaatacttgctgattatgatcccaattttatggccatgagtcttgatgaagcctacttgaatataacaaagcacttagaagaaagacaaaattggcctgaggataaaagaaggtatttcatcaaaatgggaagctctgtagaaaatgataatccaggaaaggaagttaataaactgagtgagcatgaacgatccatctctccactactttttgaagagagtccttctgatgtgcagcccccaggagatcctttccaagtgaactttgaagaacaaaacaatcctcaaatactccaaaactcagttgtttttggaacatcagcccaggaagtggtaaaggaaattcgtttcagaattgagcagaaaacaacactgacagccagtgcaggcattgccccaaatacaatgttagcaaaagtatgcagtgataagaataaaccaaatggacaataccaaattcttcccaatagacaagctgtgatggacttcatcaaggatttacccattagaaaggtttctggaataggaaaagttacagagaaaatgttaaaggcccttggaattattacatgtacagaactttaccaacagagggcattgctttctctccttttctctgaaacatcttggcattatttccttcatatctccttgggtctaggttcaacacacctgacgagggatggagagaggaaaagtatgagcgttgagaggacattcagtgagataaataaagcggaagagcaatacagcctatgtcaagaactttgcagtgagcttgctcaggatctacagaaagaaagacttaaggtgctttattttgatatggtgtccttagtttttaagttttttaatagtaaaatgctaccttaaaagcta

SEQ ID NO: 167348 - DNA, 2727 bp, Homo sapiens
  Payload ID: 12925
  Gene Symbol: POLK
  Gene Name: polymerase (DNA directed) kappa
  ENST ID: ENST00000505975
  CDS Start-End: 1-273
atggatagcacaaaggagaagtgtgacagttacaaagatgatcttctgcttaggatgggacttaatgataataaagcaggaatggaaggattagataaagagaaaattaacaaaattataatggaagccacgaaggggtccagattttatggaaatgagctcaagaaagaaaagcaagtcaaccaacgaattgaaaatatgatgcaacaaaaagctcaaatcaccagccaacagctaagaaaagcacaattacagattaacatcaaattttaacattataaaagcaattctacagaggaacatttacattatgctacagtatcttcagttgtaccttcctgttcagcataaacatcatatgccaaagaggttgacagatttgcaatggaattagaacaaagccgaaatttgagcaataccatagtgcacattgacatggatgctttctatgcagctgtagaaatgagggacaatccagaattgaaggataaacccattgctgtaggatcaatgagtatgctgtctacttcaaattaccatgcaaggagatttggtgttcgtgcagccatgccaggatttattgctaagaggctgtgcccacaacttataatagtgccccccaactttgacaaataccgagctgtgagtaaagaggttaaggaaatacttgctgattatgatcccaattttatggccatgagtcttgatgaagcctacttgaatataacaaagcacttagaagaaagacaaaattggcctgaggataaaagaaggtatttcatcaaaatgggaagctctgtagaaaatgataatccaggaaaggaagttaataaactgagtgagcatgaacgatccatctctccactactttttgaagagagtccttctgatgtgcagcccccaggagatcctttccaagtgaactttgaagaacaaaacaatcctcaaatactccaaaactcagttgtttttggaacatcagcccaggaagtggtaaaggaaattcgtttcagaattgagcagaaaacaacactgacagccagtgcaggcattgccccaaatacaatgttagcaaaagtatgcagtgataagaataaaccaaatggacaataccaaattcttcccaatagacaagctgtgatggacttcatcaaggatttacccattagaaaggtttctggaataggaaaagttacagagaaaatgttaaaggcccttggaattattacatgtacagaactttaccaacagagggcattgctttctctccttttctctgaaacatcttggcattatttccttcatatctccttgggtctaggttcaacacacctgacgagggatggagagaggaaaagtatgagcgttgagaggacattcagtgagataaataaagcggaagagcaatacagcctatgtcaagaactttgcagtgagcttgctcaggatctacagaaagaaagacttaagggtagaactgttaccattaagttgaagaatgtgaattttgaagtaaaaactcgtgcatctacagtttcatctgttgtttctactgcagaagaaatatttgccattgctaaggaattgctaaaaacagaaattgatgctgattttccacatcccttgagattaaggcttatgggtgttcggatatctagttttcccaatgaagaggacaggaaacaccaacaaaggagcattattggctttttacaggctggaaaccaagccctgtcagccactgagtgtacattagagaaaactgacaaagataagtttgtaaaacctctagaaatgtctcataagaagagtttctttgataaaaaacgatcagaaaggaaatggagtcaccaagatacatttaaatgtgaagccgtgaataaacaaagtttccagacatcacaaccattccaagttttaaagaagaagatgaatgagaatttggaaatatcagagaattcagatgactgtcagatacttacctgtcctgtttgctttagggctcaagggtgcatcagtctggaagccttgaataaacatgtagatgaatgtcttgatggaccttcaatcagtgaaaactttaaaatgttctcgtgttcacatgtttctgctaccaaagttaacaagaaagaaaatgttcctgcttcttcactttgtgagaagcaagattatgaagcccatccaaaaattaaagaaatatcttcagtagattgtatagctttagtagatactatagataactcatctaaagcagaaagcatagatgctttaagtaataagcatagcaaggaagaatgttctagtctcccaagcaagtcttttaatattgaacactgtcatcagaattcttcttctactgtttcattggaaaacgaagatgttggatcatttagacaagaataccgccagccttacttatgtgaagtgaaaacaggccaagctctagtttgtcctgtttgtaacgtagaacaaaagacttcagatctaaccctgttcaatgtgcatgtggatgtttgcttaaataaaagttttatccaagaattaagaaaggataaatttaacccagttaatcaacccaaagaaagctccagaagtactggtagctcaagtggagtacagaaggctgtaacaagaacaaaaaggccaggattgatgacaaagtactcaacatcaaagaaaataaaaccaaacaatcccaaacatacccttgatatattttttaagtaa

SEQ ID NO: 167349 - DNA, 1484 bp, Homo sapiens
  Payload ID: 12925
  Gene Symbol: POLK
  Gene Name: polymerase (DNA directed) kappa
  Uniprot ID: Q9UBT6
  ENST ID: ENST00000504026
  CDS Start-End: 1-1386
atggatagcacaaaggagaagtgtgacagttacaaagatgatcttctgcttaggatgggacttaatgataataaagcaggaatggaaggattagataaagagaaaattaacaaaattataatggaagccacgaaggggtccagattttatggaaatgagctcaagaaagaaaagcaagtcaaccaacgaattgaaaatatgatgcaacaaaaagctcaaatcaccagccaacagctaagaaaagcacaattacaggttgacagatttgcaatggaattagaacaaagccgaaatttgagcaataccatagtgcacattgacatggatgctttctatgcagctgtagaaatgagggacaatccagaattgaaggataaacccattgctgtaggatcaatgagtatgctgtctacttcaaattaccatgcaaggagatttggtgttcgtgcagccatgccaggatttattgctaagaggctgtgcccacaacttataatagtgccccccaactttgacaaataccgagctgtgagtaaagaggttaaggaaatacttgctgattatgatcccaattttatggccatgagtcttgatgaagcctacttgaatataacaaagcacttagaagaaagacaaaattggcctgaggataaaagaaggtatttcatcaaaatgggaagctctgtagaaaatgataatccaggaaaggaagttaataaactgagtgagcatgaacgatccatctctccactactttttgaagagagtccttctgatgtgcagcccccaggagatcctttccaagtgaactttgaagaacaaaacaatcctcaaatactccaaaactcagttgtttttggaacatcagcccaggaagtggtaaaggaaattcgtttcagaattgagcagaaaacaacactgacagccagtgcaggcattgccccaaatacaatgttagcaaaagtatgcagtgataagaataaaccaaatggacaataccaaattcttcccaatagacaagctgtgatggacttcatcaaggatttacccattagaaaggtttctggaataggaaaagttacagagaaaatgttaaaggcccttggaattattacatgtacagaactttaccaacagagggcattgctttctctccttttctctgaaacatcttggcattatttccttcatatctccttgggtctaggttcaacacacctgacgagggatggagagaggaaaagtatgagcgttgagaggacattcagtgagataaataaagcggaagagcaatacagcctatgtcaagaactttgcagtgagcttgctcaggatctacagaaagaaagacttaaggtagctcaagtggagtacagaaggctgtaacaagaacaaaaaggccaggattgatgacaaagtactcaacatcaaagaaaataaaaccaaacaatcccaaacatacccttgatatattttttaagtaa

SEQ ID NO: 167350 - DNA, 1536 bp, Homo sapiens
  Payload ID: 12925
  Gene Symbol: POLK
  Gene Name: polymerase (DNA directed) kappa
  ENST ID: ENST00000514296
  CDS Start-End: 1029-1452
tgagagagctttccgctgaagatgacgggcctgctttccagggcggcttgtcgaaagcccgggagcatctggccgcttccgcctcaaccatgggctggggttttgtgagctactagtgccaagggttttctttccaccagaccaccgctgtaaatctcgagggtcttactcattagaagttagaattcacatttgacgtttaaaggaagaatttccttagtaccttctcacaagcacgcacttcgcatttttagatttctagagtttgctttgtagaaagtaattttgaggttgtcagagaataaatgacgttagaaaggtttttaaagtaaaacaagaatgtgagatgatagcctgggattttctcttggttgtaaatgaatatcttactgagaaccacgttaaccatgcctgcccctcaaagataggaaaggttggatatatagaaactttctcgtattagaaataccgaagtgcagtggttttgtgtgtacaagggattaggcaataggaggctatttttgttttaagactagggttgaattagcagaaagaccaatagaagatctaacaactcttgtcagttgtcaaggataactttgattatgagactttgactttgtagcttcagtaatttcctctcgttagctattttaatatagtcgatttccttgtaattgccaagagtaaaatttgttattaaaccttagaaagagtactttcttactacaaggatgggacgataggagcgaaatttcgagtctaagggaaaacgctggccgagtgtggtggctcacgcctgtaatcccagcacttcgggaggccgaggtgggtggatcacctgaggccgggagtttgagaccagcctgggcaacaagatttttcttcatccctttactttgagtctgtggatgtcattgcatgtgatatgggtctcctgaagacagcataccattggattttgcttctttatccaagttatcattctgtcttttaattggggtgtgcattcaagataagtttataccatggatagcacaaaggagaagtgtgacagttacaaagatgatcttctgcttaggatgggacttaatgataataaagcaggaatggaaggattagataaagagaaaattaacaaaattataatggaagccacgaaggggtccagattttatggaaatgagctcaagaaagaaaagcaagtcaaccaacgaattgaaaatatgatgcaacaaaaagctcaaatcaccagccaacagctaagaaaagcacaattacaggttgacagatttgcaatggaattagaacaaagccgaaatttgagcaataccatagtgcacattgacatggatgctttctatgcagctgtagaaatgagggacaatccagaattgaaggataaacccattgctgtaggatcaatgagtatgctgtctacttcaaattaccatgcaaggagatttggtgttcgtgcagccatgccaggatttattgctaagaggctgtgcccacaacttataatagtgcccccca

SEQ ID NO: 167351 - DNA, 2019 bp, Homo sapiens
  Payload ID: 12925
  Gene Symbol: POLK
  Gene Name: polymerase (DNA directed) kappa
  Uniprot ID: Q9UBT6
  ENST ID: ENST00000508526
  CDS Start-End: 1-2019
atggatagcacaaaggagaagtgtgacagttacaaagatgatcttctgcttaggatgggacttaatgataataaagcaggaatggaaggattagataaagagaaaattaacaaaattataatggaagccacgaaggggtccagattttatggaaatgagctcaagaaagaaaagcaagtcaaccaacgaattgaaaatatgatgcaacaaaaagctcaaatcaccagccaacagctaagaaaagcacaattacaggttgacagatttgcaatggaattagaacaaagccgaaatttgagcaataccatagtgcacattgacatggatgctttctatgcagctgtagaaatgagggacaatccagaattgaaggataaacccattgctgtaggatcaatgagtatgctgtctacttcaaattaccatgcaaggagatttggtgttcgtgcagccatgccaggatttattgctaagaggctgtgcccacaacttataatagtgccccccaactttgacaaataccgagctgtgagtaaagaggttaaggaaatacttgctgattatgatcccaattttatggccatgagtcttgatgaagcctacttgaatataacaaagcacttagaagaaagacaaaattggcctgaggataaaagaaggtatttcatcaaaatgggaagctctgtagaaaatgataatccaggaaaggaagttaataaactgagtgagcatgaacgatccatctctccactactttttgaagagagtccttctgatgtgcagcccccaggagatcctttccaagtgaactttgaagaacaaaacaatcctcaaatactccaaaactcagttgtttttggaacatcagcccaggaagtggtaaaggaaattcgtttcagaattgagcagaaaacaacactgacagccagtgcaggtgttcggatatctagttttcccaatgaagaggacaggaaacaccaacaaaggagcattattggctttttacaggctggaaaccaagccctgtcagccactgagtgtacattagagaaaactgacaaagataagtttgtaaaacctctagaaatgtctcataagaagagtttctttgataaaaaacgatcagaaaggaaatggagtcaccaagatacatttaaatgtgaagccgtgaataaacaaagtttccagacatcacaaccattccaagttttaaagaagaagatgaatgagaatttggaaatatcagagaattcagatgactgtcagatacttacctgtcctgtttgctttagggctcaagggtgcatcagtctggaagccttgaataaacatgtagatgaatgtcttgatggaccttcaatcagtgaaaactttaaaatgttctcgtgttcacatgtttctgctaccaaagttaacaagaaagaaaatgttcctgcttcttcactttgtgagaagcaagattatgaagcccatccaaaaattaaagaaatatcttcagtagattgtatagctttagtagatactatagataactcatctaaagcagaaagcatagatgctttaagtaataagcatagcaaggaagaatgttctagtctcccaagcaagtcttttaatattgaacactgtcatcagaattcttcttctactgtttcattggaaaacgaagatgttggatcatttagacaagaataccgccagccttacttatgtgaagtgaaaacaggccaagctctagtttgtcctgtttgtaacgtagaacaaaagacttcagatctaaccctgttcaatgtgcatgtggatgtttgcttaaataaaagttttatccaagaattaagaaaggataaatttaacccagttaatcaacccaaagaaagctccagaagtactggtagctcaagtggagtacagaaggctgtaacaagaacaaaaaggccaggattgatgacaaagtactcaacatcaaagaaaataaaaccaaacaatcccaaacatacccttgatatattttttaagtaa

SEQ ID NO: 167352 - DNA, 2899 bp, Homo sapiens
  Payload ID: 12926
  Gene Symbol: POLN
  Gene Name: polymerase (DNA directed) nu
  Uniprot ID: Q7Z5Q5
  ENST ID: ENST00000382865
  CDS Start-End: 1-2703
atggaaaattatgaggcattggtaggctttgatctctgtaatacaccgctctccagtgttgctcagaagattatgtctgctatgcattcaggtgatttagtggattctaagacttggggaaagagtacagagactatggaagtgataaacaagtccagtgttaagtattcagtacaacttgaagacaggaagactcaatcaccagaaaaaaaggatcttaaatctttaagaagtcagacatcaagaggttctgccaagctgtctcctcagtccttcagtgtcaggctcacagatcagctgtctgctgaccaaaaacagaagagcatcagctcattgactctttcaagttgtttaattccacagtataatcaagaggcttcagttctacagaaaaaggggcataaaagaaagcatttcctaatggagaatataaataatgaaaataaaggaagcattaatcttaaaagaaaacatattacatataataatttgtcagagaaaacaagtaaacaaatggcattggaagaagatactgatgacgccgaaggctacctaaattctgggaactcaggagcattgaaaaaacatttttgtgatattaggcatttggatgattgggcaaaaagccagctgattgaaatgctcaaacaggcagcagccctggtgataactgtgatgtatactgatggttccacccagctaggagctgaccagacccccgtttcttctgttagaggaattgtggtgttagtaaaacgccaagcagagggtggccatggctgtccagatgccccggcctgtggtcctgttctggagggctttgtgtcagatgatccatgcatctacattcaaatagagcactctgctatctgggaccaagaacaggaggcacatcaacaatttgcccggaacgtgctatttcaaacaatgaaatgtaaatgtcctgttatttgttttaatgctaaggattttgtgagaatagtgctgcagttttttggcaatgatggcagttggaagcatgttgctgattttatagggctagatcccagaattgctgcatggcttatagatcctagtgatgccacaccctcttttgaagatttagtagaaaaatactgtgaaaaatccattacagttaaagtgaacagcacatatggaaattcctcaagaaatattgtgaatcagaatgtacgtgagaacctgaagacactctacagacttacaatggacctttgctctaaactgaaggattatggtttatggcaactatttcgtactttggagcttcctctgataccaattttggcagtgatggaaagccatgccattcaggtgaacaaagaggagatggagaagacgtcagcacttcttggggctcgtctcaaggaattggagcaagaagctcattttgttgcaggagaacggtttcttataacgagcaataaccagcttcgagagatcctctttggcaagttaaagctgcacctgctgagtcaaaggaacagtctccccagaacggggttgcagaaatacccgtctacatcagaagcagtgttaaatgctctgcgagaccttcatccattacccaagataattttggaatacaggcaggttcacaagatcaagtcaacctttgtagatggattactagcttgcatgaaaaagggctccatttcctctacatggaatcagactggaactgtgactggaagactttcagccaagcatcctaatatccaaggtatctccaagcacccaattcagattactacacctaagaattttaaaggtaaagaagacaagattctcacgatctccccgagggccatgtttgtttcatccaaaggccacacctttctagcagcagacttttcacagattgaattgcgcattcttacacatttatctggagatccggaacttctgaagttattccaggaatctgaaagagatgatgtattttctactctgacttcacagtggaaggatgtgcccgtggaacaggtgacacacgcagacagagagcaaaccaagaaggtggtgtacgcggtggtctatggagcagggaaggagcggctggctgcttgccttggagttcctattcaggaagctgcccagtttttggagagttttttgcagaagtacaagaaaatcaaggacttcgcccgagcagctattgcccagtgtcaccagacaggctgtgtggtgtccatcatgggcagaaggagacccctgccaaggattcacgctcatgaccagcaactccgggcacaagcagagcgacaggcagtgaacttcgtggtgcaaggctccgctgctgacctctgcaagctggccatgatccatgtcttcactgcagtggctgcttcccacaccttgacggccaggctggtggcccagatccatgatgagctgctgtttgaagtggaagatccgcagatcccggagtgtgcagctctcgtcaggaggaccatggagtccttggaacaggtgcaggcattggagctgcagcttcaggtacccctcaaggtgagcctgagtgccggccgctcatggggacacctggtgccactgcaggaggcctggggccctccgccaggcccatgtcgcactgagtctcccagcaacagcctggctgcccctgggtcccctgccagcacccagcccccacccctgcatttttcgccttcattttgtctgtagccccaggcaacagtgggaggagagaactggtttccagcagtccattgtgtggccttccccaaggtcaccagctctgtacgccccaggacgcattaaccctttggggctggggtggcccgccatcccctggagtaaatgcctgtgcaaagccctcctcatccttgtctgagtgaattcttcctgtgagtgggaagtg

SEQ ID NO: 167353 - DNA, 1738 bp, Homo sapiens
  Payload ID: 12926
  Gene Symbol: POLN
  Gene Name: polymerase (DNA directed) nu
  ENST ID: ENST00000511098
  CDS Start-End: 1-1574
atttagtagaaaaatactgtgaaaaatccattacagttaaagtgaacagcacatatggaaattcctcaagaaatattgtgaatcagaatgtacgtgagaacctgaagacactctacagacttacaatggacctttgctctaaactgaaggattatggtttatggcaactatttcgtactttggagcttcctctgataccaattttggcagtgatggaaagccatgccattcaggtgaacaaagaggagatggagaagacgtcagcacttcttggggctcgtctcaaggaattggagcaagaagctcattttgttgcaggagaacggtttcttataacgagcaataaccagcttcgagagatcctctttggcaagttaaagctgcacctgctgagtcaaaggaacagtctccccagaacggggttgcagaaatacccgtctacatcagaagcattaaatgctctgcgagaccttcatccattacccaagataattttggaatacaggcaggttcacaagatcaagtcaacctttgtagatggattactagcttgcatgaaaaagggctccatttcctctacatggaatcagactggaactgtgactggaagactttcagccaagcatcctaatatccaaggtatctccaagcacccaattcagattactacacctaagaattttaaaggtaaagaagacaagattctcacgatctccccgagggccatgtttgtttcatccaaaggccacacctttctagcagcagacttttcacagattgaattgcgcattcttacacatttatctggagatccggaacttctgaagttattccaggaatctgaaagagatgatgtattttctactctgacttcacagtggaaggatgtgcccgtggaacaggtgacacacgcagacagagagcaaaccaagaaggtggtgtacgcggtggtctatggagcagggaaggagcggctggctgcttgccttggagttcctattcaggaagctgcccagtttttggagagttttttgcagaagtacaagaaaatcaaggacttcgcccgagcagctattgcccagtgtcaccagacaggctgtgtggtgtccatcatgggcagaaggagacccctgccaaggattcacgctcatgaccagcaactccgggcacaagcagagcgacaggcagtgaacttcgtggtgcaaggctccgctgctgacctctgcaagctggccatgatccatgtcttcactgcagtggctgcttcccacaccttgacggccaggctggtggcccagatccatgatgagctgctgtttgaagtggaagatccgcagatcccggagtgtgcagctctcgtcaggaggaccatggagtccttggaacaggtacccctcaaggtgagcctgagtgccggccgctcatggggacacctggtgccactgcaggaggcctggggccctccgccaggcccatgtcgcactgagtctcccagcaacagcctggctgcccctgggtcccctgccagcacccagcccccacccctgcatttttcgccttcattttgtctgtagccccaggcaacagtgggaggagagaactggtttccagcagtccattgtgtggccttccccaaggtcaccagctctgtacgccccaggacgcattaaccctttggggctggggtggcccgccatcccctggagtaaatgcctgtgcaaagccctcctcatccttg

SEQ ID NO: 167354 - DNA, 3253 bp, Homo sapiens
  Payload ID: 12926
  Gene Symbol: POLN
  Gene Name: polymerase (DNA directed) nu
  Uniprot ID: Q7Z5Q5
  ENST ID: ENST00000511885
  CDS Start-End: 355-3057
agtgcgaggcgcgcggggcacggagggcggtggcggcgggctcctgcgagaagcaagcggaacttcctgagcgtgcttaggtgtcacagctgggtgaccctccgaaggaaggttttgccgctggcgcgtctggtgtatcgcggccttggggccgcggatccctggggcttgccgctgcctctggggttcgcgcggccctggcgtcggggctgcctcagcgctggctgaaggccggcccgaagcacccttaattgtggccgcgcgcttccctgctgctcctgctgttctccgcgtcgcggtggtggactctggaggtggagccttgcccggcgagacgttgaggattttgtgaaaatggaaaattatgaggcattggtaggctttgatctctgtaatacaccgctctccagtgttgctcagaagattatgtctgctatgcattcaggtgatttagtggattctaagacttggggaaagagtacagagactatggaagtgataaacaagtccagtgttaagtattcagtacaacttgaagacaggaagactcaatcaccagaaaaaaaggatcttaaatctttaagaagtcagacatcaagaggttctgccaagctgtctcctcagtccttcagtgtcaggctcacagatcagctgtctgctgaccaaaaacagaagagcatcagctcattgactctttcaagttgtttaattccacagtataatcaagaggcttcagttctacagaaaaaggggcataaaagaaagcatttcctaatggagaatataaataatgaaaataaaggaagcattaatcttaaaagaaaacatattacatataataatttgtcagagaaaacaagtaaacaaatggcattggaagaagatactgatgacgccgaaggctacctaaattctgggaactcaggagcattgaaaaaacatttttgtgatattaggcatttggatgattgggcaaaaagccagctgattgaaatgctcaaacaggcagcagccctggtgataactgtgatgtatactgatggttccacccagctaggagctgaccagacccccgtttcttctgttagaggaattgtggtgttagtaaaacgccaagcagagggtggccatggctgtccagatgccccggcctgtggtcctgttctggagggctttgtgtcagatgatccatgcatctacattcaaatagagcactctgctatctgggaccaagaacaggaggcacatcaacaatttgcccggaacgtgctatttcaaacaatgaaatgtaaatgtcctgttatttgttttaatgctaaggattttgtgagaatagtgctgcagttttttggcaatgatggcagttggaagcatgttgctgattttatagggctagatcccagaattgctgcatggcttatagatcctagtgatgccacaccctcttttgaagatttagtagaaaaatactgtgaaaaatccattacagttaaagtgaacagcacatatggaaattcctcaagaaatattgtgaatcagaatgtacgtgagaacctgaagacactctacagacttacaatggacctttgctctaaactgaaggattatggtttatggcaactatttcgtactttggagcttcctctgataccaattttggcagtgatggaaagccatgccattcaggtgaacaaagaggagatggagaagacgtcagcacttcttggggctcgtctcaaggaattggagcaagaagctcattttgttgcaggagaacggtttcttataacgagcaataaccagcttcgagagatcctctttggcaagttaaagctgcacctgctgagtcaaaggaacagtctccccagaacggggttgcagaaatacccgtctacatcagaagcagtgttaaatgctctgcgagaccttcatccattacccaagataattttggaatacaggcaggttcacaagatcaagtcaacctttgtagatggattactagcttgcatgaaaaagggctccatttcctctacatggaatcagactggaactgtgactggaagactttcagccaagcatcctaatatccaaggtatctccaagcacccaattcagattactacacctaagaattttaaaggtaaagaagacaagattctcacgatctccccgagggccatgtttgtttcatccaaaggccacacctttctagcagcagacttttcacagattgaattgcgcattcttacacatttatctggagatccggaacttctgaagttattccaggaatctgaaagagatgatgtattttctactctgacttcacagtggaaggatgtgcccgtggaacaggtgacacacgcagacagagagcaaaccaagaaggtggtgtacgcggtggtctatggagcagggaaggagcggctggctgcttgccttggagttcctattcaggaagctgcccagtttttggagagttttttgcagaagtacaagaaaatcaaggacttcgcccgagcagctattgcccagtgtcaccagacaggctgtgtggtgtccatcatgggcagaaggagacccctgccaaggattcacgctcatgaccagcaactccgggcacaagcagagcgacaggcagtgaacttcgtggtgcaaggctccgctgctgacctctgcaagctggccatgatccatgtcttcactgcagtggctgcttcccacaccttgacggccaggctggtggcccagatccatgatgagctgctgtttgaagtggaagatccgcagatcccggagtgtgcagctctcgtcaggaggaccatggagtccttggaacaggtgcaggcattggagctgcagcttcaggtacccctcaaggtgagcctgagtgccggccgctcatggggacacctggtgccactgcaggaggcctggggccctccgccaggcccatgtcgcactgagtctcccagcaacagcctggctgcccctgggtcccctgccagcacccagcccccacccctgcatttttcgccttcattttgtctgtagccccaggcaacagtgggaggagagaactggtttccagcagtccattgtgtggccttccccaaggtcaccagctctgtacgccccaggacgcattaaccctttggggctggggtggcccgccatcccctggagtaaatgcctgtgcaaagccctcctcatccttgtctgagtgaattcttcctgtgagtgggaagtg

SEQ ID NO: 167355 - DNA, 5440 bp, Homo sapiens
  Payload ID: 12927
  Gene Symbol: POLA1
  Gene Name: polymerase (DNA directed), alpha 1, catalytic subunit
  Uniprot ID: P09884
  ENST ID: ENST00000379059
  CDS Start-End: 16-4404
gggagattcgggaccatggcacctgtgcacggcgacgactctctgtcagattcagggagttttgtatcttctcgagcccggcgagaaaaaaaatcaaagaaggggcgccaagaagccctagaaagactgaaaaaggctaaagctggtgagaagtataaatatgaagtcgaggacttcacaggtgtttatgaagaagttgatgaagaacagtattcgaagctggttcaggcacgccaggatgatgactggattgtggatgatgatggtattggctatgtggaagatggccgagagatttttgatgatgaccttgaagatgatgcccttgatgctgatgagaaaggaaaagatggtaaagcacgcaataaagacaagaggaatgtaaagaagctcgcagtgacaaaaccgaacaacattaagtcaatgttcattgcttgtgctggaaagaaaactgcagataaagctgtagacttgtccaaggatggtctgctaggtgacattctacaggatcttaacactgagacacctcaaataactccaccacctgtaatgatactgaagaagaaaagatccattggagcttcaccgaatcctttctctgtgcacaccgccacggcagttccttcaggaaaaattgcttcccctgtctccagaaaggagcctccattaactcctgttcctcttaaacgtgctgaatttgctggcgatgatgtacaggtcgagagtacagaagaagagcaggagtcaggggcaatggagtttgaagatggtgactttgatgagcccatggaagttgaagaggtggacctggagcctatggctgccaaggcttgggacaaagagagtgagccagcagaggaagtgaaacaagaggcggattctgggaaagggaccgtgtcctacttaggaagttttctcccggatgtctcttgttgggacattgatcaagaaggtgatagcagtttctcagtgcaagaagttcaagtggattccagtcacctcccattggtaaaaggggcagatgaggaacaagtattccacttttattggttggatgcttatgaggatcagtacaaccaaccaggtgtggtatttctgtttgggaaagtttggattgaatcagccgagacccatgtgagctgttgtgtcatggtgaaaaatatcgagcgaacgctttacttccttccccgtgaaatgaaaattgatctaaatacggggaaagaaacaggaactccaatttcaatgaaggatgtttatgaggaatttgatgagaaaatagcaacaaaatataaaattatgaagttcaagtctaagccagtggaaaagaactatgcttttgagatacctgatgttccagaaaaatctgagtacttggaagttaaatactcggctgaaatgccacagcttcctcaagatttgaaaggagaaactttttctcatgtatttgggaccaacacatctagcctggaactgttcttgatgaacagaaagatcaaaggaccttgttggcttgaagtaaaaagtccacagctcttgaatcagccagtcagttggtgtaaagttgaggcaatggctttgaaaccagacctggtgaatgtaattaaggatgtcagtccaccaccgcttgtcgtgatggctttcagcatgaagacaatgcagaatgcaaagaaccatcaaaatgagattattgctatggcagctttggtccatcacagttttgcattggataaagcagccccaaagcctccctttcagtcacacttctgtgttgtgtctaaaccaaaggactgtatttttccatatgctttcaaagaagtcattgagaaaaagaatgtgaaggttgaggttgctgcaacagaaagaacactgctaggttttttccttgcaaaagttcacaaaattgatcctgatatcattgtgggtcataatatttatgggtttgaactggaagtactactgcagagaattaatgtgtgcaaagctcctcactggtccaagataggtcgactgaagcgatccaacatgccaaagcttgggggccggagtggatttggtgaaagaaatgctacctgtggtcgaatgatctgtgatgtggaaatttcagcaaaggaattgattcgttgtaaaagctaccatctgtctgaacttgttcagcagattctaaaaactgaaagggttgtaatcccaatggaaaatatacaaaatatgtacagtgaatcttctcaactgttatacctgttggaacacacctggaaagatgccaagttcattttgcagatcatgtgtgagctaaatgttcttccattagcattgcagatcactaacatcgctgggaacattatgtccaggacgctgatgggtggacgatccgagcgtaacgagttcttgttgcttcatgcattttacgaaaacaactatattgtgcctgacaagcagattttcagaaagcctcagcaaaaactgggagatgaagatgaagaaattgatggagataccaataaatacaagaaaggacgtaagaaagcagcttatgctggaggcttggttttggaccccaaagttggtttttatgataagttcattttgcttctggacttcaacagtctatatccttccatcattcaggaatttaacatttgttttacaacagtacaaagagttgcttcagaggcacagaaagttacagaggatggagaacaagaacagatccctgagttgccagatccaagcttagaaatgggcattttgcccagagagatccggaaactggtagaacggagaaaacaagtcaaacagctaatgaaacagcaagacttaaatccagaccttattcttcagtatgacattcgacagaaggctttgaagctcacagcgaacagtatgtatggttgcctgggattttcctatagcagattttacgccaaaccactggctgccttggtgacatacaaaggaagggagattttgatgcatacgaaagagatggtacaaaagatgaatcttgaagttatttatggagatacagattcaattatgataaacaccaatagcaccaatctggaagaagtatttaagttgggaaacaaggtaaaaagtgaagtgaataagttgtacaaactgcttgaaatagacattgatggggttttcaagtctctgctactgctgaaaaaaaagaagtacgctgctctggttgttgagccaacgtcggatgggaattatgtcaccaaacaggagctcaaaggattagatatagttagaagagattggtgtgatcttgctaaagacactggaaactttgtgattggccagattctttctgatcaaagccgggacactatagtggaaaacattcagaagaggctgatagaaattggagaaaatgtgctaaatggcagtgtcccagtgagccagtttgaaattaacaaggcattgacaaaggatccccaggattaccctgataaaaaaagcctacctcatgtacatgttgccctctggataaattctcaaggaggcagaaaggtgaaagctggagatactgtgtcatatgtcatctgtcaggatggatcaaacctcactgcaagtcagagggcctatgcgcctgagcagctgcagaaacaggataatctaaccattgacacccagtactacctggcccagcagatccacccagtcgtggctcggatctgtgaaccaatagacggaattgatgctgtcctcattgcaacgtggttgggacttgaccccacccaatttagagttcatcattatcataaagatgaagagaatgatgctctacttggtggcccagcacagctcactgatgaagagaaatacagggactgtgaaagattcaaatgtccatgccctacatgtggaactgagaatatttatgataatgtctttgatggttcgggaacagatatggagcccagcttgtatcgttgcagtaacatcgattgtaaggcttcacctctgacctttacagtacaactgagcaacaaattgatcatggacattagacgtttcattaaaaagtactatgatggctggttgatatgtgaagagccaacctgtcgcaatcgaactcgtcaccttccccttcaattctcccgaactgggcctctttgcccagcctgcatgaaagctacacttcaaccagagtattctgacaagtccctgtacacccagctgtgcttttaccggtacatttttgatgcggagtgtgcactggagaaacttactaccgatcatgagaaagataaattgaagaagcaattttttacccccaaagttctgcaggactacagaaaactcaagaacacagcagagcaattcttgtcccgaagtggctactccgaagtgaatctgagcaaactcttcgctggttgtgccgtgaaatcctaagggaatcccaggagtaaccaaggagggggtagttgaaaaatcccagcttcctctgtgcctccactctggccctaaatgctcctccagcatctgtttctcccttgggactgtgtctcatgtttgtgtgaatgtagaccaggaaagggggctgcaaaaatgttgagtctaatgttcgtaagcatcatagaaattcctgtcttcatattaagatgtactgctttaaaacacaactccagagcccctccccaagctcccctccccaagctcctgaagacccggtttctgagggagggaaattgctacttggattgagagtagctggaatgtaagtgaccccaggctttgcctcagggcctttagcctatgtcccccccacataaagagagcttctcagagcctgactgaagagctgacgttttgctttttcatatgccaattaaacccggtctaaatccaaatgcttctccagccatccaggagtggctgtccttttcagtcttgtcttttatataggtagctgagggggaagatttagaagccttgcactcactaaatagattaaacagagcaggcttgtttgttgaattgctccaaagtccaacagacacacactgagcaggtgttttacactcacattccctttttgccccttaaatagaaagtgcaggtaaaggtttatacaacaagaaagcacattgaaaataatttgatactctaacaatccattaacatgtgtaggggttacggtgaggatcactgtgttgtattcagaaaaacggggagagggatgcttaattggccctggcgcttgctatttttttctcatttcttcacaataggaccgtctttggcagcagcaaaatgtatttcagtatggcagtctttcctctcttacattattggtaagattatactaacaaaatgtttccccttgtacaattatgctgtgtttttaaaaaacattgacctgtgtgtttttataaaagaaaaagtatgttgtgccttcttcttaagaataaagttttctaaagggaaa

SEQ ID NO: 167356 - DNA, 5486 bp, Homo sapiens
  Payload ID: 12927
  Gene Symbol: POLA1
  Gene Name: polymerase (DNA directed), alpha 1, catalytic subunit
  ENST ID: ENST00000379068
  CDS Start-End: 44-4450
ccagttttgggctggttggcgcggaatcgggagattcgggaccatggcacctgtgcacggcgacgactgtgagataggggcgagtgctctgtcagattcagggagttttgtatcttctcgagcccggcgagaaaaaaaatcaaagaaggggcgccaagaagccctagaaagactgaaaaaggctaaagctggtgagaagtataaatatgaagtcgaggacttcacaggtgtttatgaagaagttgatgaagaacagtattcgaagctggttcaggcacgccaggatgatgactggattgtggatgatgatggtattggctatgtggaagatggccgagagatttttgatgatgaccttgaagatgatgcccttgatgctgatgagaaaggaaaagatggtaaagcacgcaataaagacaagaggaatgtaaagaagctcgcagtgacaaaaccgaacaacattaagtcaatgttcattgcttgtgctggaaagaaaactgcagataaagctgtagacttgtccaaggatggtctgctaggtgacattctacaggatcttaacactgagacacctcaaataactccaccacctgtaatgatactgaagaagaaaagatccattggagcttcaccgaatcctttctctgtgcacaccgccacggcagttccttcaggaaaaattgcttcccctgtctccagaaaggagcctccattaactcctgttcctcttaaacgtgctgaatttgctggcgatgatgtacaggtcgagagtacagaagaagagcaggagtcaggggcaatggagtttgaagatggtgactttgatgagcccatggaagttgaagaggtggacctggagcctatggctgccaaggcttgggacaaagagagtgagccagcagaggaagtgaaacaagaggcggattctgggaaagggaccgtgtcctacttaggaagttttctcccggatgtctcttgttgggacattgatcaagaaggtgatagcagtttctcagtgcaagaagttcaagtggattccagtcacctcccattggtaaaaggggcagatgaggaacaagtattccacttttattggttggatgcttatgaggatcagtacaaccaaccaggtgtggtatttctgtttgggaaagtttggattgaatcagccgagacccatgtgagctgttgtgtcatggtgaaaaatatcgagcgaacgctttacttccttccccgtgaaatgaaaattgatctaaatacggggaaagaaacaggaactccaatttcaatgaaggatgtttatgaggaatttgatgagaaaatagcaacaaaatataaaattatgaagttcaagtctaagccagtggaaaagaactatgcttttgagatacctgatgttccagaaaaatctgagtacttggaagttaaatactcggctgaaatgccacagcttcctcaagatttgaaaggagaaactttttctcatgtatttgggaccaacacatctagcctggaactgttcttgatgaacagaaagatcaaaggaccttgttggcttgaagtaaaaagtccacagctcttgaatcagccagtcagttggtgtaaagttgaggcaatggctttgaaaccagacctggtgaatgtaattaaggatgtcagtccaccaccgcttgtcgtgatggctttcagcatgaagacaatgcagaatgcaaagaaccatcaaaatgagattattgctatggcagctttggtccatcacagttttgcattggataaagcagccccaaagcctccctttcagtcacacttctgtgttgtgtctaaaccaaaggactgtatttttccatatgctttcaaagaagtcattgagaaaaagaatgtgaaggttgaggttgctgcaacagaaagaacactgctaggttttttccttgcaaaagttcacaaaattgatcctgatatcattgtgggtcataatatttatgggtttgaactggaagtactactgcagagaattaatgtgtgcaaagctcctcactggtccaagataggtcgactgaagcgatccaacatgccaaagcttgggggccggagtggatttggtgaaagaaatgctacctgtggtcgaatgatctgtgatgtggaaatttcagcaaaggaattgattcgttgtaaaagctaccatctgtctgaacttgttcagcagattctaaaaactgaaagggttgtaatcccaatggaaaatatacaaaatatgtacagtgaatcttctcaactgttatacctgttggaacacacctggaaagatgccaagttcattttgcagatcatgtgtgagctaaatgttcttccattagcattgcagatcactaacatcgctgggaacattatgtccaggacgctgatgggtggacgatccgagcgtaacgagttcttgttgcttcatgcattttacgaaaacaactatattgtgcctgacaagcagattttcagaaagcctcagcaaaaactgggagatgaagatgaagaaattgatggagataccaataaatacaagaaaggacgtaagaaagcagcttatgctggaggcttggttttggaccccaaagttggtttttatgataagttcattttgcttctggacttcaacagtctatatccttccatcattcaggaatttaacatttgttttacaacagtacaaagagttgcttcagaggcacagaaagttacagaggatggagaacaagaacagatccctgagttgccagatccaagcttagaaatgggcattttgcccagagagatccggaaactggtagaacggagaaaacaagtcaaacagctaatgaaacagcaagacttaaatccagaccttattcttcagtatgacattcgacagaaggctttgaagctcacagcgaacagtatgtatggttgcctgggattttcctatagcagattttacgccaaaccactggctgccttggtgacatacaaaggaagggagattttgatgcatacgaaagagatggtacaaaagatgaatcttgaagttatttatggagatacagattcaattatgataaacaccaatagcaccaatctggaagaagtatttaagttgggaaacaaggtaaaaagtgaagtgaataagttgtacaaactgcttgaaatagacattgatggggttttcaagtctctgctactgctgaaaaaaaagaagtacgctgctctggttgttgagccaacgtcggatgggaattatgtcaccaaacaggagctcaaaggattagatatagttagaagagattggtgtgatcttgctaaagacactggaaactttgtgattggccagattctttctgatcaaagccgggacactatagtggaaaacattcagaagaggctgatagaaattggagaaaatgtgctaaatggcagtgtcccagtgagccagtttgaaattaacaaggcattgacaaaggatccccaggattaccctgataaaaaaagcctacctcatgtacatgttgccctctggataaattctcaaggaggcagaaaggtgaaagctggagatactgtgtcatatgtcatctgtcaggatggatcaaacctcactgcaagtcagagggcctatgcgcctgagcagctgcagaaacaggataatctaaccattgacacccagtactacctggcccagcagatccacccagtcgtggctcggatctgtgaaccaatagacggaattgatgctgtcctcattgcaacgtggttgggacttgaccccacccaatttagagttcatcattatcataaagatgaagagaatgatgctctacttggtggcccagcacagctcactgatgaagagaaatacagggactgtgaaagattcaaatgtccatgccctacatgtggaactgagaatatttatgataatgtctttgatggttcgggaacagatatggagcccagcttgtatcgttgcagtaacatcgattgtaaggcttcacctctgacctttacagtacaactgagcaacaaattgatcatggacattagacgtttcattaaaaagtactatgatggctggttgatatgtgaagagccaacctgtcgcaatcgaactcgtcaccttccccttcaattctcccgaactgggcctctttgcccagcctgcatgaaagctacacttcaaccagagtattctgacaagtccctgtacacccagctgtgcttttaccggtacatttttgatgcggagtgtgcactggagaaacttactaccgatcatgagaaagataaattgaagaagcaattttttacccccaaagttctgcaggactacagaaaactcaagaacacagcagagcaattcttgtcccgaagtggctactccgaagtgaatctgagcaaactcttcgctggttgtgccgtgaaatcctaagggaatcccaggagtaaccaaggagggggtagttgaaaaatcccagcttcctctgtgcctccactctggccctaaatgctcctccagcatctgtttctcccttgggactgtgtctcatgtttgtgtgaatgtagaccaggaaagggggctgcaaaaatgttgagtctaatgttcgtaagcatcatagaaattcctgtcttcatattaagatgtactgctttaaaacacaactccagagcccctccccaagctcccctccccaagctcctgaagacccggtttctgagggagggaaattgctacttggattgagagtagctggaatgtaagtgaccccaggctttgcctcagggcctttagcctatgtcccccccacataaagagagcttctcagagcctgactgaagagctgacgttttgctttttcatatgccaattaaacccggtctaaatccaaatgcttctccagccatccaggagtggctgtccttttcagtcttgtcttttatataggtagctgagggggaagatttagaagccttgcactcactaaatagattaaacagagcaggcttgtttgttgaattgctccaaagtccaacagacacacactgagcaggtgttttacactcacattccctttttgccccttaaatagaaagtgcaggtaaaggtttatacaacaagaaagcacattgaaaataatttgatactctaacaatccattaacatgtgtaggggttacggtgaggatcactgtgttgtattcagaaaaacggggagagggatgcttaattggccctggcgcttgctatttttttctcatttcttcacaataggaccgtctttggcagcagcaaaatgtatttcagtatggcagtctttcctctcttacattattggtaagattatactaacaaaatgtttccccttgtacaattatgctgtgtttttaaaaaacattgacctgtgtgtttttataaaagaaaaagtatgttgtgccttcttcttaagaataaagttttctaaagggaaa

SEQ ID NO: 167357 - DNA, 5434 bp, Homo sapiens
  Payload ID: 12927
  Gene Symbol: POLA1
  Gene Name: polymerase (DNA directed), alpha 1, catalytic subunit
  ENST ID: ENST00000611764
  CDS Start-End: 16-4401
gggagattcgggaccatggcacctgtgcacggcgacgactctctgtcagattcagggagttttgtatcttctcgagcccggcgagaaaaaaaatcaaagaaggggcgccaagaagccctagaaagactgaaaaaggctaaagctggtgagaagtataaatatgaagtcgaggacttcacaggtgtttatgaagaagttgatgaagaacagtattcgaagctggttcaggcacgccaggatgatgactggattgtggatgatgatggtattggctatgtggaagatggccgagagatttttgatgatgaccttgaagatgatgcccttgatgctgatgagaaaggaaaagatggtaaagcacgcaataaagacaagaggaatgtaaagaagctcgcagtgacaaaaccgaacaacattaagtcaatgttcattgcttgtgctggaaagaaaactgcagataaagctgtagacttgtccaaggatggtctgctaggtgacattctacaggatcttaacactgagacacctcaaataactccaccacctgtaatgatactgaagaagaaaagatccattggagcttcaccgaatcctttctctgtgcacaccgccacggcagttccttcaggaaaaattgcttcccctgtctccagaaaggagcctccattaactcctgttcctcttaaacgtgctgaatttgctggcgatgatgtacaggtcgagagtacagaagaagagcaggagtcaggggcaatggagtttgaagatggtgactttgatgagcccatggaagttgaagaggtggacctggagcctatggctgccaaggcttgggacaaagagagtgagccagcagaggaagtgaaacaagaggcggattctgggaaagggaccgtgtcctacttaggaagttttctcccggatgtctcttgttgggacattgatcaagaaggtgatagcagtttctcagtgcaagaagttcaagtggattccagtcacctcccattggtaaaaggggcagatgaggaacaagtattccacttttattggttggatgcttatgaggatcagtacaaccaaccaggtgtggtatttctgtttgggaaagtttggattgaatcagccgagacccatgtgagctgttgtgtcatggtgaaaaatatcgagcgaacgctttacttccttccccgtgaaatgaaaattgatctaaatacggggaaagaaacaggaactccaatttcaatgaaggatgtttatgaggaatttgatgagaaaatagcaacaaaatataaaattatgaagttcaagtctaagccagtggaaaagaactatgcttttgagatacctgatgttccagaaaaatctgagtacttggaagttaaatactcggctgaaatgccacagcttcctcaagatttgaaaggagaaactttttctcatgtatttgggaccaacacatctagcctggaactgttcttgatgaacagaaagatcaaaggaccttgttggcttgaagtaaaaagtccacctcttaatcagccagtcagttggtgtaaagttgaggcaatggctttgaaaccagacctggtgaatgtaattaaggatgtcagtccaccaccgcttgtcgtgatggctttcagcatgaagacaatgcagaatgcaaagaaccatcaaaatgagattattgctatggcagctttggtccatcacagttttgcattggataaagcagccccaaagcctccctttcagtcacacttctgtgttgtgtctaaaccaaaggactgtatttttccatatgctttcaaagaagtcattgagaaaaagaatgtgaaggttgaggttgctgcaacagaaagaacactgctaggttttttccttgcaaaagttcacaaaattgatcctgatatcattgtgggtcataatatttatgggtttgaactggaagtactactgcagagaattaatgtgtgcaaagctcctcactggtccaagataggtcgactgaagcgatccaacatgccaaagcttgggggccggagtggatttggtgaaagaaatgctacctgtggtcgaatgatctgtgatgtggaaatttcagcaaaggaattgattcgttgtaaaagctaccatctgtctgaacttgttcagcagattctaaaaactgaaagggttgtaatcccaatggaaaatatacaaaatatgtacagtgaatcttctcaactgttatacctgttggaacacacctggaaagatgccaagttcattttgcagatcatgtgtgagctaaatgttcttccattagcattgcagatcactaacatcgctgggaacattatgtccaggacgctgatgggtggacgatccgagcgtaacgagttcttgttgcttcatgcattttacgaaaacaactatattgtgcctgacaagcagattttcagaaagcctcagcaaaaactgggagatgaagatgaagaaattgatggagataccaataaatacaagaaaggacgtaagaaagcagcttatgctggaggcttggttttggaccccaaagttggtttttatgataagttcattttgcttctggacttcaacagtctatatccttccatcattcaggaatttaacatttgttttacaacagtacaaagagttgcttcagaggcacagaaagttacagaggatggagaacaagaacagatccctgagttgccagatccaagcttagaaatgggcattttgcccagagagatccggaaactggtagaacggagaaaacaagtcaaacagctaatgaaacagcaagacttaaatccagaccttattcttcagtatgacattcgacagaaggctttgaagctcacagcgaacagtatgtatggttgcctgggattttcctatagcagattttacgccaaaccactggctgccttggtgacatacaaaggaagggagattttgatgcatacgaaagagatggtacaaaagatgaatcttgaagttatttatggagatacagattcaattatgataaacaccaatagcaccaatctggaagaagtatttaagttgggaaacaaggtaaaaagtgaagtgaataagttgtacaaactgcttgaaatagacattgatggggttttcaagtctctgctactgctgaaaaaaaagaagtacgctgctctggttgttgagccaacgtcggatgggaattatgtcaccaaacaggagctcaaaggattagatatagttagaagagattggtgtgatcttgctaaagacactggaaactttgtgattggccagattctttctgatcaaagccgggacactatagtggaaaacattcagaagaggctgatagaaattggagaaaatgtgctaaatggcagtgtcccagtgagccagtttgaaattaacaaggcattgacaaaggatccccaggattaccctgataaaaaaagcctacctcatgtacatgttgccctctggataaattctcaaggaggcagaaaggtgaaagctggagatactgtgtcatatgtcatctgtcaggatggatcaaacctcactgcaagtcagagggcctatgcgcctgagcagctgcagaaacaggataatctaaccattgacacccagtactacctggcccagcagatccacccagtcgtggctcggatctgtgaaccaatagacggaattgatgctgtcctcattgcaacgtggttgggacttgaccccacccaatttagagttcatcattatcataaagatgaagagaatgatgctctacttggtggcccagcacagctcactgatgaagagaaatacagggactgtgaaagattcaaatgtccatgccctacatgtggaactgagaatatttatgataatgtctttgatggttcgggaacagatatggagcccagcttgtatcgttgcagtaacatcgattgtaaggcttcacctctgacctttacagtacaactgagcaacaaattgatcatggacattagacgtttcattaaaaagtactatgatggctggttgatatgtgaagagccaacctgtcgcaatcgaactcgtcaccttccccttcaattctcccgaactgggcctctttgcccagcctgcatgaaagctacacttcaaccagagtattctgacaagtccctgtacacccagctgtgcttttaccggtacatttttgatgcggagtgtgcactggagaaacttactaccgatcatgagaaagataaattgaagaagcaattttttacccccaaagttctgcaggactacagaaaactcaagaacacagcagagcaattcttgtcccgaagtggctactccgaagtgaatctgagcaaactcttcgctggttgtgccgtgaaatcctaagggaatcccaggagtaaccaaggagggggtagttgaaaaatcccagcttcctctgtgcctccactctggccctaaatgctcctccagcatctgtttctcccttgggactgtgtctcatgtttgtgtgaatgtagaccaggaaagggggctgcaaaaatgttgagtctaatgttcgtaagcatcatagaaattcctgtcttcatattaagatgtactgctttaaaacacaactccagagcccctccccaagctcccctccccaagctcctgaagacccggtttctgagggagggaaattgctacttggattgagagtagctggaatgtaagtgaccccaggctttgcctcagggcctttagcctatgtcccccccacataaagagagcttctcagagcctgactgaagagctgacgttttgctttttcatatgccaattaaacccggtctaaatccaaatgcttctccagccatccaggagtggctgtccttttcagtcttgtcttttatataggtagctgagggggaagatttagaagccttgcactcactaaatagattaaacagagcaggcttgtttgttgaattgctccaaagtccaacagacacacactgagcaggtgttttacactcacattccctttttgccccttaaatagaaagtgcaggtaaaggtttatacaacaagaaagcacattgaaaataatttgatactctaacaatccattaacatgtgtaggggttacggtgaggatcactgtgttgtattcagaaaaacggggagagggatgcttaattggccctggcgcttgctatttttttctcatttcttcacaataggaccgtctttggcagcagcaaaatgtatttcagtatggcagtctttcctctcttacattattggtaagattatactaacaaaatgtttccccttgtacaattatgctgtgtttttaaaaaacattgacctgtgtgtttttataaaagaaaaagtatgttgtgccttcttcttaagaataaagttttctaaaggg

SEQ ID NO: 167358 - DNA, 3744 bp, Homo sapiens
  Payload ID: 12928
  Gene Symbol: POLA2
  Gene Name: polymerase (DNA directed), alpha 2, accessory subunit
  Uniprot ID: Q14181
  ENST ID: ENST00000265465
  CDS Start-End: 532-2328
gcagctgctgactggcgggccgccaggcgcgtgcgtagagacgcccacacgcccgctgatgcgcacgcgccctgggccgcgcgtgcgcgcgtggggttccggaatgagccggggaaagcaaggggaaggtttggggttggctcccggtttcgcgcatgcgtgcactgcacaaaccatttggcgggtttttccggccactcagttctgccaccgtcactgagaagctcagcggtagcttttgggaagcaggacgttctcaccaggagagcgtcctctcgagatttctgctccctccattcagggcgtttgggagccaccccttcattttttaaaaaaagtatttctctgtgaccgacggccggggccttctgacggtctgaggtcttgcttgggccagtcacctcctgtcacggtccgcggaggggggaaggataagagggcgaggagctcatcgctcgccacccccgtgggcttcttgggcgcaggtcggagctgggtgggccggctccccggcccctggcttgggcgaccatgtccgcatccgcccagcagctggcggaggagctgcagatcttcggcctagactgcgaggaggctctaattgagaaattggtagagctttgtgttcagtatggacagaatgaggagggaatggtaggcgagcttatagccttctgcaccagcacacataaagttggccttacctcagagatcctgaactcttttgagcatgagtttctgagcaaaagattatcgaaagccaggcatagtacctgcaaggacagtggccatgcaggagctagagacattgtttccattcaagagctaattgaagtggaagaagaagaggaaatcctcttgaactcttacaccacaccttcaaagggttctcagaagcgagctatctctaccccagaaacccccctaacaaaaaggagtgtgtcaactcgtagcccccatcagctactctcaccgtcaagtttctctccaagtgctactccctcccagaaatacaactcacgaagtaaccgaggagaagtggttacctccttcggcttagcacagggagtatcttggtctgggagaggaggagctggaaacatcagcctgaaggtcttgggatgtccagaggcactaactgggagctacaaatccatgtttcagaagctcccagacattcgagaagttctgacctgtaagatagaagaacttggcagcgaactcaaggaacattacaagattgaagctttcactcctttgctagccccagcacaggagcctgtcactctgctgggccagattggctgtgatagcaacgggaagctgaacaacaagtcagtgattctcgagggagaccgggaacattcctcgggtgctcaaattccagtggatttatctgagcttaaggaatattctctgtttcctggacaggttgtaattatggaaggaatcaacaccactggtaggaaacttgttgccaccaaactctacgagggtgtgccacttccattttatcagcccactgaagaggatgcagactttgagcaaagcatggtcctggttgcctgtggaccatacaccacatctgacagcatcacgtatgaccccctgcttgacctgattgctgtcatcaaccatgaccggccagatgtctgcatcctgtttggccctttcctggatgctaagcatgaacaggtggagaattgtctactgacaagtccatttgaagacattttcaagcagtgtctacgaacaattattgaaggcacaagaagctccggctcccaccttgtctttgtcccgtcattgagagatgtgcaccatgagcctgtgtacccccagccgcctttcagctactccgatctgtctcgagaggacaaaaagcaagtacagtttgtgtccgagccctgcagcctctccataaacggagtgatcttcggcttgacatccacagatctgcttttccacctgggggccgaggagatcagtagttcttccggaacttcagacagattcagccgaatactcaagcacatcttgacccagaggagctactacccactctacccgccccaagaagacatggccattgactatgagtcgttctatgtttacgcacagctgcctgtcaccccagatgtcctcatcatcccgtcagagctgaggtacttcgtgaaggatgtcctcggctgtgtctgtgtgaaccctgggcgccttaccaaagggcaggtgggaggcaccttcgcccgactctaccttaggaggccggcagcggacggggcagagaggcagagcccatgcattgctgtgcaggtcgtcaggatctgaggcttctgtcctctgctgttctctgctgtgtgggcccttaaagtcttagccaagagccaagacatagccctgtgacaaggtgaacagttgggtgggaaaggagagaggagccagccagggaggggcagctgcagtgaccaggcccagcagggaggacttgtgcagccgggcctgcctctgagtggtgcctctcctggaaggaagctcttgcttctcagtccatgctccgtgtccagaagtaagccagctgtggatcccgcccactcagaaaaggcgagaaggctttgtgattttctacatgaatcaaacacagaaacaacttttggagaaattaaattctgagtgtgacttctgagtttgacctttcttctattttcttttatttatttattttgtttttagacggagtctcgatctgtcgcccaggctggagtgcagtggtgagatctcggctcactgcaagctctgccgcccgggttcatgccattctcctgcctcagcctcctgagtagctgggactacaggcacccaccaccacgcctggctaattttttgtatttttagtggagatggggtttcaccatgttagccaggatggtctcgatctcctgaccttgtgatctgtccgcctcagcctcccaaagtgctgggattacaggcgtgagccaccgcgcccggcccctttcttctattttctttatcctggtagtagacaaagaatgttgcctatttgacctatgtccagagaaggcagagtgtcagtcacactgggtttctatccagccccagtcctgtccagtgggtaactctcagccccactcctcatcccccaaaggccccagtgacctctatgctgcagaggtgcactgggtgggccctagagctgggctgcagagcaagcaactggctgcatgcctgggcctccctgcgcagttcctcacatgcatgctgtggtcccagcctgacctctccatctggagggggccgcctcgctgggctgttccaaagctggagtcctggtggcagctgctttgccaagtcgcgcagtagccagggcttgcctgcagcccagaacactcagacagggtcaggccttccagggttcacagcacgtcccatgcccctatgtcctggcatctggggaaaagctgtcactggccagacgtggagtggcttcctgccctaagctggcaggctgtcctgcctcacatgccagagccaagaccggcaaaccccagctgtcagggcagggaagtgggcaagggggcagcaagctgctggtgtctatgccttgactccgagataaatagatgacctaacagtggccaacttttgcctctcacctttctgacggtgaaatggaatcgagccccagacctgaccagggtacagtaaaaggtcttcctttaaacacaa

SEQ ID NO: 167359 - DNA, 2403 bp, Homo sapiens
  Payload ID: 12928
  Gene Symbol: POLA2
  Gene Name: polymerase (DNA directed), alpha 2, accessory subunit
  ENST ID: ENST00000527850
  CDS Start-End: 374-487
cgtgcactgcacaaaccatttggcgggtttttccggccactcagttctgccaccgtcactgagaagctcagcggtagcttttgggaagcaggacgttctcaccaggagagcgtcctctcgagatttctgctccctccattcagggcgtttgggagccaccccttcattttttaaaaaaagtatttctctgtgaccgacggccggggccttctgacggtctgaggtcttgcttgggccagtcacctcctgtcacggtccgcggaggggggaaggataagagggcgaggagctcatcgctcgccacccccgtgggcttcttgggcgcaggtcggagctgggtgggccggctccccggcccctggcttgggcgaccatgtccgcatccgcccagcagctggcggaggagctgcagatcttcggcctagactgcgaggaggctctaattgagaaattttctgagcaaaagattatcgaaagccaggcatagtacctgcaaggacagtggccatgcaggagctagagacattgtttccattcaagagctaattgaagtggaagaagaagaggaaatcctcttgaactcttacaccacaccttcaaagggttctcagaagcgagctatctctaccccagaaacccccctaacaaaaaggagtgtgtcaactcgtagcccccatcagctactctcaccgtcaagtttctctccaagtgctactccctcccagaaatacaactcacgaagtaaccgaggagaagtggttacctccttcggcttagcacagggagtatcttggtctgggagaggaggagctggaaacatcagcctgaaggtcttgggatgtccagaggcactaactgggagctacaaatccatgtttcagaagctcccagacattcgagaagttctgacctgtaagatagaagaacttggcagcgaactcaaggaacattacaagattgaagctttcactcctttgctagccccagcacaggagcctgtcactctgctgggccagattggctgtgatagcaacgggaagctgaacaacaagtcagtgattctcgagggagaccgggaacattcctcgggtgctcaaattccagtggatttatctgagcttaaggaatattctctgtttcctggacaggttgtaattatggaaggaatcaacaccactggtaggaaacttgttgccaccaaactctacgagggtgtgccacttccattttatcagcccactgaagaggatgcagactttgagcaaagcatggtcctggttgcctgtggaccatacaccacatctgacagcatcacgtatgaccccctgcttgacctgattgctgtcatcaaccatgaccggccagatgtctgcatcctgtttggccctttcctggatgctaagcatgaacaggtggagaattgtctactgacaagtccatttgaagacattttcaagcagtgtctacgaacaattattgaaggcacaagaagctccggctcccaccttgtctttgtcccgtcattgagagatgtgcaccatgagcctgtgtacccccagccgcctttcagctactccgatctgtctcgagaggacaaaaagcaagtacagtttgtgtccgagccctgcagcctctccataaacggagtgatcttcggcttgacatccacagatctgcttttccacctgggggccgaggagatcagtagttcttccggaacttcagacagattcagccgaatactcaagcacatcttgacccagaggagctactacccactctacccgccccaagaagacatggccattgactatgagtcgttctatgtttacgcacagctgcctgtcaccccagatgtcctcatcatcccgtcagagctgaggtacttcgtgaaggtaggtttgaactctgctttttcccagaaacaccagaacccagtctttgactttcccttctagaccacccggcactcacccctcatgggtcagctgatggggatggggcctctagcaccctgccctgtggccttgtttctttggggaggtggtgggaccagaaaacaaacaactctgtcagtaaaatgcttgagtaaacagtgtcctctcctccctccccaagagaacgagagcccagatgactaggaaggccctcaaatgagggctttcaccaggccacatagaggtgacctggggaagatttcatatgtacacttgcctgtcctctgcctcccaaattctgatatgacctccaagtgggctcagctgggaataccttgaagaagctattgggtcattttgatctctgccaccctttagccctgcctgccttggagttaggtcccttacaaggaatctgcctagaccagtccccctcttgccaaacaagagttagttcaatctcaag

SEQ ID NO: 167360 - DNA, 580 bp, Homo sapiens
  Payload ID: 12928
  Gene Symbol: POLA2
  Gene Name: polymerase (DNA directed), alpha 2, accessory subunit
  ENST ID: ENST00000532391
  CDS Start-End: 143-580
gaataaacattgatggagtaaaccaggattatttttgcttttctaggtgaaacttcgagaaatgaactaagtttttacttgtccaattttcctttctacagtggtagagctttgtgttcagtatggacagaatgaggagggaatggtaggcgagcttatagccttctgcaccagcacacataaagttggccttacctcagagatcctgaactcttttgagcatgagtttctgagcaaaagattatcgaaagccaggcatagtacctgcaaggacagtggccatgcaggagctagagacattgtttccattcaagagctaattgaagtggaagaagaagaggaaatcctcttgaactcttacaccacaccttcaaagggttctcagaagcgagctatctctaccccagaaacccccctaacaaaaaggagtgtgtcaactcgtagcccccatcagctactctcaccgtcaagtttctctccaagtgctactccctcccagaaatacaactcacgaagtaaccgaggagaagtggttacctccttcggcttagcacagggagtatcttggtctgggagagga

SEQ ID NO: 167361 - DNA, 873 bp, Homo sapiens
  Payload ID: 12928
  Gene Symbol: POLA2
  Gene Name: polymerase (DNA directed), alpha 2, accessory subunit
  ENST ID: ENST00000525924
  CDS Start-End: 1-785
ctgaagaggatgcagactttgagcaaagcatggtcctggttgcctgtggaccatacaccacatctgacagcatcacgtatgaccccctgcttgacctgattgctgtcatcaaccatgaccggccagatgtctgcatcctgtttggccctttcctggatgctaagcatgaacaggtggagaattgtctactgacaagtccatttgaagacattttcaagcagtgtctacgaacaattattgaaggcacaagaagctccggctcccaccttgtctttgtcccgtcattgagagatgtgcaccatgagcctgtgtacccccagccgcctttcagctactccgatctgtctcgagaggacaaaaagcaagtacagtttgtgtccgagccctgcagcctctccataaacggagtgatcttcggcttgacatccacagatctgcttttccacctgggggccgaggagatcagtagttcttccggaacttcagacagattcagccgaatactcaagcacatcttgacccagaggagctactacccactctacccgccccaagaagacatggccattgactatgagtcgttctatgtttacgcacagctgcctgtcaccccagatgtcctcatcatcccgtcagagctgaggtacttcgtgaagtttttgcctttcagatggacaaaaatcaaaataggtggaaaccaggggctggtgagcctgaggagaaacagccctgttgactgtgtgggggcctggtacctggcacagtctccaagaaggacaagctgacagagctgacaaaatgaccactgcaagctgggcacggtggtgcgtgcctgtagtcccagccacgcaggaggccaaggcgggaggatgg

SEQ ID NO: 167362 - DNA, 1329 bp, Homo sapiens
  Payload ID: 12929
  Gene Symbol: POLB
  Gene Name: polymerase (DNA directed), beta
  Uniprot ID: P06746
  ENST ID: ENST00000265421
  CDS Start-End: 171-1178
aacaagcgccgtgcgccccgccccccatcgggggcaaccattgttccgccggtcgcgccggagctgggttgctcctgctcccgtctccaagtcctggtacctccttcaagctgggagagggctctagtccctggttctgaacactctggggttctcgggtgcaggccgccatgagcaaacggaaggcgccgcaggagactctcaacgggggaatcaccgacatgctcacagaactcgcaaactttgagaagaacgtgagccaagctatccacaagtacaatgcttacagaaaagcagcatctgttatagcaaaatacccacacaaaataaagagtggagctgaagctaagaaattgcctggagtaggaacaaaaattgctgaaaagattgatgagtttttagcaactggaaaattacgtaaactggaaaagattcggcaggatgatacgagttcatccatcaatttcctgactcgagttagtggcattggtccatctgctgcaaggaagtttgtagatgaaggaattaaaacactagaagatctcagaaaaaatgaagataaattgaaccatcatcagcgaattgggctgaaatattttggggactttgaaaaaagaattcctcgtgaagagatgttacaaatgcaagatattgtactaaatgaagttaaaaaagtggattctgaatacattgctacagtctgtggcagtttcagaagaggtgcagagtccagtggtgacatggatgttctcctgacccatcccagcttcacttcagaatcaaccaaacagccaaaactgttacatcaggttgtggagcagttacaaaaggttcattttatcacagataccctgtcaaagggtgagacaaagttcatgggtgtttgccagcttcccagtaaaaatgatgaaaaagaatatccacacagaagaattgatatcaggttgatacccaaagatcagtattactgtggtgttctctatttcactgggagtgatattttcaataagaatatgagggctcatgccctagaaaagggtttcacaatcaatgagtacaccatccgtcccttgggagtcactggagttgcaggagaacccctgccagtggatagtgaaaaagacatctttgattacatccagtggaaataccgggaacccaaggaccggagcgaatgaggcctgtatcctccctggcagacacaacccaataggagtcttaatttatttcttaacctttgctatgtaagggtctttggtgtttttaaatgattgtttcttcttcatgcttttgcttgcaatgtagtcaataaaacctcatgtactatta

SEQ ID NO: 167363 - DNA, 720 bp, Homo sapiens
  Payload ID: 12929
  Gene Symbol: POLB
  Gene Name: polymerase (DNA directed), beta
  ENST ID: ENST00000519771
  CDS Start-End: 21-149
gttctcgggtgcaggccgccatgagcaaacggaaggcgccgcaggagactctcaacgggggaatcaccgacatgctcacagaactcgcaaactttgagaagaacgtgagccaagctatccacaagtacaatgcttacagcctggagtaggaacaaaaattgctgaaaagattgatgagtttttagcaactggaaaattacgtaaactggaaaagattcggcaggatgatacgagttcatccatcaatttcctgactcgagttagtggcattggtccatctgctgcaaggaagtttgtagatgaaggaattaaaacactagaagatctcagaaaaaatgaagataaattgaaccatcatcagcgaattgggctgaaatattttggggactttgaaaaaagaattcctcgtgaagagatgttacaaatgcaagatattgtactaaatgaagttaaaaaagtggattctgaatacattgctacagtctgtggcagtttcagaagaggtgcagagtccagtggtgacatggatgttctcctgacccatcccagcttcacttcagaatcaaccaaacagccaaaactgttacatcaggttgtggagcagttacaaaaggttcattttatcacagataccctgtcaaagggtgagacaaagttcatgggtgtttgccagcttcccagtaaaaatgatgaaaaagaatatccacacagaagaattga

SEQ ID NO: 167364 - DNA, 401 bp, Homo sapiens
  Payload ID: 12929
  Gene Symbol: POLB
  Gene Name: polymerase (DNA directed), beta
  ENST ID: ENST00000517393
  CDS Start-End: 1-320
cagagtccagtggtgacatggatgttctcctgacccatcccagcttcacttcagaatcaaccaaacagccaaaactgttacatcaggttgtggagcagttacaaaaggttcattttatcacagataccctgtcaaagggtgagacaaagttcatggagttgcaggagaacccctgccagtggatagtgaaaaagacatctttgattacatccagtggaaataccgggaacccaaggaccggagcgaatgaggcctgtatcctccctggcagacacaacccaataggagtcttaatttatttcttaacctttgctatgtaagggtctttggtgtttttaaatgattgtttcttcttcatgcttttgcttgcaatgtagtcaataaaacctcatgtactatta

SEQ ID NO: 167365 - DNA, 653 bp, Homo sapiens
  Payload ID: 12929
  Gene Symbol: POLB
  Gene Name: polymerase (DNA directed), beta
  ENST ID: ENST00000524208
  CDS Start-End: 1-90
gcatctgttatagcaaaatacccacacaaaataaagagtggagctgaagctaagaaattgtccatctgctgcaaggaagtttgtagatgaaggaattaaaacactagaagatctcagaaaaaatgaagataaattgaaccatcatcagcgaattgggctgaaatattttggggactttgaaaaaagaattcctcgtgaagagatgttacaaatgcaagatattgtactaaatgaagttaaaaaagtggattctgaatacattgctacagtctgtggcagtttcagaagaggtgcagagtccagtggtgacatggatgttctcctgacccatcccagcttcacttcagaatcaaccaaacagccaaaactgttacatcaggttgtggagcagttacaaaaggttcattttatcacagataccctgtcaaagggtgagacaaagttcatgggtgtttgccagcttcccagtaaaaatgatgaaaaagaatatccacacagaagaattgatatcaggttgatacccaaagatcagtattactgtggtgttctctatttcactgggagtgatattttcaataagaatatgagggctcatgccctagaaaagggtttcacaatcaatgagtacaccatccgtcccttgggagtcactg

SEQ ID NO: 167366 - DNA, 1341 bp, Homo sapiens
  Payload ID: 12929
  Gene Symbol: POLB
  Gene Name: polymerase (DNA directed), beta
  ENST ID: ENST00000522610
  CDS Start-End: 119-700
tcgcgccggagctgggttgctcctgctcccgtctccaagtcctggtacctccttcaagctgggagagggctctagtccctggttctgaacactctggggttctcgggtgcaggccgccatgagcaaacggaaggcgccgcaggagactctcaacgggggaatcaccgacatgctcacagaactcgcaaactttgagaagaacgtgagccaagctatccacaagtacaatgcttacagaaaagcagcatctgttatagcaaaatacccacacaaaataaagagtggagctgaagctaagaaattgcctggagtaggaacaaaaattgctgaaaagattgatgagtttttagcaactggaaaattacgtaaactggaaaagattcggcaggatgatacgagttcatccatcaatttcctgactcgagttagtggcattggtccatctgctgcaaggaagtttgtagatgaaggaattaaaacactagaagatctcagaaaaaatgaagataaattgaaccatcatcagcgaattgggctgaaatattttggggactttgaaaaaagaattcctcgtgaagagatgttacaaatgcaagatattgtactaaatgaagttaaaaaagtggattctgaatacattgctacagtctgtggcagtttcagaagagattctgctgtctacatcaatacacctgaatagttggacagaaaattgaaatcttttaactaattctaactatgaagcacagtgaaatagaaagttaggctgtaagaagtgcagagtccagtggtgacatggatgttctcctgacccatcccagcttcacttcagaatcaaccaaacagccaaaactgttacatcaggttgtggagcagttacaaaaggttcattttatcacagataccctgtcaaagggtgagacaaagttcatgggtgtttgccagcttcccagtaaaaatgatgaaaaagaatatccacacagaagaattgatatcaggttgatacccaaagatcagtattactgtggtgttctctatttcactgggagtgatattttcaataagaatatgagggctcatgccctagaaaagggtttcacaatcaatgagtacaccatccgtcccttgggagtcactggagttgcaggagaacccctgccagtggatagtgaaaaagacatctttgattacatccagtggaaataccgggaacccaaggaccggagcgaatgaggcctgtatcctccctggcagacacaacccaataggagtcttaatttatttcttaacctttgctatgtaagggtctttggtgtttttaaatgattgtttcttcttcat

SEQ ID NO: 167367 - DNA, 863 bp, Homo sapiens
  Payload ID: 12929
  Gene Symbol: POLB
  Gene Name: polymerase (DNA directed), beta
  ENST ID: ENST00000521290
  CDS Start-End: 1-712
tgaaaagattgatgagtttttagcaactggaaaattacgtaaactggaaaagattcggcaggatgatacgagttcatccatcaatttcctgactcgagttagtggcattggtccatctgctgcaaggaagtttgtagatgaaggaattaaaacactagaagatctcagaaaaaatgaagataaattgaaccatcatcagcgaattgggctgaaatattttggggactttgaaaaaagaattcctcgtgaagagatgttacaaatgcaagatattgtactaaatgaagttaaaaaagtggattctgaatacattgctacagtctgtggcagtttcagaagaggtgcagagtccagtggtgacatggatgttctcctgacccatcccagcttcacttcagaatcaaccaaacagggtgtttgccagcttcccagtaaaaatgatgaaaaagaatatccacacagaagaattgatatcaggttgatacccaaagatcagtattactgtggtgttctctatttcactgggagtgatattttcaataagaatatgagggctcatgccctagaaaagggtttcacaatcaatgagtacaccatccgtcccttgggagtcactggagttgcaggagaacccctgccagtggatagtgaaaaagacatctttgattacatccagtggaaataccgggaacccaaggaccggagcgaatgaggcctgtatcctccctggcagacacaacccaataggagtcttaatttatttcttaacctttgctatgtaagggtctttggtgtttttaaatgattgtttcttcttcatgcttttgcttgcaatgtagtcaataaaacctcatgtactatta

SEQ ID NO: 167368 - DNA, 744 bp, Homo sapiens
  Payload ID: 12929
  Gene Symbol: POLB
  Gene Name: polymerase (DNA directed), beta
  ENST ID: ENST00000518579
  CDS Start-End: 1-719
ttggggactttgaaaaaagaattcctcgtgaagagatgttacaaatgcaagatattgtactaaatgaagttaaaaaagtggattctgaatacattgctacagtctgtggcagtttcagaagaggtgcagagtccagtggtgacatggatgttctcctgacccatcccagcttcacttcagaatcaaccaaacagccaaaactgttacatcaggttgtggagcagttacaaaaggttcattttatcacagataccctgtcaaagggtgagacaaagttcatgggtgtttgccagcttcccagtaaaaatgatgaaaaagaatatccacacagaagaattgatatcaggttgatacccaaagatcagtattactgtggtgttctctatttcactgggagtgatattttcaataagaatatgagggctcatgccctagaaaagggtttcacaatcaatgagtacaccatccgtcccttgggagtcactgtccttcaggcaacgagagaggatttaatgcataacatgctcctaggccctcagttgaaggccatcaaggagttgcaggagaacccctgccagtggatagtgaaaaagacatctttgattacatccagtggaaataccgggaacccaaggaccggagcgaatgaggcctgtatcctccctggcagacacaacccaataggagtcttaatttatttcttaacctttgctatgtaagggtctttggtgtttttaaatgatt

SEQ ID NO: 167369 - DNA, 725 bp, Homo sapiens
  Payload ID: 12929
  Gene Symbol: POLB
  Gene Name: polymerase (DNA directed), beta
  ENST ID: ENST00000520008
  CDS Start-End: 571-725
agcgccgtgcgccccgccccccatcgggggcaaccattgttccgccggtcgcgccggagctgggttgctcctgctcccgtctccaagtcctggtacctccttcaagctgggagagggctctagtccctggttctgaacactctggggttctcgggtgcaggccgccatgagcaaacggaaggcgccgcaggagactctcaacgggggaatcaccgacatgctcacagaaaagcagcatctgttatagcaaaatacccacacaaaataaagagtggagctgaagctaagaaattgcctggagtaggaacaaaaattgctgaaaagattgatgagtttttagcaactggaaaattacgtaaactggaaaagattcggcaggatgatacgagttcatccatcaatttcctgactcgagttagtggcattggtccatctgctgcaaggaagtttgtagatgaaggaattaaaacactagaagatctcagaaaaaatgaagataaattgaaccatcatcagcgaattgggctgaaatattttggggactttgaaaaaagaattcctcgtgaagagatgttacaaatgcaagatattgtactaaatgaagttaaaaaagtggattctgaatacattgctacagtctgtggcagtttcagaagaggtgcagagtccagtggtgacatggatgttctcctgacccatcccagcttcacttcagaatcaaccaa

SEQ ID NO: 167370 - DNA, 983 bp, Homo sapiens
  Payload ID: 12929
  Gene Symbol: POLB
  Gene Name: polymerase (DNA directed), beta
  ENST ID: ENST00000518925
  CDS Start-End: 144-983
tcgggggcaaccattgttccgccggtcgcgccggagctgggttgctcctgctcccgtctccaagtcctggtacctccttcaagctgggagagggctctagtccctggttctgaacactctggggttctcgggtgcaggccgccatgagcaaacggaaggcgccgcaggagactctcaacgggggaatcaccgacatgctcacagaactcgcaaactttgagaagaacgtgagccaagctatccacaagtacaatgcttacagaaaagcagcatctgttatagcaaaatacccacacaaaataaagagtggagctgaagctaagaaattgcctggagtaggaacaaaaattgctgaaaagattgatgagtttttagcaactggaaaattacgtaaactggaaaagattcggcaggatgatacgagttcatccatcaatttcctgactcgagttagtggcattggtccatctgctgcaaggaagtttgtagatgaaggaattaaaacactagaaggctcacagctggattcatgcccagtaaagggacacctgaatggaactgagtcacttttagacttaatatgggatgttatgacaattcttaagttaaaaaatgcagatctcagaaaaaatgaagataaattgaaccatcatcagcgaattgggctgaaatattttggggactttgaaaaaagaattcctcgtgaagagatgttacaaatgcaagatattgtactaaatgaagttaaaaaagtggattctgaatacattgctacagtctgtggcagtttcagaagaggtgcagagtccagtggtgacatggatgttctcctgacccatcccagcttcacttcagaatcaaccaaacagccaaaactgttacatcaggttgtggagcagttacaaaaggttcattttatcacagataccctgtcaaagggtgagacaaagttcatgggtgtttgccagcttcccagtaaaaat

SEQ ID NO: 167371 - DNA, 786 bp, Homo sapiens
  Payload ID: 12929
  Gene Symbol: POLB
  Gene Name: polymerase (DNA directed), beta
  ENST ID: ENST00000521492
  CDS Start-End: 471-635
tcatcgtttcttccacgttgctctcttctgtttattttgatgtctgtgtttcgtgttcagggttttctttgattagtttcttgcttagaatcacacaaagaccaaatcctcataatgagaatccttatttgcagttttgtgtagttctctaattatcgtgaagtgtaatagaaaggtagggatagtgtattgctcacagaagctgctaagttaaaagtgctcagaattctagagctgctaacattaaaaacaaaaatggccttgtgttttacttgattaaaattaagccttaagtttagaacatctttaaacttggtttaaaatgttcattttagggtgtttgccagcttcccagtaaaaatgatgaaaaagaatatccacacagaagaattgatatcaggttgatacccaaagatcagtattactgtggtgttctctatttcactgggagtgatattttcaataagaatatgagggctcatgccctagaaaagggtttcacaatcaatgagtacaccatccgtcccttgggagtcactggagttgcaggagaacccctgccagtggatagtgaaaaagacatctttgattacatccagtggaaataccgggaacccaaggaccggagcgaatgaggcctgtatcctccctggcagacacaacccaataggagtcttaatttatttcttaacctttgctatgtaagggtctttggtgtttttaaatgattgtttcttcttcatgcttttgcttgcaatgtagtcaataaaacctcatgtactatta

SEQ ID NO: 167372 - DNA, 675 bp, Homo sapiens
  Payload ID: 12929
  Gene Symbol: POLB
  Gene Name: polymerase (DNA directed), beta
  ENST ID: ENST00000532157
  CDS Start-End: 561-675
caacaagcgccgtgcgccccgccccccatcgggggcaaccattgttccgccggtcgcgccggagctgggttgctcctgctcccgtctccaagtcctggtacctccttcaagctgggagagggctctagtccctggttctgaacactctggggttctcgggtgcaggccgccatgagcaaacggaaggcgccgcaggagactctcaacgggggaatcaccgacatgctcacagaaaagcagcatctgttatagcaaaatacccacacaaaataaagagtggagctgaagctaagaaattgcctggagtaggaacaaaaattgctgaaaagattgatgagtttttagcaactggaaaattacgtaaactggaaaagattcggcaggatgatacgagttcatccatcaatttcctgactcgagttagtggcattggtccatctgctgcaaggaagtttgtagatgaaggaattaaaacactagaaggctcacagctggattcatgcccagtaaagggacacctgaatggaactgagtcacttttagacttaatatgggatgttatgacaattcttaagttaaaaaatgcagatctcagaaaaaatgaagataaattgaaccatcatcagcgaattgggctgaaatattttggggactttgaaaaaagaattcctcgtg

SEQ ID NO: 167373 - DNA, 3444 bp, Homo sapiens
  Payload ID: 12930
  Gene Symbol: POLD1
  Gene Name: polymerase (DNA directed), delta 1, catalytic subunit
  Uniprot ID: P28340
  ENST ID: ENST00000440232
  CDS Start-End: 54-3377
agtcaggggtcacggcggcgtaggctgtggcgggaaacgctgtttgaagcgggatggatggcaagcggcggccaggcccagggcccggggtgcccccaaagcgggcccgtgggggcctctgggatgatgatgatgcacctcggccatcccaattcgaggaggacctggcactgatggaggagatggaggcagaacacaggctgcaggagcaggaggaggaggagctgcagtcagtcctggagggggttgcagacgggcaggtcccaccatcagccatagatcctcgctggcttcggcccacaccaccagcgctggacccccagacagagcccctcatcttccaacagttggagattgaccattatgtgggcccagcgcagcctgtgcctggggggcccccaccatcccgcggctccgtgcctgtgctccgcgccttcggggtcaccgatgaggggttctctgtctgctgccacatccacggcttcgctccctacttctacaccccagcgccccctggtttcgggcccgagcacatgggtgacctgcaacgggagctgaacttggccatcagccgggacagtcgcggggggagggagctgactgggccggccgtgctggctgtggaactgtgctcccgagagagcatgtttgggtaccacgggcacggcccctccccgttcctgcgcatcaccgtggcgctgccgcgcctcgtggccccggcccgccgtctcctggaacagggcatccgtgtggcaggcctgggcacgcccagcttcgcgccctacgaggccaacgtcgactttgagatccggttcatggtggacacggacatcgtcggctgcaactggctggagctcccagctgggaaatacgccctgaggctgaaggagaaggctacgcagtgccagctggaggcggacgtgctgtggtctgacgtggtcagtcacccaccggaagggccatggcagcgcattgcgcccttgcgcgtgctcagcttcgatatcgagtgcgccggccgcaaaggcatcttccctgagcctgagcgggaccctgtcatccagatctgctcgctgggcctgcgctggggggagccggagcccttcctacgcctggcgctcaccctgcggccctgtgcccccatcctgggtgccaaggtgcagagctacgagaaggaggaggacctgctgcaggcctggtccaccttcatccgtatcatggaccccgacgtgatcaccggttacaacatccagaacttcgaccttccgtacctcatctctcgggcccagaccctcaaggtacaaacattccctttcctgggccgtgtggccggcctttgctccaacatccgggactcttcattccagtccaagcagacgggccggcgggacaccaaggttgtcagcatggtgggccgcgtgcagatggacatgctgcaggtgctgctgcgggagtacaagctccgctcctacacgctcaatgccgtgagcttccacttcctgggcgagcagaaggaggacgtgcagcacagcatcatcaccgacctgcagaatgggaacgaccagacccgccgccgcctggctgtgtactgcctgaaggatgcctacctgccactgcggctgctggagcggctcatggtgctggtgaacgccgtggagatggcgagggtcactggcgtgcccctcagctacctgctcagtcgtggccagcaggtcaaggtcgtatcccagctgttgcggcaggccatgcacgaggggctgctgatgcccgtggtgaagtcagagggcggcgaggactacacgggagccactgtcatcgagcccctcaaagggtactacgacgtccccatcgccaccctggacttctcctcgctgtacccgtccatcatgatggcccacaacctgtgttacaccacgctccttcggcccgggactgcacagaaactgggcctgactgaggatcagttcatcaggacccccaccggggacgagtttgtgaagacctcagtgcggaaggggctgctgccccagatcctggagaacctgctcagtgcccggaagagggccaaggccgagctggccaaggagacagaccccctccggcgccaggtcctggatggacggcagctggcgctgaaggtgagcgccaactccgtatacggcttcactggcgcccaggtgggcaagttgccgtgcctggagatctcacagagcgtcacggggttcggacgtcagatgatcgagaaaaccaagcagctggtggagtctaagtacacagtggagaatggctacagcaccagtgccaaggtggtgtatggtgacactgactccgtcatgtgccgattcggcgtgtcctcggtggctgaggcgatggccctggggcgggaggccgcggactgggtgtcaggtcacttcccgtcgcccatccggctggagtttgagaaggtctacttcccatacctgcttatcagcaagaagcgctacgcgggcctgctcttctcctcccggcccgacgcccacgaccgcatggactgcaagggcctggaggccgtgcgcagggacaactgccccctcgtggccaacctggtcactgcctcactgcgccgcctgctcatcgaccgagaccctgagggcgcggtggctcacgcacaggacgtcatctcggacctgctgtgcaaccgcatcgatatctcccagctggtcatcaccaaggagctgacccgcgcggcctccgactatgccggcaagcaggcccacgtggagctggccgagaggatgaggaagcgggaccccgggagtgcgcccagcctgggcgaccgcgtcccctacgtgatcatcagtgccgccaagggtgtggccgcctacatgaagtcggaggacccgctgttcgtgctggagcacagcctgcccattgacacgcagtactacctggagcagcagctggccaagcccctcctgcgcatcttcgagcccatcctgggcgagggccgtgccgaggctgtgctactgcggggggaccacacgcgctgcaagacggtgctcacgggcaaggtgggcggcctcctggccttcgccaaacgccgcaactgctgcattggctgccgcacagtgctcagccaccagggagccgtgtgtgagttctgccagccccgggagtctgagctgtatcagaaggaggtatcccatctgaatgccctggaggagcgcttctcgcgcctctggacgcagtgccagcgctgccagggcagcctgcacgaggacgtcatctgcaccagccgggactgccccatcttctacatgcgcaagaaggtgcggaaggacctggaagaccaggagcagctcctgcggcgcttcggaccccctggacctgaggcctggtgaccttgcaagcatcccatggggcgggggcgggaccagggagaattaataaagttctggacttttgcta

SEQ ID NO: 167374 - DNA, 867 bp, Homo sapiens
  Payload ID: 12930
  Gene Symbol: POLD1
  Gene Name: polymerase (DNA directed), delta 1, catalytic subunit
  ENST ID: ENST00000593407
  CDS Start-End: 1-867
ctacagcaccagtgccaaggtggtgtatggtgacactgactccgtcatgtgccgattcggcgtgtcctcggtggctgaggcgatggccctggggcgggaggccgcggactgggtgtcaggtcacttcccgtcgcccatccggctggagtttgagaaggtctacttcccatacctgcttatcagcaagaagcgctacgcgggcctgctcttctcctcccggcccgacgcccacgaccgcatggactgcaagggcctggaggccgtgcgcagggacaactgccccctcgtggccaacctggtcactgcctcactgcgccgcctgctcatcgaccgagaccctgagggcgcggtggctcacgcacaggacgtcatctcggacctgctgtgcaaccgcatcgatatctcccagctggtcatcaccaaggagctgacccgcgcggcctccgactatgccggcaagcaggcccacgtggagctggccgagaggtcctgcgcggggatgaggaagcgggaccccgggagtgcgcccagcctgggcgaccgcgtcccctacgtgatcatcagtgccgccaagggtgtggccgcctacatgaagtcggaggacccgctgttcgtgctggagcacagcctgcccattgacacgcagtactacctggagcagcagctggccaagcccctcctgcgcatcttcgagcccatcctgggcgagggccgtgccgaggctgtgctactgcggggggaccacacgcgctgcaagacggtgctcacgggcaaggtgggcggcctcctggccttcgccaaacgccgcaactgctgcattggctgccgcacagtgctcagccaccagggagccgtgtgtgagttctg

SEQ ID NO: 167375 - DNA, 873 bp, Homo sapiens
  Payload ID: 12930
  Gene Symbol: POLD1
  Gene Name: polymerase (DNA directed), delta 1, catalytic subunit
  ENST ID: ENST00000593981
  CDS Start-End: 1-873
tggagtttgagaaggtctacttcccatacctgcttatcagcaagaagcgctacgcgggcctgctcttctcctcccggcccgacgcccacgaccgcatggactgcaagggcctggaggccgtgcgcagggacaactgccccctcgtggccaacctggtcactgcctcactgcgccgcctgctcatcgaccgagaccctgagggcgcggtggctcacgcacaggacgtcatctcggacctgctgtgcaaccgcatcgatatctcccagctggtcatcaccaaggagctgacccgcgcggcctccgactatgccggcaagcaggcccacgtggagctggccgagaggatgaggaagcgggaccccgggagtgcgcccagcctgggcgaccgcgtcccctacgtgatcatcagtgccgccaagggtgtggccgcctacatgaagtcggaggacccgctgttcgtgctggagcacagcctgcccattgacacgcagtactacctggagcagcagctggccaagcccctcctgcgcatcttcgagcccatcctgggcgagggccgtgccgaggctgtgctactgcggggggaccacacgcgctgcaagacggtgctcacgggcaaggtgggcggcctcctggccttcgccaaacgccgcaactgctgcattggctgccgcacagtgctcagccaccagggtatcccatctgaatgccctggaggagcgcttctcgcgcctctggacgcagtgccagcgctgccagggcagcctgcacgaggacgtcatctgcaccagccgggactgccccatcttctacatgcgcaagaaggtgcggaaggacctggaagaccaggagcagctcctgcggcgcttcgga

SEQ ID NO: 167376 - DNA, 563 bp, Homo sapiens
  Payload ID: 12930
  Gene Symbol: POLD1
  Gene Name: polymerase (DNA directed), delta 1, catalytic subunit
  ENST ID: ENST00000596425
  CDS Start-End: 1-563
cgtggagatggcgagggtcactggcgtgcccctcagctacctgctcagtcgtggccagcaggtcaaggtcgtatcccagctgttgcggcaggccatgcacgaggggctgctgatgcccgtggtgaagtcagagggcggcgaggactacacgggagccactgtcatcgagcccctcaaagggtactacgacgtccccatcgccaccctggacttctcctcgctgtacccgtccatcatgatggcccacaacctgtgttacaccacgctccttcggcccgggactgcacagaaactgggcctgactgaggatcagttcatcaggacccccaccggggacgagtttgtgaagacctcagtgcggaaggggctgctgccccagatcctggagaacctgctcagtgcccggaagagggccaaggccgagctggccaaggagacagaccccctccggcgccaggtcctggatggacggcagctggcgctgaagagcgtcacggggttcggacgtcagatgatcgagaaaaccaagcagctggtggagtctaagtacacagtggagaatg

SEQ ID NO: 167377 - DNA, 3474 bp, Homo sapiens
  Payload ID: 12930
  Gene Symbol: POLD1
  Gene Name: polymerase (DNA directed), delta 1, catalytic subunit
  ENST ID: ENST00000600859
  CDS Start-End: 189-3218
gccacttcggaagctgagagagggggcggggcctgccctgcagtcgaacaagcggggcgtggccttgcccgcacttgggcaggcgggggcgtggcccgtctctgagcgccgcggctctgggcttgcgcgcgcgggagtcaggggtcacggcggcgtaggctgtggcgggaaacgctgtttgaagcgggatggatggcaagcggcggccaggcccagggcccggggtgcccccaaagcgggcccgtgggggcctctgggatgatgatgatgcacctcggccatcccaattcgaggaggacctggcactgatggaggagatggaggcagaacacaggctgcaggagcaggaggaggaggagctgcagtcagtcctggagggggttgcagacgggcaggtcccaccatcagccatagatcctcgctggcttcggcccacaccaccagcgctggacccccagacagagcccctcatcttccaacagttggagattgaccattatgtgggcccagcgcagcctgtgcctggggggcccccaccatcccgcggctccgtgcctgtgctccgcgccttcggggtcaccgatgaggggttctctgtctgctgccacatccacggcttcgctccctacttctacaccccagcgccccctggtttcgggcccgagcacatgggtgacctgcaacgggagctgaacttggccatcagccgggacagtcgcggggggagggagctgactgggccggccgtgctggctgtggaactgtgctcccgagagagcatgtttgggtaccacgggcacggcccctccccgttcctgcgcatcaccgtggcgctgccgcgcctcgtggccccggcccgccgtctcctggaacagggcatccgtgtggcaggcctgggcacgcccagcttcgcgccctacgaggccaacgtcgactttgagatccggttcatggtggacacggacatcgtcggctgcaactggctggagctcccagctgggaaatacgccctgaggctgaaggagaaggctacgcagtgccagctggaggcggacgtgctgtggtctgacgtggtcagtcacccaccggaagggccatggcagcgcattgcgcccttgcgcgtgctcagcttcgatatcgagtgcgccggccgcaaaggcatcttccctgagcctgagcgggaccctgtcatccagatctgctcgctgggcctgcgctggggggagccggagcccttcctacgcctggcgctcaccctgcggccctgtgcccccatcctgggtgccaaggtgcagagctacgagaaggaggaggacctgctgcaggcctggtccaccttcatccgtatcatggaccccgacgtgatcaccggttacaacatccagaacttcgaccttccgtacctcatctctcgggcccagaccctcaaggtacaaacattccctttcctgggccgtgtggccggcctttgctccaacatccgggactcttcattccagtccaagcagacgggccggcgggacaccaaggttgtcagcatggtgggccgcgtgcagatggacatgctgcaggtgctgctgcgggagtacaagctccgctcctacacgctcaatgccgtgagcttccacttcctgggcgagcagaaggaggacgtgcagcacagcatcatcaccgacctgcagaatgggaacgaccagacccgccgccgcctggctgtgtactgcctgaaggatgcctacctgccactgcggctgctggagcggctcatggtgctggtgaacgccgtggagatggcgagggtcactggcgtgcccctcagctacctgctcagtcgtggccagcaggtcaaggtcgtatcccagctgttgcggcaggccatgcacgaggggctgctgatgcccgtggtgaagtcagagggcggcgaggactacacgggagccactgtcatcgagcccctcaaagggtactacgacgtccccatcgccaccctggacttctcctcgctgtacccgtccatcatgatggcccacaacctgtgttacaccacgctccttcggcccgggactgcacagaaactgggcctgactgaggatcagttcatcaggacccccaccggggacgagtttgtgaagacctcagtgcggaaggggctgctgccccagatcctggagaacctgctcagtgcccggaagagggccaaggccgagctggccaaggagacagaccccctccggcgccaggtcctggatggacggcagctggcgctgaaggtgagcgccaactccgtatacggcttcactggcgcccaggtgggcaagttgccgtgcctggagatctcacagagcgtcacggggttcggacgtcagatgatcgagaaaaccaagcagctggtggagtctaagtacacagtggagaatggctacagcaccagtgccaaggtggtgtatggtgacactgactccgtcatgtgccgattcggcgtgtcctcggtggctgaggcgatggccctggggcgggaggccgcggactgggtgtcaggtcacttcccgtcgcccatccggctggagtttgagaaggtctacttcccatacctgcttatcagcaagaagcgctacgcgggcctgctcttctcctcccggcccgacgcccacgaccgcatggactgcaagggcctggaggccgtgcgcagggacaactgccccctcgtggccaacctggtcactgcctcactgcgccgcctgctcatcgaccgagaccctgagggcgcggtggctcacgcacaggacgtcatctcggacctgctgtgcaaccgcatcgatatctcccagctggtcatcaccaaggagctgacccgcgcggcctccgactatgccggcaagcaggcccacgtggagctggccgagaggacccgctgttcgtgctggagcacagcctgcccattgacacgcagtactacctggagcagcagctggccaagcccctcctgcgcatcttcgagcccatcctgggcgagggccgtgccgaggctgtgctactgcggggggaccacacgcgctgcaagacggtgctcacgggcaaggtgggcggcctcctggccttcgccaaacgccgcaactgctgcattggctgccgcacagtgctcagccaccagggagccgtgtgtgagttctgccagccccgggagtctgagctgtatcagaaggaggtatcccatctgaatgccctggaggagcgcttctcgcgcctctggacgcagtgccagcgctgccagggcagcctgcacgaggacgtcatctgcaccagccgggactgccccatcttctacatgcgcaagaaggtgcggaaggacctggaagaccaggagcagctcctgcggcgcttcggaccccctggacctgaggcctggtgaccttgcaagcatcccatggggcgggggcgggaccagggagaattaataaagttctggacttttgc

SEQ ID NO: 167378 - DNA, 3402 bp, Homo sapiens
  Payload ID: 12930
  Gene Symbol: POLD1
  Gene Name: polymerase (DNA directed), delta 1, catalytic subunit
  ENST ID: ENST00000595904
  CDS Start-End: 1-3402
atggatggcaagcggcggccaggcccagggcccggggtgcccccaaagcgggcccgtgggggcctctgggatgatgatgatgcacctcggccatcccaattcgaggaggacctggcactgatggaggagatggaggcagaacacaggctgcaggagcaggaggaggaggagctgcagtcagtcctggagggggttgcagacgggcaggtcccaccatcagccatagatcctcgctggcttcggcccacaccaccagcgctggacccccagacagagcccctcatcttccaacagttggagattgaccattatgtgggcccagcgcagcctgtgcctggggggcccccaccatcccgcggctccgtgcctgtgctccgcgccttcggggtcaccgatgaggggttctctgtctgctgccacatccacggcttcgctccctacttctacaccccagcgccccctggtttcgggcccgagcacatgggtgacctgcaacgggagctgaacttggccatcagccgggacagtcgcggggggagggagctgactgggccggccgtgctggctgtggaactgtgctcccgagagagcatgtttgggtaccacgggcacggcccctccccgttcctgcgcatcaccgtggcgctgccgcgcctcgtggccccggcccgccgtctcctggaacagggcatccgtgtggcaggcctgggcacgcccagcttcgcgccctacgaggccaacgtcgactttgagatccggttcatggtggacacggacatcgtcggctgcaactggctggagctcccagctgggaaatacgccctgaggctgaaggagaaggctacgcagtgccagctggaggcggacgtgctgtggtctgacgtggtcagtcacccaccggaagggccatggcagcgcattgcgcccttgcgcgtgctcagcttcgatatcgagtgcgccggccgcaaaggcatcttccctgagcctgagcgggaccctgtcatccagatctgctcgctgggcctgcgctggggggagccggagcccttcctacgcctggcgctcaccctgcggccctgtgcccccatcctgggtgccaaggtgcagagctacgagaaggaggaggacctgctgcaggcctggtccaccttcatccgtatcatggaccccgacgtgatcaccggttacaacatccagaacttcgaccttccgtacctcatctctcgggcccagaccctcaaggtacaaacattccctttcctgggccgtgtggccggcctttgctccaacatccgggactcttcattccagtccaagcagacgggccggcgggacaccaaggttgtcagcatggtgggccgcgtgcagatggacatgctgcaggtgctgctgcgggagtacaagctccgctcctacacgctcaatgccgtgagcttccacttcctgggcgagcagaaggaggacgtgcagcacagcatcatcaccgacctgcagaatgggaacgaccagacccgccgccgcctggctgtgtactgcctgaaggatgcctacctgccactgcggctgctggagcggctcatggtgctggtgaacgccgtggagatggcgagggtcactggcgtgcccctcagctacctgctcagtcgtggccagcaggtcaaggtcgtatcccagctgttgcggcaggccatgcacgaggggctgctgatgcccgtggtgaagtcagagggcggcgaggactacacgggagccactgtcatcgagcccctcaaaggggtgaggccacaagacagggcgggggcggcatgggaactcctagccctgactcccggccgcggctgctcccctcccaggtactacgacgtccccatcgccaccctggacttctcctcgctgtacccgtccatcatgatggcccacaacctgtgttacaccacgctccttcggcccgggactgcacagaaactgggcctgactgaggatcagttcatcaggacccccaccggggacgagtttgtgaagacctcagtgcggaaggggctgctgccccagatcctggagaacctgctcagtgcccggaagagggccaaggccgagctggccaaggagacagaccccctccggcgccaggtcctggatggacggcagctggcgctgaaggtgagcgccaactccgtatacggcttcactggcgcccaggtgggcaagttgccgtgcctggagatctcacagagcgtcacggggttcggacgtcagatgatcgagaaaaccaagcagctggtggagtctaagtacacagtggagaatggctacagcaccagtgccaaggtggtgtatggtgacactgactccgtcatgtgccgattcggcgtgtcctcggtggctgaggcgatggccctggggcgggaggccgcggactgggtgtcaggtcacttcccgtcgcccatccggctggagtttgagaaggtctacttcccatacctgcttatcagcaagaagcgctacgcgggcctgctcttctcctcccggcccgacgcccacgaccgcatggactgcaagggcctggaggccgtgcgcagggacaactgccccctcgtggccaacctggtcactgcctcactgcgccgcctgctcatcgaccgagaccctgagggcgcggtggctcacgcacaggacgtcatctcggacctgctgtgcaaccgcatcgatatctcccagctggtcatcaccaaggagctgacccgcgcggcctccgactatgccggcaagcaggcccacgtggagctggccgagaggatgaggaagcgggaccccgggagtgcgcccagcctgggcgaccgcgtcccctacgtgatcatcagtgccgccaagggtgtggccgcctacatgaagtcggaggacccgctgttcgtgctggagcacagcctgcccattgacacgcagtactacctggagcagcagctggccaagcccctcctgcgcatcttcgagcccatcctgggcgagggccgtgccgaggctgtgctactgcggggggaccacacgcgctgcaagacggtgctcacgggcaaggtgggcggcctcctggccttcgccaaacgccgcaactgctgcattggctgccgcacagtgctcagccaccagggagccgtgtgtgagttctgccagccccgggagtctgagctgtatcagaaggaggtatcccatctgaatgccctggaggagcgcttctcgcgcctctggacgcagtgccagcgctgccagggcagcctgcacgaggacgtcatctgcaccagccgggactgccccatcttctacatgcgcaagaaggtgcggaaggacctggaagaccaggagcagctcctgcggcgcttcggaccccctggacctgaggcctggtga

SEQ ID NO: 167379 - DNA, 783 bp, Homo sapiens
  Payload ID: 12930
  Gene Symbol: POLD1
  Gene Name: polymerase (DNA directed), delta 1, catalytic subunit
  ENST ID: ENST00000601098
  CDS Start-End: 177-783
caggggtcacggcggcgtaggctgtggcgggaaacgctgtttgaagcggtagagacagggtttcaccatgttgataaggctggtctcaaacaactgacctcaagtgatccacccgcctcggcctctcaaagtgctgggattataggtgcgagccacggtgcccagctgggtacaggatggatggcaagcggcggccaggcccagggcccggggtgcccccaaagcgggcccgtgggggcctctgggatgatgatgatgcacctcggccatcccaattcgaggaggacctggcactgatggaggagatggaggcagaacacaggctgcaggagcaggaggaggaggagctgcagtcagtcctggagggggttgcagacgggcaggtcccaccatcagccatagatcctcgctggcttcggcccacaccaccagcgctggacccccagacagagcccctcatcttccaacagttggagattgaccattatgtgggcccagcgcagcctgtgcctggggggcccccaccatcccgcggctccgtgcctgtgctccgcgccttcggggtcaccgatgaggggttctctgtctgctgccacatccacggcttcgctccctacttctacaccccagcgccccctggtttcgggcccgagcacatgggtgacctgcaacgggagctgaacttggccatcagccgggacagtcgcggggggagggagctgactgggccggccgtgctggctgtggaactgtgctcccgagagagtgagtgctcccccagga

SEQ ID NO: 167380 - DNA, 695 bp, Homo sapiens
  Payload ID: 12930
  Gene Symbol: POLD1
  Gene Name: polymerase (DNA directed), delta 1, catalytic subunit
  ENST ID: ENST00000593887
  CDS Start-End: 380-695
aaacgctgtttgaagcggcttcagcactgactctgggctcccacaagcccctgcgcttcctctgtcccacccgggtctctcctcgcagatcatcactccctgtccctctctggctacttgcacaacccgaagccagagccgctaacgacgcttgcttcttcctgtctaagctgttgtaccaaggagcccccaaaacacagtggcccaagaaagatacaaattgatttctccacataacgctttggaagatagtagagacagggtttcaccatgttgataaggctggtctcaaacaactgacctcaagtgatccacccgcctcggcctctcaaagtgctgggattataggtgcgagccacggtgcccagctgggtacaggatggatggcaagcggcggccaggcccagggcccggggtgcccccaaagcgggcccgtgggggcctctgggatgatgatgatgcacctcggccatcccaattcgaggaggacctggcactgatggaggagatggaggcagaacacaggctgcaggagcaggaggaggaggagctgcagtcagtcctggagggggttgcagacgggcaggtcccaccatcagccatagatcctcgctggcttcggcccacaccaccagcgctggacccccagacagagcccctcatcttccaacagttggagattgaccattatgtgg

SEQ ID NO: 167381 - DNA, 3435 bp, Homo sapiens
  Payload ID: 12930
  Gene Symbol: POLD1
  Gene Name: polymerase (DNA directed), delta 1, catalytic subunit
  Uniprot ID: P28340
  ENST ID: ENST00000599857
  CDS Start-End: 45-3368
cggcggcgtaggctgtggcgggaaacgctgtttgaagcggcaggatggatggcaagcggcggccaggcccagggcccggggtgcccccaaagcgggcccgtgggggcctctgggatgatgatgatgcacctcggccatcccaattcgaggaggacctggcactgatggaggagatggaggcagaacacaggctgcaggagcaggaggaggaggagctgcagtcagtcctggagggggttgcagacgggcaggtcccaccatcagccatagatcctcgctggcttcggcccacaccaccagcgctggacccccagacagagcccctcatcttccaacagttggagattgaccattatgtgggcccagcgcagcctgtgcctggggggcccccaccatcccgcggctccgtgcctgtgctccgcgccttcggggtcaccgatgaggggttctctgtctgctgccacatccacggcttcgctccctacttctacaccccagcgccccctggtttcgggcccgagcacatgggtgacctgcaacgggagctgaacttggccatcagccgggacagtcgcggggggagggagctgactgggccggccgtgctggctgtggaactgtgctcccgagagagcatgtttgggtaccacgggcacggcccctccccgttcctgcgcatcaccgtggcgctgccgcgcctcgtggccccggcccgccgtctcctggaacagggcatccgtgtggcaggcctgggcacgcccagcttcgcgccctacgaggccaacgtcgactttgagatccggttcatggtggacacggacatcgtcggctgcaactggctggagctcccagctgggaaatacgccctgaggctgaaggagaaggctacgcagtgccagctggaggcggacgtgctgtggtctgacgtggtcagtcacccaccggaagggccatggcagcgcattgcgcccttgcgcgtgctcagcttcgatatcgagtgcgccggccgcaaaggcatcttccctgagcctgagcgggaccctgtcatccagatctgctcgctgggcctgcgctggggggagccggagcccttcctacgcctggcgctcaccctgcggccctgtgcccccatcctgggtgccaaggtgcagagctacgagaaggaggaggacctgctgcaggcctggtccaccttcatccgtatcatggaccccgacgtgatcaccggttacaacatccagaacttcgaccttccgtacctcatctctcgggcccagaccctcaaggtacaaacattccctttcctgggccgtgtggccggcctttgctccaacatccgggactcttcattccagtccaagcagacgggccggcgggacaccaaggttgtcagcatggtgggccgcgtgcagatggacatgctgcaggtgctgctgcgggagtacaagctccgctcctacacgctcaatgccgtgagcttccacttcctgggcgagcagaaggaggacgtgcagcacagcatcatcaccgacctgcagaatgggaacgaccagacccgccgccgcctggctgtgtactgcctgaaggatgcctacctgccactgcggctgctggagcggctcatggtgctggtgaacgccgtggagatggcgagggtcactggcgtgcccctcagctacctgctcagtcgtggccagcaggtcaaggtcgtatcccagctgttgcggcaggccatgcacgaggggctgctgatgcccgtggtgaagtcagagggcggcgaggactacacgggagccactgtcatcgagcccctcaaagggtactacgacgtccccatcgccaccctggacttctcctcgctgtacccgtccatcatgatggcccacaacctgtgttacaccacgctccttcggcccgggactgcacagaaactgggcctgactgaggatcagttcatcaggacccccaccggggacgagtttgtgaagacctcagtgcggaaggggctgctgccccagatcctggagaacctgctcagtgcccggaagagggccaaggccgagctggccaaggagacagaccccctccggcgccaggtcctggatggacggcagctggcgctgaaggtgagcgccaactccgtatacggcttcactggcgcccaggtgggcaagttgccgtgcctggagatctcacagagcgtcacggggttcggacgtcagatgatcgagaaaaccaagcagctggtggagtctaagtacacagtggagaatggctacagcaccagtgccaaggtggtgtatggtgacactgactccgtcatgtgccgattcggcgtgtcctcggtggctgaggcgatggccctggggcgggaggccgcggactgggtgtcaggtcacttcccgtcgcccatccggctggagtttgagaaggtctacttcccatacctgcttatcagcaagaagcgctacgcgggcctgctcttctcctcccggcccgacgcccacgaccgcatggactgcaagggcctggaggccgtgcgcagggacaactgccccctcgtggccaacctggtcactgcctcactgcgccgcctgctcatcgaccgagaccctgagggcgcggtggctcacgcacaggacgtcatctcggacctgctgtgcaaccgcatcgatatctcccagctggtcatcaccaaggagctgacccgcgcggcctccgactatgccggcaagcaggcccacgtggagctggccgagaggatgaggaagcgggaccccgggagtgcgcccagcctgggcgaccgcgtcccctacgtgatcatcagtgccgccaagggtgtggccgcctacatgaagtcggaggacccgctgttcgtgctggagcacagcctgcccattgacacgcagtactacctggagcagcagctggccaagcccctcctgcgcatcttcgagcccatcctgggcgagggccgtgccgaggctgtgctactgcggggggaccacacgcgctgcaagacggtgctcacgggcaaggtgggcggcctcctggccttcgccaaacgccgcaactgctgcattggctgccgcacagtgctcagccaccagggagccgtgtgtgagttctgccagccccgggagtctgagctgtatcagaaggaggtatcccatctgaatgccctggaggagcgcttctcgcgcctctggacgcagtgccagcgctgccagggcagcctgcacgaggacgtcatctgcaccagccgggactgccccatcttctacatgcgcaagaaggtgcggaaggacctggaagaccaggagcagctcctgcggcgcttcggaccccctggacctgaggcctggtgaccttgcaagcatcccatggggcgggggcgggaccagggagaattaataaagttctggacttttgcta

SEQ ID NO: 167382 - DNA, 3542 bp, Homo sapiens
  Payload ID: 12930
  Gene Symbol: POLD1
  Gene Name: polymerase (DNA directed), delta 1, catalytic subunit
  ENST ID: ENST00000613923
  CDS Start-End: 70-3471
ggcttgcgcgcgcgggagtcaggggtcacggcggcgtaggctgtggcgggaaacgctgtttgaagcgggatggatggcaagcggcggccaggcccagggcccggggtgcccccaaagcgggcccgtgggggcctctgggatgatgatgatgcacctcggccatcccaattcgaggaggacctggcactgatggaggagatggaggcagaacacaggctgcaggagcaggaggaggaggagctgcagtcagtcctggagggggttgcagacgggcaggtcccaccatcagccatagatcctcgctggcttcggcccacaccaccagcgctggacccccagacagagcccctcatcttccaacagttggagattgaccattatgtgggcccagcgcagcctgtgcctggggggcccccaccatcccgcggctccgtgcctgtgctccgcgccttcggggtcaccgatgaggggttctctgtctgctgccacatccacggcttcgctccctacttctacaccccagcgccccctggtttcgggcccgagcacatgggtgacctgcaacgggagctgaacttggccatcagccgggacagtcgcggggggagggagctgactgggccggccgtgctggctgtggaactgtgctcccgagagagcatgtttgggtaccacgggcacggcccctccccgttcctgcgcatcaccgtggcgctgccgcgcctcgtggccccggcccgccgtctcctggaacagggcatccgtgtggcaggcctgggcacgcccagcttcgcgccctacgaggccaacgtcgactttgagatccggttcatggtggacacggacatcgtcggctgcaactggctggagctcccagctgggaaatacgccctgaggctgaaggagaaggctacgcagtgccagctggaggcggacgtgctgtggtctgacgtggtcagtcacccaccggaagggccatggcagcgcattgcgcccttgcgcgtgctcagcttcgatatcgagtgcgccggccgcaaaggcatcttccctgagcctgagcgggaccctgtcatccagatctgctcgctgggcctgcgctggggggagccggagcccttcctacgcctggcgctcaccctgcggccctgtgcccccatcctgggtgccaaggtgcagagctacgagaaggaggaggacctgctgcaggcctggtccaccttcatccgtatcatggaccccgacgtgatcaccggttacaacatccagaacttcgaccttccgtacctcatctctcgggcccagaccctcaaggtacaaacattccctttcctgggccgtgtggccggcctttgctccaacatccgggactcttcattccagtccaagcagacgggccggcgggacaccaaggttgtcagcatggtgggccgcgtgcagatggacatgctgcaggtgctgctgcgggagtacaagctccgctcctacacgctcaatgccgtgagcttccacttcctgggcgagcagaaggaggacgtgcagcacagcatcatcaccgacctgcagaatgggaacgaccagacccgccgccgcctggctgtgtactgcctgaaggatgcctacctgccactgcggctgctggagcggctcatggtgctggtgaacgccgtggagatggcgagggtcactggcgtgcccctcagctacctgctcagtcgtggccagcaggtcaaggtcgtatcccagctgttgcggcaggccatgcacgaggggctgctgatgcccgtggtgaagtcagagggcggcgaggactacacgggagccactgtcatcgagcccctcaaaggggtgaggccacaagacagggcgggggcggcatgggaactcctagccctgactcccggccgcggctgctcccctcccaggtactacgacgtccccatcgccaccctggacttctcctcgctgtacccgtccatcatgatggcccacaacctgtgttacaccacgctccttcggcccgggactgcacagaaactgggcctgactgaggatcagttcatcaggacccccaccggggacgagtttgtgaagacctcagtgcggaaggggctgctgccccagatcctggagaacctgctcagtgcccggaagagggccaaggccgagctggccaaggagacagaccccctccggcgccaggtcctggatggacggcagctggcgctgaaggtgagcgccaactccgtatacggcttcactggcgcccaggtgggcaagttgccgtgcctggagatctcacagagcgtcacggggttcggacgtcagatgatcgagaaaaccaagcagctggtggagtctaagtacacagtggagaatggctacagcaccagtgccaaggtggtgtatggtgacactgactccgtcatgtgccgattcggcgtgtcctcggtggctgaggcgatggccctggggcgggaggccgcggactgggtgtcaggtcacttcccgtcgcccatccggctggagtttgagaaggtctacttcccatacctgcttatcagcaagaagcgctacgcgggcctgctcttctcctcccggcccgacgcccacgaccgcatggactgcaagggcctggaggccgtgcgcagggacaactgccccctcgtggccaacctggtcactgcctcactgcgccgcctgctcatcgaccgagaccctgagggcgcggtggctcacgcacaggacgtcatctcggacctgctgtgcaaccgcatcgatatctcccagctggtcatcaccaaggagctgacccgcgcggcctccgactatgccggcaagcaggcccacgtggagctggccgagaggatgaggaagcgggaccccgggagtgcgcccagcctgggcgaccgcgtcccctacgtgatcatcagtgccgccaagggtgtggccgcctacatgaagtcggaggacccgctgttcgtgctggagcacagcctgcccattgacacgcagtactacctggagcagcagctggccaagcccctcctgcgcatcttcgagcccatcctgggcgagggccgtgccgaggctgtgctactgcggggggaccacacgcgctgcaagacggtgctcacgggcaaggtgggcggcctcctggccttcgccaaacgccgcaactgctgcattggctgccgcacagtgctcagccaccagggagccgtgtgtgagttctgccagccccgggagtctgagctgtatcagaaggaggtatcccatctgaatgccctggaggagcgcttctcgcgcctctggacgcagtgccagcgctgccagggcagcctgcacgaggacgtcatctgcaccagccgggactgccccatcttctacatgcgcaagaaggtgcggaaggacctggaagaccaggagcagctcctgcggcgcttcggaccccctggacctgaggcctggtgaccttgcaagcatcccatggggcgggggcgggaccagggagaattaataaagttctggacttttgctatatg

SEQ ID NO: 167383 - DNA, 1597 bp, Homo sapiens
  Payload ID: 12931
  Gene Symbol: POLD2
  Gene Name: polymerase (DNA directed), delta 2, accessory subunit
  ENST ID: ENST00000223361
  CDS Start-End: 144-1511
gtatcctttgggtgcagtgagacaccaggagagctgctgctttgggggatggacaggggcagcaggaatgcctttgtgttttcgcagtgaacctccttggcctgggcgaagctgtgtggaccaagcaagtcaggagtgtggccatgttttctgagcaggctgcccagagggcccacactctactgtccccaccatcagccaacaatgccacctttgcccgggtgccagtggcaacctacaccaactcctcacaacccttccggctaggagagcgcagctttagccggcagtatgcccacatttatgccacccgcctcatccaaatgagacccttcctggagaaccgggcccagcagcactggggcagtggagtgggagtgaagaagctgtgtgaactgcagcctgaggagaagtgctgtgtggtgggcactctgttcaaggccatgccgctgcagccctccatcctgcgggaggtcagcgaggagcacaacctgctcccccagcctcctcggagtaaatacatacacccagatgacgagctggtcttggaagatgaactgcagcgtatcaaactaaaaggcaccattgacgtgtcaaagctggttacggggactgtcctggctgtgtttggctccgtgagagacgacgggaagtttctggtggaggactattgctttgctgaccttgctccccagaagcccgcacccccacttgacacagataggtttgtgctactggtgtccggcctgggcctgggtggcggtggaggcgagagcctgctgggcacccagctgctggtggatgtggtgacggggcagcttggggacgaaggggagcagtgcagcgccgcccacgtctcccgggttatcctcgctggcaacctcctcagccacagcacccagagcagggattctatcaataaggccaaatacctcaccaagaaaacccaggcagccagcgtggaggctgttaagatgctggatgagatcctcctgcagctgagcgcctcagtgcccgtggacgtgatgccaggcgagtttgatcccaccaattacacgctcccccagcagcccctccacccctgcatgttcccgctggccactgcctactccacgctccagctggtcaccaacccctaccaggccaccattgatggagtcagatttttggggacatcaggacagaacgtgagtgacattttccgatacagcagcatggaggatcacttggagatcctggagtggaccctgcgggtccgtcacatcagccccacagcccctgacactctagagtgcccgcatgtctacttttgtggcaacacccccagctttggctccaaaatcatccgaggtcctgaggaccagacagtgctgttggtgactgtccctgacttcagtgccacgcagaccgcctgccttgtgaacctgcgcagcctggcctgccagcccatcagcttctcgggcttcggggcagaggacgatgacctgggaggcctggggctgggcccctgactcaaaaaagtggttttgaccagagaggcccagatggaggctgttcattccctgcagtgtcggcattgtaaataaagcctgagcac

SEQ ID NO: 167384 - DNA, 2158 bp, Homo sapiens
  Payload ID: 12931
  Gene Symbol: POLD2
  Gene Name: polymerase (DNA directed), delta 2, accessory subunit
  Uniprot ID: P49005
  ENST ID: ENST00000406581
  CDS Start-End: 651-2060
gagtggggtccagggaaacggggtcagctgggggtggcagttccaggccgcgaggccgggctcctgggtcggtgggctggtgtcttggcggacgtcccgcagctgccgcgtggatccgagccggggcacccgccgtgactgggacagcccccagggcgctctcggccccatcccgagtagcgcggcctggctgctgccgccatcaagcacgttcgagccaaaagctcctaacgagtcactcgttagacacgtgtgcggagcctgtgtcccaggccagtgctgtcccgtggagatagattgcaagccgctagggaattttttaactttctagtgccggagagctggatggaggcagatcgggaattccatttggggcaaactgaacttgattgagaccctggtagttgtccagatggaacaggacacctgagtctagggttcgggaagaactccagatgggacaaacactcctagctttccttttctctttttggatgaccgctacaggtatcctttgggtgcagtgagacaccaggagagctgctgctttgggggatggacaggggcagcaggaatgcctttgtgttttcgcagtgaacctccttggcctgggcgaagctgtgtggaccaagcaagtcaggagtgtggccatgttttctgagcaggctgcccagagggcccacactctactgtccccaccatcagccaacaatgccacctttgcccgggtgccagtggcaacctacaccaactcctcacaacccttccggctaggagagcgcagctttagccggcagtatgcccacatttatgccacccgcctcatccaaatgagacccttcctggagaaccgggcccagcagcactggggcagtggagtgggagtgaagaagctgtgtgaactgcagcctgaggagaagtgctgtgtggtgggcactctgttcaaggccatgccgctgcagccctccatcctgcgggaggtcagcgaggagcacaacctgctcccccagcctcctcggagtaaatacatacacccagatgacgagctggtcttggaagatgaactgcagcgtatcaaactaaaaggcaccattgacgtgtcaaagctggttacggggactgtcctggctgtgtttggctccgtgagagacgacgggaagtttctggtggaggactattgctttgctgaccttgctccccagaagcccgcacccccacttgacacagataggtttgtgctactggtgtccggcctgggcctgggtggcggtggaggcgagagcctgctgggcacccagctgctggtggatgtggtgacggggcagcttggggacgaaggggagcagtgcagcgccgcccacgtctcccgggttatcctcgctggcaacctcctcagccacagcacccagagcagggattctatcaataaggccaaatacctcaccaagaaaacccaggcagccagcgtggaggctgttaagatgctggatgagatcctcctgcagctgagcgcctcagtgcccgtggacgtgatgccaggcgagtttgatcccaccaattacacgctcccccagcagcccctccacccctgcatgttcccgctggccactgcctactccacgctccagctggtcaccaacccctaccaggccaccattgatggagtcagatttttggggacatcaggacagaacgtgagtgacattttccgatacagcagcatggaggatcacttggagatcctggagtggaccctgcgggtccgtcacatcagccccacagcccctgacactctaggttgttaccccttctacaaaactgacccgttcatcttcccagagtgcccgcatgtctacttttgtggcaacacccccagctttggctccaaaatcatccgaggtcctgaggaccagacagtgctgttggtgactgtccctgacttcagtgccacgcagaccgcctgccttgtgaacctgcgcagcctggcctgccagcccatcagcttctcgggcttcggggcagaggacgatgacctgggaggcctggggctgggcccctgactcaaaaaagtggttttgaccagagaggcccagatggaggctgttcattccctgcagtgtcggcattgtaaataaagcctgagcacttgctgatgcga

SEQ ID NO: 167385 - DNA, 765 bp, Homo sapiens
  Payload ID: 12931
  Gene Symbol: POLD2
  Gene Name: polymerase (DNA directed), delta 2, accessory subunit
  ENST ID: ENST00000433715
  CDS Start-End: 106-765
gcggcgggaagagcccgggaagcttagtggggaagcgtctcttgatgggtgaacctccttggcctgggcgaagctgtgtggaccaagcaagtcaggagtgtggccatgttttctgagcaggctgcccagagggcccacactctactgtccccaccatcagccaacaatgccacctttgcccgggtgccagtggcaacctacaccaactcctcacaacccttccggctaggagagcgcagctttagccggcagtatgcccacatttatgccacccgcctcatccaaatgagacccttcctggagaaccgggcccagcagcactggggcagtggagtgggagtgaagaagctgtgtgaactgcagcctgaggagaagtgctgtgtggtgggcactctgttcaaggccatgccgctgcagccctccatcctgcgggaggtcagcgaggagcacaacctgctcccccagcctcctcggagtaaatacatacacccagatgacgagctggtcttggaagatgaactgcagcgtatcaaactaaaaggcaccattgacgtgtcaaagctggttacggggactgtcctggctgtgtttggctccgtgagagacgacgggaagtttctggtggaggactattgctttgctgaccttgctccccagaagcccgcacccccacttgacacagataggtttgtgctactggtgtccggcctgggcctgggtggcggtggaggcgagagcctgctgggcacccagctgctggtggat

SEQ ID NO: 167386 - DNA, 1659 bp, Homo sapiens
  Payload ID: 12931
  Gene Symbol: POLD2
  Gene Name: polymerase (DNA directed), delta 2, accessory subunit
  Uniprot ID: P49005
  ENST ID: ENST00000452185
  CDS Start-End: 250-1659
gggatgcggcgcgccgcgcgggtgagacatcggtatccaggcacgataaatttccaagtggacacaatgtctggtgtcaactacagctgttctccttcttttcccagtatcctttgggtgcagtgagacaccaggagagctgctgctttgggggatggacaggggcagcaggaatgcctttgtgttttcgcagtgaacctccttggcctgggcgaagctgtgtggaccaagcaagtcaggagtgtggccatgttttctgagcaggctgcccagagggcccacactctactgtccccaccatcagccaacaatgccacctttgcccgggtgccagtggcaacctacaccaactcctcacaacccttccggctaggagagcgcagctttagccggcagtatgcccacatttatgccacccgcctcatccaaatgagacccttcctggagaaccgggcccagcagcactggggcagtggagtgggagtgaagaagctgtgtgaactgcagcctgaggagaagtgctgtgtggtgggcactctgttcaaggccatgccgctgcagccctccatcctgcgggaggtcagcgaggagcacaacctgctcccccagcctcctcggagtaaatacatacacccagatgacgagctggtcttggaagatgaactgcagcgtatcaaactaaaaggcaccattgacgtgtcaaagctggttacggggactgtcctggctgtgtttggctccgtgagagacgacgggaagtttctggtggaggactattgctttgctgaccttgctccccagaagcccgcacccccacttgacacagataggtttgtgctactggtgtccggcctgggcctgggtggcggtggaggcgagagcctgctgggcacccagctgctggtggatgtggtgacggggcagcttggggacgaaggggagcagtgcagcgccgcccacgtctcccgggttatcctcgctggcaacctcctcagccacagcacccagagcagggattctatcaataaggccaaatacctcaccaagaaaacccaggcagccagcgtggaggctgttaagatgctggatgagatcctcctgcagctgagcgcctcagtgcccgtggacgtgatgccaggcgagtttgatcccaccaattacacgctcccccagcagcccctccacccctgcatgttcccgctggccactgcctactccacgctccagctggtcaccaacccctaccaggccaccattgatggagtcagatttttggggacatcaggacagaacgtgagtgacattttccgatacagcagcatggaggatcacttggagatcctggagtggaccctgcgggtccgtcacatcagccccacagcccctgacactctaggttgttaccccttctacaaaactgacccgttcatcttcccagagtgcccgcatgtctacttttgtggcaacacccccagctttggctccaaaatcatccgaggtcctgaggaccagacagtgctgttggtgactgtccctgacttcagtgccacgcagaccgcctgccttgtgaacctgcgcagcctggcctgccagcccatcagcttctcgggcttcggggcagaggacgatgacctgggaggcctggggctgggcccctga

SEQ ID NO: 167387 - DNA, 665 bp, Homo sapiens
  Payload ID: 12931
  Gene Symbol: POLD2
  Gene Name: polymerase (DNA directed), delta 2, accessory subunit
  ENST ID: ENST00000456038
  CDS Start-End: 200-665
cacagttggactcaccacatctcctgtacttcgtagccctaggtggctagtggcataagacacaaaaatctcagctctcctggagcttatggtctagttggagcaggcagacaatacatttaaaatatacagtttgttagaagtgaacctccttggcctgggcgaagctgtgtggaccaagcaagtcaggagtgtggccatgttttctgagcaggctgcccagagggcccacactctactgtccccaccatcagccaacaatgccacctttgcccgggtgccagtggcaacctacaccaactcctcacaacccttccggctaggagagcgcagctttagccggcagtatgcccacatttatgccacccgcctcatccaaatgagacccttcctggagaaccgggcccagcagcactggggcagtggagtgggagtgaagaagctgtgtgaactgcagcctgaggagaagtgctgtgtggtgggcactctgttcaaggccatgccgctgcagccctccatcctgcgggaggtcagcgaggagcacaacctgctcccccagcctcctcggagtaaatacatacacccagatgacgagctggtcttggaagatgaactgcagcgtatcaaactaaaaggcaccattgacgtgtcaaagctggttacgg

SEQ ID NO: 167388 - DNA, 249 bp, Homo sapiens
  Payload ID: 12931
  Gene Symbol: POLD2
  Gene Name: polymerase (DNA directed), delta 2, accessory subunit
  ENST ID: ENST00000436400
  CDS Start-End: 1-249
gccaaatacctcaccaagaaaacccaggcagccagcgtggaggctgttaagatgctggatgagatcctcctgcagctgagccagcccctccacccctgcatgttcccgctggccactgcctactccacgctccagctggtcaccaacccctaccaggccaccattgatggagtcagatttttggggacatcaggacagaacgtgagtgacattttccgatacagcagcatggaggatcacttggagatc

SEQ ID NO: 167389 - DNA, 556 bp, Homo sapiens
  Payload ID: 12931
  Gene Symbol: POLD2
  Gene Name: polymerase (DNA directed), delta 2, accessory subunit
  ENST ID: ENST00000418438
  CDS Start-End: 113-556
agtggtcggcgggatgaggcgcctggtgacggacggggcgaggagggcagcgattgtgaacctccttggcctgggcgaagctgtgtggaccaagcaagtcaggagtgtggccatgttttctgagcaggctgcccagagggcccacactctactgtccccaccatcagccaacaatgccacctttgcccgggtgccagtggcaacctacaccaactcctcacaacccttccggctaggagagcgcagctttagccggcagtatgcccacatttatgccacccgcctcatccaaatgagacccttcctggagaaccgggcccagcagcactggggcagtggagtgggagtgaagaagctgtgtgaactgcagcctgaggagaagtgctgtgtggtgggcactctgttcaaggccatgccgctgcagccctccatcctgcgggaggtcagcgaggagcacaacctgctcccccagcctcctcggagtaaatacatacacccagatgacgagctggtcttggaagatgaactgcagcgtatcaaactaaaaggcaccatt

SEQ ID NO: 167390 - DNA, 854 bp, Homo sapiens
  Payload ID: 12931
  Gene Symbol: POLD2
  Gene Name: polymerase (DNA directed), delta 2, accessory subunit
  ENST ID: ENST00000436844
  CDS Start-End: 84-854
gattggcgggatgcggcgcgccgcgcgtgaacctccttggcctgggcgaagctgtgtggaccaagcaagtcaggagtgtggccatgttttctgagcaggctgcccagagggcccacactctactgtccccaccatcagccaacaatgccacctttgcccgggtgccagtggcaacctacaccaactcctcacaacccttccggctaggagagcgcagctttagccggcagtatgcccacatttatgccacccgcctcatccaaatgagacccttcctggagaaccgggcccagcagcactgggggactgtcctggctgtgtttggctccgtgagagacgacgggaagtttctggtggaggactattgctttgctgaccttgctccccagaagcccgcacccccacttgacacagataggtttgtgctactggtgtccggcctgggcctgggtggcggtggaggcgagagcctgctgggcacccagctgctggtggatgtggtgacggggcagcttggggacgaaggggagcagtgcagcgccgcccacgtctcccgggttatcctcgctggcaacctcctcagccacagcacccagagcagggattctatcaataaggccaaatacctcaccaagaaaacccaggcagccagcgtggaggctgttaagatgctggatgagatcctcctgcagctgagcgcctcagtgcccgtggacgtgatgccaggcgagtttgatcccaccaattacacgctcccccagcagcccctccacccctgcatgttcccgctggccactgcctactccacgctccagctggtcaccaacccctaccaggccaccattgatggagtc

SEQ ID NO: 167391 - DNA, 1619 bp, Homo sapiens
  Payload ID: 12931
  Gene Symbol: POLD2
  Gene Name: polymerase (DNA directed), delta 2, accessory subunit
  ENST ID: ENST00000610533
  CDS Start-End: 1-1515
atgggcggggcaggcgcgcggggattggcgggatgcggcgcgccgcgcgtgaacctccttggcctgggcgaagctgtgtggaccaagcaagtcaggagtgtggccatgttttctgagcaggctgcccagagggcccacactctactgtccccaccatcagccaacaatgccacctttgcccgggtgccagtggcaacctacaccaactcctcacaacccttccggctaggagagcgcagctttagccggcagtatgcccacatttatgccacccgcctcatccaaatgagacccttcctggagaaccgggcccagcagcactggggcagtggagtgggagtgaagaagctgtgtgaactgcagcctgaggagaagtgctgtgtggtgggcactctgttcaaggccatgccgctgcagccctccatcctgcgggaggtcagcgaggagcacaacctgctcccccagcctcctcggagtaaatacatacacccagatgacgagctggtcttggaagatgaactgcagcgtatcaaactaaaaggcaccattgacgtgtcaaagctggttacggggactgtcctggctgtgtttggctccgtgagagacgacgggaagtttctggtggaggactattgctttgctgaccttgctccccagaagcccgcacccccacttgacacagataggtttgtgctactggtgtccggcctgggcctgggtggcggtggaggcgagagcctgctgggcacccagctgctggtggatgtggtgacggggcagcttggggacgaaggggagcagtgcagcgccgcccacgtctcccgggttatcctcgctggcaacctcctcagccacagcacccagagcagggattctatcaataaggccaaatacctcaccaagaaaacccaggcagccagcgtggaggctgttaagatgctggatgagatcctcctgcagctgagcgcctcagtgcccgtggacgtgatgccaggcgagtttgatcccaccaattacacgctcccccagcagcccctccacccctgcatgttcccgctggccactgcctactccacgctccagctggtcaccaacccctaccaggccaccattgatggagtcagatttttggggacatcaggacagaacgtgagtgacattttccgatacagcagcatggaggatcacttggagatcctggagtggaccctgcgggtccgtcacatcagccccacagcccctgacactctaggttgttaccccttctacaaaactgacccgttcatcttcccagagtgcccgcatgtctacttttgtggcaacacccccagctttggctccaaaatcatccgaggtcctgaggaccagacagtgctgttggtgactgtccctgacttcagtgccacgcagaccgcctgccttgtgaacctgcgcagcctggcctgccagcccatcagcttctcgggcttcggggcagaggacgatgacctgggaggcctggggctgggcccctgactcaaaaaagtggttttgaccagagaggcccagatggaggctgttcattccctgcagtgtcggcattgtaaataaagcctgagcacttgctgatgcgagccttg

SEQ ID NO: 167392 - DNA, 1776 bp, Homo sapiens
  Payload ID: 12932
  Gene Symbol: POLE2
  Gene Name: polymerase (DNA directed), epsilon 2, accessory subunit
  Uniprot ID: P56282
  ENST ID: ENST00000216367
  CDS Start-End: 101-1684
taacagggtttagcgccacgcgggccagggccgaggccggagctgggaggggcgcgcccgggaaggggcggagctgcggcggtggcgccaaatcgcaaatatggcgccggagcggctgcggagccgggcgctctccgccttcaagttgcggggcttgctgctccgtggtgaagctattaagtacctcacagaagctcttcagtctatcagtgaattagagcttgaagataaactggaaaagataattaatgcagttgagaagcaacccttgtcatcaaacatgattgaacgatctgtggtggaagcagcagtccaggaatgcagtcagtctgttgatgaaactatagagcacgttttcaatatcataggagcatttgatattccacgctttgtgtacaattcagaaagaaaaaaatttcttcctctgttaatgaccaaccaccctgcaccaaatttatttggaacaccaagagataaagcagagatgtttcgtgagcgatataccattttgcaccagaggacccacaggcatgaattatttactcctccggtgataggttctcaccctgatgaaagcggaagcaaattccagcttaaaacaatagaaaccttattgggtagtacaaccaaaatcggagatgcgattgttcttggaatgataacgcagttaaaagagggaaaattttttctggaagatcctactggaacagtccaactagaccttagtaaagctcagttccatagtggtttatacacagaggcatgctttgtcttagcagaaggttggtttgaagatcaagtgtttcatgtcaatgcctttggatttccacccactgagccctctagtactactagggcatactatggaaatattaatttttttggaggtccttctaatacatctgtgaagacttctgcaaaactaaaacagctagaagaggagaataaagatgctatgtttgtgtttttatctgatgtttggttggaccaggtggaagtattggaaaaacttcgcataatgtttgctggttattcaccagcacctccaacctgctttattctgtgtggtaatttttcatctgcaccatatggaaaaaatcaagttcaagctttgaaagattccctaaaaactttggcagatataatatgtgaatacccagatattcaccaaagtagtcgttttgtgtttgtacctggtccagaggatcctggatttggttccatcttaccaaggccaccacttgctgaaagcatcactaatgaattcagacaaagggtaccattttcagtttttactactaatccttgcagaattcagtactgtacacaggaaattactgtcttccgtgaagacttagtaaataaaatgtgcagaaactgcgtccgttttcctagcagcaatttggctattcctaatcactttgtaaagactatcttatcccaaggacatctgactcccctacctctttatgtctgcccagtgtattgggcatatgactatgctttgagagtgtatcctgtgcccgatctacttgtcattgcagacaaatatgatcctttcactacgacaaataccgaatgcctctgcataaaccctggctcttttccaagaagtggattttcattcaaagttttttatccttctaataagacagtagaagatagcaaacttcaaggcttttgagattcttaaagatcatctgaagaaaattcatcagttttctgcttaactctatatcttatgtgattctgatattacaataaaattatggtaaa

SEQ ID NO: 167393 - DNA, 1792 bp, Homo sapiens
  Payload ID: 12932
  Gene Symbol: POLE2
  Gene Name: polymerase (DNA directed), epsilon 2, accessory subunit
  Uniprot ID: P56282
  ENST ID: ENST00000539565
  CDS Start-End: 220-1725
agtttcccggcagcaaaggagcgcgaggtggtctccactttcagcctactcggtccggggttgcgaactgtaaggtctgagttgctgcggcgcaggcagcggagaccaagcagggatcttaacagggtttagcgccacgcgggccagggccgaggccggagctgggaggggcgcgcccgggaaggggcggagctgcggcggtggcgccaaatcgcaaatatggcgccggagcggctgcggagccgggcgctctccgccttcaagttgcggggcttgctgctccgtggtgaagctattaagtacctcacagaagctcttcagtctatcagtgaattagagcttgaagataaactggaaaagataattaatgcagttgagaagcaacccttgtcatcaaacatgattgaacgatctgtggtggaagcagcagtccaggaatgcagtcagtctgttgatgaaactattctgttaatgaccaaccaccctgcaccaaatttatttggaacaccaagagataaagcagagatgtttcgtgagcgatataccattttgcaccagaggacccacaggcatgaattatttactcctccggtgataggttctcaccctgatgaaagcggaagcaaattccagcttaaaacaatagaaaccttattgggtagtacaaccaaaatcggagatgcgattgttcttggaatgataacgcagttaaaagagggaaaattttttctggaagatcctactggaacagtccaactagaccttagtaaagctcagttccatagtggtttatacacagaggcatgctttgtcttagcagaaggttggtttgaagatcaagtgtttcatgtcaatgcctttggatttccacccactgagccctctagtactactagggcatactatggaaatattaatttttttggaggtccttctaatacatctgtgaagacttctgcaaaactaaaacagctagaagaggagaataaagatgctatgtttgtgtttttatctgatgtttggttggaccaggtggaagtattggaaaaacttcgcataatgtttgctggttattcaccagcacctccaacctgctttattctgtgtggtaatttttcatctgcaccatatggaaaaaatcaagttcaagctttgaaagattccctaaaaactttggcagatataatatgtgaatacccagatattcaccaaagtagtcgttttgtgtttgtacctggtccagaggatcctggatttggttccatcttaccaaggccaccacttgctgaaagcatcactaatgaattcagacaaagggtaccattttcagtttttactactaatccttgcagaattcagtactgtacacaggaaattactgtcttccgtgaagacttagtaaataaaatgtgcagaaactgcgtccgttttcctagcagcaatttggctattcctaatcactttgtaaagactatcttatcccaaggacatctgactcccctacctctttatgtctgcccagtgtattgggcatatgactatgctttgagagtgtatcctgtgcccgatctacttgtcattgcagacaaatatgatcctttcactacgacaaataccgaatgcctctgcataaaccctggctcttttccaagaagtggattttcattcaaagttttttatccttctaataagacagtagaagatagcaaacttcaaggcttttgagattcttaaagatcatctgaagaaaattcatcagttttctgcttaactctatatcttatgtgattct

SEQ ID NO: 167394 - DNA, 1581 bp, Homo sapiens
  Payload ID: 12932
  Gene Symbol: POLE2
  Gene Name: polymerase (DNA directed), epsilon 2, accessory subunit
  Uniprot ID: P56282
  ENST ID: ENST00000554396
  CDS Start-End: 8-1516
cgcaaatatggcgccggagcggctgcggagccgggcgctctccgccttcaagttgcggggcttgctgctccgtggtgaagctattaagtacctcacagaagctcttcagtctatcagtgaattagagcttgaagataaactggaaaagataattaatgcagttgagaagcaacccttgtcatcaaacatgattgaacgatctgtggtggaagcagcagtccaggaatgcagtcagtctgttgatgaaactatagagcacgttttcaatatcataggagcatttgatattccacgctttgtgtacaattcagaaagaaaaaaatttcttcctctgttaatgaccaaccaccctgcaccaaatttatttggaacaccaagagataaagcagagatgtttcgtgagcgatataccattttgcaccagaggacccacaggcatgaattatttactcctccggtgataggttctcaccctgatgaaagcggaagcaaattccagcttaaaacaatagaaaccttattgggtagtacaaccaaaatcggagatgcgattgttcttggaatgataacgcagttaaaagagggaaaattttttctggaagatcctactggaacagtccaactagaccttagtaaagctcagttccatagtggtttatacacagaggcatgctttgtcttagcagaaggttggtttgaagatcaagtgtttcatgtcaatgcctttggatttccacccactgagccctctagtactactagggcatactatggaaatattaatttttttggaggtccttctaatacatctgtgaagacttctgcaaaactaaaacagctagaagaggagaataaagatgctatgtttgtgtttttatctgatgtttggttggaccaggtggaagtattggaaaaacttcgcataatgtttgctggttattcaccagcacctccaacctgctttattctgtgtggtaatttttcatctgcaccatatggaaaaaatcaagttcaagctttgaaagattccctaaaaactttggcagatataatatgtgaatacccagatattcaccaaagtagtcgttttgtgtttgtacctggtccagaggatcctggatttggttccatcttaccaaggccaccacttgctgaaagcatcactaatgaattcagacaaagggtaccattttcagtttttactactaatccttgcagaattcagtactgtacacaggaaattactgtcttccgtgaagacttagtaaataaaatgtgcagaaactgcgtccgttttcctagcagcaatttggctattcctaatcactttgtaaagactatcttatcccaaggacatctgactcccctacctctttatgtctgcccagtgtattgggcatatgactatgctttgagagtgtatcctgtgcccgatctacttgtcattgcagacaaatatgatcctttcactacgacaaataccgaatgcctctgcataaaccctgtaagaatgtagttaatcttatatagtcattatttatcaagattagagtgcattttttaatttaaaaatatatattt

SEQ ID NO: 167395 - DNA, 496 bp, Homo sapiens
  Payload ID: 12932
  Gene Symbol: POLE2
  Gene Name: polymerase (DNA directed), epsilon 2, accessory subunit
  ENST ID: ENST00000553805
  CDS Start-End: 1-291
atggcgccggagcggctgcggagccgggcgctctccgccttcaagttgcggggcttgctgctccgtggtgaagctattaagtacctcacagaagctcttcagtctatcagtgaattagagcttgaagataaactggaaaagataattaatgcagttgagaagcaacccttgtcatcaaacatgattgaacgatctgtggtggaagcagcagtccaggaatgcagtcagtctgttgatgaaactatgtatgtgggtacagttaacttttttcctccttggaggtgttattgagcacttatttttaattattgtcttggaaaattattagtgatcaacgtttctacagtgattactgttgttatttctgtgtgtctttttaaataatggctttctttgcaaacctcattattaaatgactcatctttactggtttttcctgggatttgaggttacagtgttgcttgtaccattcattactaacttttgctgcctaccc

SEQ ID NO: 167396 - DNA, 2109 bp, Homo sapiens
  Payload ID: 12933
  Gene Symbol: POLE3
  Gene Name: polymerase (DNA directed), epsilon 3, accessory subunit
  Uniprot ID: Q9NRF9
  ENST ID: ENST00000374169
  CDS Start-End: 90-533
gcagggtcagaccgtagcgacgcgggaagtccggacgcagtagctccctgaagcggaggcgaaggggagtttaagccccagcggcggcaatggcggagaggcccgaggacctaaacctgcccaatgccgtgatcaccaggatcatcaaggaggcgctcccggacggtgtcaacatctccaaggaggcccggagcgccatctcccgcgccgccagcgtcttcgtgctgtacgccacatcctgtgctaacaactttgcaatgaaaggaaagcggaagacgctgaatgccagtgatgtgctctcagccatggaagagatggagttccagcggttcgttaccccattgaaagaagctctggaagcatataggcgggagcagaaaggcaagaaggaggcctcagagcaaaagaagaaggacaaagacaaaaaaacagactcggaagagcaagacaagagcagggatgaggacaatgatgaagacgaagaaaggctggaagaagaagaacagaatgaagaggaagaagtagacaactgaaaagggcgggagactgtggcaccttggaaggtaccacttgaaatgagacgtgctacgtgtttctgtgaagcttttccatgctgggcagagtagtctcaggcaaaagtgcctgaaaagatcagaataaaaactgactagaaataccgtcaaaaccagcacttaccaaactcagagcatctgagtagcagaatcctgttttgcttcatcaatctgaaggttatggccttttgacaagagggattctgaacgactaaattagtcagtttgctcgcttttgtttacttaaatgtatggttagatggtttttgatctgcagtcttccctagtcccccaaataagtaataataacttccatgctgcctgctgtgttccagatcacagaggcagccaaggctcaggaaaaactggggctttgcttatggtcagcctatgtttgattgcacagtctttgacaatagtagcttactaagactgctcagaatgagtaagctttaggaaactactaaaatgctgtgggagaataacaaaatccgttctctctcttcacttgacagaagcattaactgaattttgtttttcatagacccacttggcccaaaacctttctatattgcctgtagatgatcggcctgctggtgtggtagtaatctgatcacagatattcttaaatcagcagtgtggaatggtattagtcaaacatggtgccagtgtcttttacaaaaacagatggcatagtgtcagatgtaccttactctctgctactgtacagctttaggatttgtcatcacctcccggaaggtgtaaaaccccaggcttcctcttcttgtagtccatctcccagacttgtgactatggcttttcattcttcaattcatgacgagtgccaaacttgattttctctaggcacagctttctccctctgtgcctcctgcttcctttctctctcctgcctctcctctgctccccatcccactttctcatctgcctccttttctcacttctgtcagtctgtaagctttgataacctgcttaatactccaaagtgtgagttcctctgatctcttgattccttagttctaatctcacgttttgtttttaagagatggagtctctcactctgtggcccaggctggagtgcagtggcatgatcatagctcattgcatccttgaaatcctgggctcaggtgatcctcccgcctgagcctcctgagtatctgggactacagatgcgtgccaccaagcctggctaattttgtctcatgtcttctaaaaattattttgtgaagccccttcacaaaaaaccttaagggaaatctgatggtgctcaggaatctaactctccctaaaccatcctctttaactgcttctaaaatatctctgttggcctttcttagcctttttctgtttccattcagtgctccaagcgctttttgtttctaagttgagtgcttggggtttgacaggtagtgacgtgtagtttgacactgttaacttgttaaatacagtgaaaagtttgtgagtgaagaatgctgagaagattgtaatgctttgtacaaataaaagtcttgttaaaaaa

SEQ ID NO: 167397 - DNA, 2191 bp, Homo sapiens
  Payload ID: 12933
  Gene Symbol: POLE3
  Gene Name: polymerase (DNA directed), epsilon 3, accessory subunit
  Uniprot ID: Q9NRF9
  ENST ID: ENST00000374171
  CDS Start-End: 172-615
agcggcgcagggcaccatgggaaacggacggaagctccattgagccaaataagttggccacgtggggcggaacggaaacctcgcagggtcagaccgtagcgacgcgggaagtccggacgcagtagctccctgaagcggaggcgaaggggagtttaagccccagcggcggcaatggcggagaggcccgaggacctaaacctgcccaatgccgtgatcaccaggatcatcaaggaggcgctcccggacggtgtcaacatctccaaggaggcccggagcgccatctcccgcgccgccagcgtcttcgtgctgtacgccacatcctgtgctaacaactttgcaatgaaaggaaagcggaagacgctgaatgccagtgatgtgctctcagccatggaagagatggagttccagcggttcgttaccccattgaaagaagctctggaagcatataggcgggagcagaaaggcaagaaggaggcctcagagcaaaagaagaaggacaaagacaaaaaaacagactcggaagagcaagacaagagcagggatgaggacaatgatgaagacgaagaaaggctggaagaagaagaacagaatgaagaggaagaagtagacaactgaaaagggcgggagactgtggcaccttggaaggtaccacttgaaatgagacgtgctacgtgtttctgtgaagcttttccatgctgggcagagtagtctcaggcaaaagtgcctgaaaagatcagaataaaaactgactagaaataccgtcaaaaccagcacttaccaaactcagagcatctgagtagcagaatcctgttttgcttcatcaatctgaaggttatggccttttgacaagagggattctgaacgactaaattagtcagtttgctcgcttttgtttacttaaatgtatggttagatggtttttgatctgcagtcttccctagtcccccaaataagtaataataacttccatgctgcctgctgtgttccagatcacagaggcagccaaggctcaggaaaaactggggctttgcttatggtcagcctatgtttgattgcacagtctttgacaatagtagcttactaagactgctcagaatgagtaagctttaggaaactactaaaatgctgtgggagaataacaaaatccgttctctctcttcacttgacagaagcattaactgaattttgtttttcatagacccacttggcccaaaacctttctatattgcctgtagatgatcggcctgctggtgtggtagtaatctgatcacagatattcttaaatcagcagtgtggaatggtattagtcaaacatggtgccagtgtcttttacaaaaacagatggcatagtgtcagatgtaccttactctctgctactgtacagctttaggatttgtcatcacctcccggaaggtgtaaaaccccaggcttcctcttcttgtagtccatctcccagacttgtgactatggcttttcattcttcaattcatgacgagtgccaaacttgattttctctaggcacagctttctccctctgtgcctcctgcttcctttctctctcctgcctctcctctgctccccatcccactttctcatctgcctccttttctcacttctgtcagtctgtaagctttgataacctgcttaatactccaaagtgtgagttcctctgatctcttgattccttagttctaatctcacgttttgtttttaagagatggagtctctcactctgtggcccaggctggagtgcagtggcatgatcatagctcattgcatccttgaaatcctgggctcaggtgatcctcccgcctgagcctcctgagtatctgggactacagatgcgtgccaccaagcctggctaattttgtctcatgtcttctaaaaattattttgtgaagccccttcacaaaaaaccttaagggaaatctgatggtgctcaggaatctaactctccctaaaccatcctctttaactgcttctaaaatatctctgttggcctttcttagcctttttctgtttccattcagtgctccaagcgctttttgtttctaagttgagtgcttggggtttgacaggtagtgacgtgtagtttgacactgttaacttgttaaatacagtgaaaagtttgtgagtgaagaatgctgagaagattgtaatgctttgtacaaataaaagtcttgttaaaaaa

SEQ ID NO: 167398 - DNA, 7840 bp, Homo sapiens
  Payload ID: 12934
  Gene Symbol: POLE
  Gene Name: polymerase (DNA directed), epsilon, catalytic subunit
  Uniprot ID: Q07864
  ENST ID: ENST00000320574
  CDS Start-End: 45-6905
cgccaaatttctcccctgaagcagaggtggtagccaacggctccatgtctctgaggagcggcgggcggcggcgcgcggacccaggcgcggatggcgaggccagcagggatgatggcgccacttcctcagtttcggcactcaagcgcctggaacggagtcagtggacggataagatggatttgcggtttggttttgagcggctgaaggagcctggtgagaagacaggctggctcattaacatgcatcctaccgagattttagatgaagataagcgcttaggcagtgcagtggattactactttattcaagatgacggaagcagatttaaggtggctttgccctataaaccgtatttctacattgcgaccagaaagggttgtgagcgagaagtttcatcttttctctccaagaagtttcagggcaaaattgcaaaagtggagactgtccccaaagaggatctggacttgccaaatcacttggtgggtttgaagcgaaattacatcaggctgtccttccacactgtggaggatcttgtcaaagtgaggaaggagatctcccctgccgtgaagaagaacagggagcaggatcacgccagcgacgcgtacacagctctgctttccagtgttctgcagaggggcggtgtcattactgatgaagaggaaacctctaagaagatagctgaccagttggacaacattgtggacatgcgcgagtacgatgttccctaccacatccgcctctccattgacctgaagatccacgtggctcattggtacaatgtcagataccgaggaaatgcttttccggtagaaatcacccgccgagatgaccttgttgaacgacctgaccctgtggttttggcatttgacattgagacgaccaaactgcccctcaagtttcctgatgctgagacagaccagattatgatgatttcctacatgatcgatggccagggctacctcatcaccaacagggagattgtttcagaagatattgaagattttgagttcacccccaagccagaatatgaaggccccttttgtgtcttcaatgaacccgatgaggctcatctgatccaaaggtggtttgaacacgtccaggagaccaaacccaccatcatggtcacctacaacggggacttttttgactggccatttgtggaggcccgggcagcagtccacggtctgagcatgcagcaggagataggcttccagaaggacagccagggggagtacaaggcgccccagtgcatccacatggactgcctcaggtgggtgaagagggacagttaccttcctgtgggcagtcataatctcaaggcggccgccaaggccaagctaggctatgatcccgtggagctagacccggaggacatgtgccggatggccacggagcagccccagactctggccacgtattctgtgtcagatgctgtcgccacttactacctgtacatgaagtacgtccacccattcatctttgctctgtgcaccattattcccatggagcccgacgaggtgctgcggaagggctctggcactctgtgtgaggccttgctgatggtgcaggccttccacgccaacatcatcttccccaacaagcaagagcaggagttcaataagctgacggacgacggacacgtgctggactctgagacctacgtcgggggccacgtggaggccctcgagtctggggttttccgcagcgatatcccttgccggtttaggatgaatcctgccgcctttgacttcctgctgcagcgggttgagaagaccttgcgccacgcccttgaggaagaggagaaagtgcctgtggagcaagtcaccaactttgaagaggtgtgtgatgagattaagagcaagcttgcctccctgaaggacgttcccagccgcatcgagtgtccactcatctaccacctggacgtgggggccatgtaccccaacatcatcctgaccaaccgcctgcagccctctgccatggtggacgaagccacctgtgctgcctgtgacttcaataagcctggagcaaactgccagcggaagatggcctggcagtggaggggcgagttcatgccagccagtcgcagcgaataccatcggatccagcaccagctggagtcagagaagttcccccccttgttcccagaggggccagctcgggcctttcatgaactgtcccgcgaggaacaggcgaaatacgagaagagaaggctggcggattactgccggaaagcctacaagaagatccacatcaccaaggtggaagagcgtctcaccaccatctgccagcgggaaaactccttctacgtggacaccgtgcgtgccttccgggacaggcgttacgagttcaaagggctccacaaggtgtggaaaaagaagctctcggcggccgtggaggtgggcgacgcggctgaggtgaagcgctgcaagaacatggaggtgctgtatgactcgctgcagctggcccacaagtgcatcctgaactccttctatggctatgtcatgcgcaagggggctcgctggtactccatggagatggctggcatcgtctgcttcacaggggccaacatcatcacccaggcacgggagctgatcgagcagattgggaggcccttagagctggacacagatggtatatggtgcgtcctgcccaacagcttcccagaaaattttgtcttcaagacgaccaatgtgaagaagcccaaagtgaccatctcctacccaggcgccatgttgaacatcatggtcaaggaaggcttcaccaatgaccagtaccaggagctggctgagccgtcctcactcacctacgtcacccgctcagagaacagcatcttttttgaggttgatgggccctaccttgccatgattcttccagcctccaaggaagaaggcaagaaattgaagaagaggtatgctgtgttcaatgaagacggttctctggctgagctcaagggctttgaggtcaaacgccgcggggaactgcagctgattaagatcttccaatcctcggtgtttgaggccttcctcaagggcagcacgctggaagaggtgtatggctctgtagccaaggtggctgactactggctggacgtgctgtacagcaaggcagccaacatgcctgactctgagctattcgagctcatctctgagaaccgttccatgtctcggaagctggaagattacggggagcagaagtctacgtccatcagcacagcaaagcgcctggccgagttcctgggagaccagatggtcaaggatgcagggctgagttgccgctacatcatctcccgcaagcccgagggctcccctgtcacggagagggccatcccacttgccattttccaagcagagcccacggtgaggaagcactttctccggaaatggctcaagagctcttcccttcaagactttgatattcgagcaattctggattgggactactacattgagcggctgggaagcgccatccagaagatcatcaccatccctgcggccctgcagcaggtaaagaacccagtgccacgtgtcaaacaccccgactggctgcacaaaaaactgctggagaagaatgatgtctacaagcagaagaagatcagtgagctcttcaccctggagggcaggagacaggtcacgatggccgaggcctcagaagacagtccgaggccaagtgctcctgacatggaggacttcggcctcgtaaagctgcctcacccagcagcccctgtcactgtgaagaggaagcgagttctttgggagagccaggaggagtcccaggacctcacgccgactgtgccctggcaggaaatcttggggcagcctcccgccctgggaaccagccaggaggaatggcttgtctggctccggttccacaagaagaagtggcagctgcaggcccggcagcgcctcgcccgcaggaagaggcagcgtctggagtcggcagagggtgtgctcaggcccggggccatccgggatggtcctgccacggggctggggagcttcttgcgaagaactgcccgcagcatcctggaccttccgtggcagattgtgcagatcagcgagaccagccaggccggcctgttcaggctgtgggcgctcgttggcagtgacttgcactgcatcaggctgagcatcccccgtgtgttctacgtgaaccagcgagtcgctaaagcggaggagggtgcttcgtatcgcaaggtaaatcgggtccttcctcgctccaacatggtctacaatctctatgagtattcagtgccagaggacatgtaccaggaacacatcaacgagatcaacgctgagctgtcagcgccagacatcgagggcgtatatgagactcaggttccgttactgttccgggccctggtgcacctgggctgtgtgtgtgtggtcaataaacagctggtgaggcacctttcaggctgggaagcagagacctttgctcttgagcacctggagatgcgctctctggcccagttcagctacctggaaccagggagtatccgccatatctacctgtaccaccacgcacaggcccacaaagcgctcttcgggatcttcatcccctcacagcgcagggcatccgtctttgtgctggacactgtgcgcagcaaccagatgcccagccttggcgccctgtactcagcagagcacggcctcctcctggagaaggtgggccctgagctcctgccaccccccaaacacaccttcgaagttcgggcagaaactgacctgaagaccatctgcagagccatccagcgattcctgctcgcctacaaggaggagcgccgggggcccacactcatcgctgttcagtccagctgggagctgaagaggctggccagtgaaattcctgtcttggaggaattcccactggtgcctatctgtgtggctgacaagatcaactatggggtcctggactggcagcgccatggagcccggcgcatgatccgtcactacctcaacctggacacctgcctgtcgcaggccttcgagatgagcaggtactttcacattcccattgggaacctaccagaggacatctccacattcggctccgacctcttctttgcccgccacctccagcgccacaaccacctgctctggctgtcccctacagcccgccctgacctgggtggaaaggaggctgatgacaactgtcttgtcatggagttcgatgaccaagccactgttgagatcaacagttcaggctgttactccacagtgtgtgtggagctggaccttcagaacctggccgtcaacaccattctccagtctcaccatgtcaacgacatggagggggccgacagcatggggatcagcttcgacgtgatccagcaggcctccctggaggacatgatcacgggtggtcaggctgccagtgccccggccagctacgatgagacagccctgtgctctaacaccttcaggatcctgaagagcatggtcgtgggctgggtgaaggagatcacccagtaccacaacatctatgcagacaaccaggtgatgcacttctaccgctggcttcggtcgccatcctctctgcttcatgaccctgccctgcaccgcacactccacaacatgatgaagaagctcttcctgcagctcatcgctgagttcaagcgcctggggtcatcagtcatctacgccaacttcaaccgcatcatcctctgtacaaagaagcgccgtgtggaagatgccatcgcttacgtggagtacatcaccagcagcatccattcaaaggagaccttccattctctgacaatttctttctctcgatgctgggaatttcttctctggatggatccatctaactatggcggaatcaaaggaaaagtttcatctcgtattcactgtggactgcaagactcccagaaagcagggggagcagaggatgagcaggaaaatgaggacgatgaggaggaaagagatggggaggaggaggaagaggcggaggaatccaacgtggaggatttactggaaaacaactggaacattttgcagtttttgccacaggcagcctcctgccagaactacttcctcatgattgtttcagcgtacatcgtggccgtgtaccactgcatgaaggacgggctgaggcgcagtgctccagggagcacccccgtgaggaggaggggggccagccagctctcccaggaggccgagggggcggtcggagcccttcccggaatgatcaccttctctcaggattatgtcgcaaatgagctcactcagagcttcttcaccatcactcagaagattcagaagaaagtcacaggctctcggaactccactgagctctcagagatgtttcctgtcctccccggttcccacttgctgctcaataaccctgccctggagttcatcaaatacgtgtgcaaggtgctgtccctggacaccaacatcacaaaccaggtgaataagctgaaccgagacctgcttcgcctggtggatgtcggcgagttctccgaggaggcccagttccgagacccctgccgctcctacgtgcttcctgaggtcatctgccgcagctgtaacttctgccgcgacctggacctgtgtaaagactcttccttctcagaggatggggcggtcctgcctcagtggctctgctccaactgtcaggcgccctacgactcctctgccatcgagatgacgctggtggaagttctacagaagaagctgatggccttcaccctgcaggacctggtctgcctgaagtgccgcggggtgaaggagaccagcatgcctgtgtactgcagctgcgcgggagacttcgccctcaccatccacacccaggtcttcatggaacagatcggaatattccggaacattgcccagcactacggcatgtcgtacctcctggagaccctggagtggctgctgcagaagaacccacagctgggccattagccagccccgggccccgggtgcctctgcgtccgtgccaggcctcctgatgccaaggccacatccccgtgcttccagtgaccagaccactgaccaccctgactgtccaaacctgtgaccccaggccagggaacggggaggaaaccaaagaaaaccattttcagggagctcagacgtcacaggagggagcgggagcaggatgtggccctggcctcgccagagcacctgaagaagcaggccgtgagcgaggctgcgagtgccctgggcgccgtttctcacgcagtgaatgcttttccaggcctctgttgcttcctgcaccacacctggtggggtgggagcgtcctctaggtgcccctagttctttgtcctgcctcccagagggaggaaaagcccctgggggcttctggctccctgagattgggctctgagacgagacgggttcccaaggccctggtggggctggagtctcacctgtttgcatggagaaatgggctggccccacagcctcacaggagcagtttgtgggctggtttccccaggaatccagaccctaacccgtgagaatctggattttggcttgtgagccctgcttatttggagccgggtctagagggaaccctctatcagcctcaggaaaacaagacctctgtgcacctcacttttggctcactgcagcccttgtccttcacctccacacaggaccagctggaagcagaaagaagaaaggccaatttcacagggcaccaaacaagtatgaaatgtaaatcagaaatgcagacaccccagacgagagcctcacaggagggagggggccccacaggctccccaggaggctcgtgtctttggcccagagccagccttagtttgtccctgccatctactgtctgaggccatcgctgctacactttgtttttatttgtatttcatactgaagtttc

SEQ ID NO: 167399 - DNA, 8011 bp, Homo sapiens
  Payload ID: 12934
  Gene Symbol: POLE
  Gene Name: polymerase (DNA directed), epsilon, catalytic subunit
  ENST ID: ENST00000537064
  CDS Start-End: 33-965
cccctgaagcagaggtggtagccaacggctccatgtctctgaggagcggcgggcggcggcgcgcggacccaggcgcggatggcgaggccagcagggatgatggcgccacttcctcagtttcggcactcaagcgcctggaacggagtcagtggacggataagatggatttgcggtttggttttgagcggctgaaggagcctggtgagaagacaggctggctcattaacatgcatcctaccgagattttagatgaagataagcgcttaggcagtgcagtggattactactttattcaagatgacggaagcagatttaaggtggctttgccctataaaccgtatttctacattgcgaccagaaagggttgtgagcgagaagtttcatcttttctctccaagaagtttcagggcaaaattgcaaaagtggagactgtccccaaagaggatctggacttgccaaatcacttggtgggtttgaagcgaaattacatcaggctgtccttccacactgtggaggatcttgtcaaagtgaggaaggagatctcccctgccgtgaagaagaacagggagcaggatcacgccagcgacgcgtacacagctctgctttccagtgttctgcagaggggcggtgtcattactgatgaagaggaaacctctaagaagatagctgaccagttggacaacattgtggacatgcgcgagtacgatgttccctaccacatccgcctctccattgacctgaagatccacgtggctcattggtacaatgtcagataccgaggaaatgcttttccggtagaaatcacccgccgagatgaccttgttgaacgacctgaccctgtggttttggcatttgacattgagacgaccaaactgcccctcaagtttcctgatgctgagacagaccagattatgatgatttcctacatgatcgatggccagggagattgtttcagaagatattgaagattttgagttcacccccaagccagaatatgaaggccccttttgtgtcttcaatgaacccgatgaggctcatctgatccaaaggtggtttgaacacgtccaggagaccaaacccaccatcatggtcacctacaacggggacttttttgactggccatttgtggaggcccgggcagcagtccacggtctgagcatgcagcaggagataggcttccagaaggacagccagggggagtacaaggcgccccagtgcatccacatggactgcctcaggtgggtgaagagggacagttaccttcctgtgggcagtcataatctcaaggcggccgccaaggccaagctaggctatgatcccgtggagctagacccggaggacatgtgccggatggccacggagcagccccagactctggccacgtattctgtgtcagatgctgtcgccacttactacctgtacatgaagtacgtccacccattcatctttgctctgtgcaccattattcccatggagcccgacgaggtgctgcggaagggctctggcactctgtgtgaggccttgctgatggtgcaggccttccacgccaacatcatcttccccaacaagcaagagcaggagttcaataagctgacggacgacggacacgtgctggactctgagacctacgtcgggggccacgtggaggccctcgagtctggggttttccgcagcgatatcccttgccggtttaggatgaatcctgccgcctttgacttcctgctgcagcgggttgagaagaccttgcgccacgcccttgaggaagaggagaaagtgcctgtggagcaagtcaccaactttgaagaggtgtgtgatgagattaagagcaagcttgcctccctgaaggacgttcccagccgcatcgagtgtccactcatctaccacctggacgtgggggccatgtaccccaacatcatcctgaccaaccgcctgcagccctctgccatggtggacgaagccacctgtgctgcctgtgacttcaataagcctggagcaaactgccagcggaagatggcctggcagtggaggggcgagttcatgccagccagtcgcagcgaataccatcggatccagcaccagctggagtcagagaagttcccccccttgttcccagaggggccagctcgggcctttcatgaactgtcccgcgaggaacaggcgaaatacgagaagagaaggctggcggattactgccggaaagcctacaagaagatccacatcaccaaggtggaagagcgtctcaccaccatctgccagcgggaaaactccttctacgtggacaccgtgcgtgccttccgggacaggcgttacgagttcaaagggctccacaaggtgtggaaaaagaagctctcggcggccgtggaggtgggcgacgcggctgaggtgaagcgctgcaagaacatggaggtgctgtatgactcgctgcagctggcccacaagtgcatcctgaactccttctatggctatgtcatgcgcaagggggctcgctggtactccatggagatggctggcatcgtctgcttcacaggggccaacatcatcacccaggcacgggagctgatcgagcagattgggaggcccttagagctggacacagatggtatatggtgcgtcctgcccaacagcttcccagaaaattttgtcttcaagacgaccaatgtgaagaagcccaaagtgaccatctcctacccaggcgccatgttgaacatcatggtcaaggaaggcttcaccaatgaccagtaccaggagctggctgagccgtcctcactcacctacgtcacccgctcagagaacagcatcttttttgaggttgatgggccctaccttgccatgattcttccagcctccaaggaagaaggcaagaaattgaagaagaggtatgctgtgttcaatgaagacggttctctggctgagctcaagggctttgaggtcaaacgccgcggggaactgcagctgattaagatcttccaatcctcggtgtttgaggccttcctcaagggcagcacgctggaagaggtgtatggctctgtagccaaggtggctgactactggctggacgtgctgtacagcaaggcagccaacatgcctgactctgagctattcgagctcatctctgagaaccgttccatgtctcggaagctggaagattacggggagcagaagtctacgtccatcagcacagcaaagcgcctggccgagttcctgggagaccagatggtcaaggatgcagggctgagttgccgctacatcatctcccgcaagcccgagggctcccctgtcacggagaggtctccttatgtttgcagtattcaccacagatgtttcctccagtgaaagggaagcactgacggttgccagttgctttgctagtgacatgaaaacaggctcgttttttctagaaagcagcctgagtcttctgtgtgttactcagcaaggaacatgtagacatggttatgaacgtgcacgtttgcctgtatgcatgcacgtggttactcagaaacgcagacatgtttacgcacacacgcatgtctttgcctatacgcatgcgcgtggttactcagaaacgtagacatgtttacgcacgcatgcgtttatgtatgtgcatgcacatggttatgccgtgagaaacatgtagacatagttacgaacatgcacgtgtttgcctgtacgcatgcacgtggttactcaatgagaaacgcagacatgtctacgcacacgcatgtgtttatgtatatgcatgcccatggttacgctgtgaggaacatgtagacatgtttacgtgcacacacgcacgtgtttacacatacgcacgtgttactccccgaggaacctgtaggcatgtttgtgcatacatatgcacgcagatgtatacattgatgtttgtgaacagctgttacacgtccttatttccatgttcatttgataagagttaggatcagattttgggtgattttcactgttactgagctgtgtgcctgtcttccttacccagggccatcccacttgccattttccaagcagagcccacggtgaggaagcactttctccggaaatggctcaagagctcttcccttcaagactttgatattcgagcaattctggattgggactactacattgagcggctgggaagcgccatccagaagatcatcaccatccctgcggccctgcagcaggtaaagaacccagtgccacgtgtcaaacaccccgactggctgcacaaaaaactgctggagaagaatgatgtctacaagcagaagaagatcagtgagctcttcaccctggagggcaggagacaggtcacgatggccgaggcctcagaagacagtccgaggccaagtgctcctgacatggaggacttcggcctcgtaaagctgcctcacccagcagcccctgtcactgtgaagaggaagcgagttctttgggagagccaggaggagtcccaggacctcacgccgactgtgccctggcaggaaatcttggggcagcctcccgccctgggaaccagccaggaggaatggcttgtctggctccggttccacaagaagaagtggcagctgcaggcccggcagcgcctcgcccgcaggaagaggcagcgtctggagtcggcagagggtgtgctcaggcccggggccatccgggatggtcctgccacggggctggggagcttcttgcgaagaactgcccgcagcatcctggaccttccgtggcagattgtgcagatcagcgagaccagccaggccggcctgttcaggctgtgggcgctcgttggcagtgacttgcactgcatcaggctgagcatcccccgtgtgttctacgtgaaccagcgagtcgctaaagcggaggagggtgcttcgtatcgcaaggtaaatcgggtccttcctcgctccaacatggtctacaatctctatgagtattcagtgccagaggacatgtaccaggaacacatcaacgagatcaacgctgagctgtcagcgccagacatcgagggcgtatatgagactcaggttccgttactgttccgggccctggtgcacctgggctgtgtgtgtgtggtcaataaacagctggtgaggcacctttcaggctgggaagcagagacctttgctcttgagcacctggagatgcgctctctggcccagttcagctacctggaaccagggagtatccgccatatctacctgtaccaccacgcacaggcccacaaagcgctcttcgggatcttcatcccctcacagcgcagggcatccgtctttgtgctggacactgtgcgcagcaaccagatgcccagccttggcgccctgtactcagcagagcacggcctcctcctggagaaggtgggccctgagctcctgccaccccccaaacacaccttcgaagttcgggcagaaactgacctgaagaccatctgcagagccatccagcgattcctgctcgcctacaaggaggagcgccgggggcccacactcatcgctgttcagtccagctgggagctgaagaggctggccagtgaaattcctgtcttggaggaattcccactggtgcctatctgtgtggctgacaagatcaactatggggtcctggactggcagcgccatggagcccggcgcatgatccgtcactacctcaacctggacacctgcctgtcgcaggccttcgagatgagcaggtactttcacattcccattgggaacctaccagaggacatctccacattcggctccgacctcttctttgcccgccacctccagcgccacaaccacctgctctggctgtcccctacagcccgccctgacctgggtggaaaggaggctgatgacaactgtcttgtcatggagttcgatgaccaagccactgttgagatcaacagttcaggctgttactccacagtgtgtgtggagctggaccttcagaacctggccgtcaacaccattctccagtctcaccatgtcaacgacatggagggggccgacagcatggggatcagcttcgacgtgatccagcaggcctccctggaggacatgatcacgggtggtcaggctgccagtgccccggccagctacgatgagacagccctgtgctctaacaccttcaggatcctgaagagcatggtcgtgggctgggtgaaggagatcacccagtaccacaacatctatgcagacaaccaggtgatgcacttctaccgctggcttcggtcgccatcctctctgcttcatgaccctgccctgcaccgcacactccacaacatgatgaagaagctcttcctgcagctcatcgctgagttcaagcgcctggggtcatcagtcatctacgccaacttcaaccgcatcatcctctgtacaaagaagcgccgtgtggaagatgccatcgcttacgtggagtacatcaccagcagcatccattcaaaggagaccttccattctctgacaatttctttctctcgatgctgggaatttcttctctggatggatccatctaactatggcggaatcaaaggaaaagtttcatctcgtattcactgtggactgcaagactcccagaaagcagggggagcagaggatgagcaggaaaatgaggacgatgaggaggaaagagatggggaggaggaggaagaggcggaggaatccaacgtggaggatttactggaaaacaactggaacattttgcagtttttgccacaggcagcctcctgccagaactacttcctcatgattgtttcagcgtacatcgtggccgtgtaccactgcatgaaggacgggctgaggcgcagtgctccagggagcacccccgtgaggaggaggggggccagccagctctcccaggaggccgagggggcggtcggagcccttcccggaatgatcaccttctctcaggattatgtcgcaaatgagctcactcagagcttcttcaccatcactcagaagattcagaagaaagtcacaggctctcggaactccactgagctctcagagatgtttcctgtcctccccggttcccacttgctgctcaataaccctgccctggagttcatcaaatacgtgtgcaaggtgctgtccctggacaccaacatcacaaaccaggtgaataagctgaaccgagacctgcttcgcctggtggatgtcggcgagttctccgaggaggcccagttccgagacccctgccgctcctacgtgcttcctgaggtcatctgccgcagctgtaacttctgccgcgacctggacctgtgtaaagactcttccttctcagaggatggggcggtcctgcctcagtggctctgctccaactgtcaggcgccctacgactcctctgccatcgagatgacgctggtggaagttctacagaagaagctgatggccttcaccctgcaggacctggtctgcctgaagtgccgcggggtgaaggagaccagcatgcctgtgtactgcagctgcgcgggagacttcgccctcaccatccacacccaggtcttcatggaacagatcggaatattccggaacattgcccagcactacggcatgtcgtacctcctggagaccctggagtggctgctgcagaagaacccacagctgggccattagccagccccgggccccgggtgcctctgcgtccgtgccaggcctcctgatgccaaggccacatccccgtgcttccagtgaccagaccactgaccaccctgactgtccaaacctgtgaccccaggccagggaacggggaggaaaccaaagaaaaccattttcagggagctcagacgtcacaggagggagcgggagcaggatgtggccctggcctcgccagagcacctgaagaagcaggccgtgagcgaggctgcgagtgccctgggcgccgtttctcacgcagtgaatgcttttccaggcctctgttgcttcctgcaccacacctggtggggtgggagcgtcctctaggtgcccctagttctttgtcctgcctcccagagggaggaaaagcccctgggggcttctggctccctgagattgggctctgagacgagacg

SEQ ID NO: 167400 - DNA, 6800 bp, Homo sapiens
  Payload ID: 12934
  Gene Symbol: POLE
  Gene Name: polymerase (DNA directed), epsilon, catalytic subunit
  ENST ID: ENST00000535270
  CDS Start-End: 14-6793
agccaacggctccatgtctctgaggagcggcgggcggcggcgcgcggacccaggcgcggatggcgaggccagcagggatgatggcgccacttcctcagtttcggcactcaagcgcctggaacggagtcagtggacggataagatggatttgcggtttggttttgagcggctgaaggagcctggtgagaagacaggctggctcattaacatgcatcctgtggctttgccctataaaccgtatttctacattgcgaccagaaagggttgtgagcgagaagtttcatcttttctctccaagaagtttcagggcaaaattgcaaaagtggagactgtccccaaagaggatctggacttgccaaatcacttggtgggtttgaagcgaaattacatcaggctgtccttccacactgtggaggatcttgtcaaagtgaggaaggagatctcccctgccgtgaagaagaacagggagcaggatcacgccagcgacgcgtacacagctctgctttccagtgttctgcagaggggcggtgtcattactgatgaagaggaaacctctaagaagatagctgaccagttggacaacattgtggacatgcgcgagtacgatgttccctaccacatccgcctctccattgacctgaagatccacgtggctcattggtacaatgtcagataccgaggaaatgcttttccggtagaaatcacccgccgagatgaccttgttgaacgacctgaccctgtggttttggcatttgacattgagacgaccaaactgcccctcaagtttcctgatgctgagacagaccagattatgatgatttcctacatgatcgatggccagggctacctcatcaccaacagggagattgtttcagaagatattgaagattttgagttcacccccaagccagaatatgaaggccccttttgtgtcttcaatgaacccgatgaggctcatctgatccaaaggtggtttgaacacgtccaggagaccaaacccaccatcatggtcacctacaacggggacttttttgactggccatttgtggaggcccgggcagcagtccacggtctgagcatgcagcaggagataggcttccagaaggacagccagggggagtacaaggcgccccagtgcatccacatggactgcctcaggtgggtgaagagggacagttaccttcctgtgggcagtcataatctcaaggcggccgccaaggccaagctaggctatgatcccgtggagctagacccggaggacatgtgccggatggccacggagcagccccagactctggccacgtattctgtgtcagatgctgtcgccacttactacctgtacatgaagtacgtccacccattcatctttgctctgtgcaccattattcccatggagcccgacgaggtgctgcggaagggctctggcactctgtgtgaggccttgctgatggtgcaggccttccacgccaacatcatcttccccaacaagcaagagcaggagttcaataagctgacggacgacggacacgtgctggactctgagacctacgtcgggggccacgtggaggccctcgagtctggggttttccgcagcgatatcccttgccggtttaggatgaatcctgccgcctttgacttcctgctgcagcgggttgagaagaccttgcgccacgcccttgaggaagaggagaaagtgcctgtggagcaagtcaccaactttgaagaggtgtgtgatgagattaagagcaagcttgcctccctgaaggacgttcccagccgcatcgagtgtccactcatctaccacctggacgtgggggccatgtaccccaacatcatcctgaccaaccgcctgcagccctctgccatggtggacgaagccacctgtgctgcctgtgacttcaataagcctggagcaaactgccagcggaagatggcctggcagtggaggggcgagttcatgccagccagtcgcagcgaataccatcggatccagcaccagctggagtcagagaagttcccccccttgttcccagaggggccagctcgggcctttcatgaactgtcccgcgaggaacaggcgaaatacgagaagagaaggctggcggattactgccggaaagcctacaagaagatccacatcaccaaggtggaagagcgtctcaccaccatctgccagcgggaaaactccttctacgtggacaccgtgcgtgccttccgggacaggcgttacgagttcaaagggctccacaaggtgtggaaaaagaagctctcggcggccgtggaggtgggcgacgcggctgaggtgaagcgctgcaagaacatggaggtgctgtatgactcgctgcagctggcccacaagtgcatcctgaactccttctatggctatgtcatgcgcaagggggctcgctggtactccatggagatggctggcatcgtctgcttcacaggggccaacatcatcacccaggcacgggagctgatcgagcagattgggaggcccttagagctggacacagatggtatatggtgcgtcctgcccaacagcttcccagaaaattttgtcttcaagacgaccaatgtgaagaagcccaaagtgaccatctcctacccaggcgccatgttgaacatcatggtcaaggaaggcttcaccaatgaccagtaccaggagctggctgagccgtcctcactcacctacgtcacccgctcagagaacagcatcttttttgaggttgatgggccctaccttgccatgattcttccagcctccaaggaagaaggcaagaaattgaagaagaggtatgctgtgttcaatgaagacggttctctggctgagctcaagggctttgaggtcaaacgccgcggggaactgcagctgattaagatcttccaatcctcggtgtttgaggccttcctcaagggcagcacgctggaagaggtgtatggctctgtagccaaggtggctgactactggctggacgtgctgtacagcaaggcagccaacatgcctgactctgagctattcgagctcatctctgagaaccgttccatgtctcggaagctggaagattacggggagcagaagtctacgtccatcagcacagcaaagcgcctggccgagttcctgggagaccagatggtcaaggatgcagggctgagttgccgctacatcatctcccgcaagcccgagggctcccctgtcacggagagggccatcccacttgccattttccaagcagagcccacggtgaggaagcactttctccggaaatggctcaagagctcttcccttcaagactttgatattcgagcaattctggattgggactactacattgagcggctgggaagcgccatccagaagatcatcaccatccctgcggccctgcagcaggtaaagaacccagtgccacgtgtcaaacaccccgactggctgcacaaaaaactgctggagaagaatgatgtctacaagcagaagaagatcagtgagctcttcaccctggagggcaggagacaggtcacgatggccgaggcctcagaagacagtccgaggccaagtgctcctgacatggaggacttcggcctcgtaaagctgcctcacccagcagcccctgtcactgtgaagaggaagcgagttctttgggagagccaggaggagtcccaggacctcacgccgactgtgccctggcaggaaatcttggggcagcctcccgccctgggaaccagccaggaggaatggcttgtctggctccggttccacaagaagaagtggcagctgcaggcccggcagcgcctcgcccgcaggaagaggcagcgtctggagtcggcagagggtgtgctcaggcccggggccatccgggatggtcctgccacggggctggggagcttcttgcgaagaactgcccgcagcatcctggaccttccgtggcagattgtgcagatcagcgagaccagccaggccggcctgttcaggctgtgggcgctcgttggcagtgacttgcactgcatcaggctgagcatcccccgtgtgttctacgtgaaccagcgagtcgctaaagcggaggagggtgcttcgtatcgcaaggtaaatcgggtccttcctcgctccaacatggtctacaatctctatgagtattcagtgccagaggacatgtaccaggaacacatcaacgagatcaacgctgagctgtcagcgccagacatcgagggcgtatatgagactcaggttccgttactgttccgggccctggtgcacctgggctgtgtgtgtgtggtcaataaacagctggtgaggcacctttcaggctgggaagcagagacctttgctcttgagcacctggagatgcgctctctggcccagttcagctacctggaaccagggagtatccgccatatctacctgtaccaccacgcacaggcccacaaagcgctcttcgggatcttcatcccctcacagcgcagggcatccgtctttgtgctggacactgtgcgcagcaaccagatgcccagccttggcgccctgtactcagcagagcacggcctcctcctggagaaggtgggccctgagctcctgccaccccccaaacacaccttcgaagttcgggcagaaactgacctgaagaccatctgcagagccatccagcgattcctgctcgcctacaaggaggagcgccgggggcccacactcatcgctgttcagtccagctgggagctgaagaggctggccagtgaaattcctgtcttggaggaattcccactggtgcctatctgtgtggctgacaagatcaactatggggtcctggactggcagcgccatggagcccggcgcatgatccgtcactacctcaacctggacacctgcctgtcgcaggccttcgagatgagcaggtactttcacattcccattgggaacctaccagaggacatctccacattcggctccgacctcttctttgcccgccacctccagcgccacaaccacctgctctggctgtcccctacagcccgccctgacctgggtggaaaggaggctgatgacaactgtcttgtcatggagttcgatgaccaagccactgttgagatcaacagttcaggctgttactccacagtgtgtgtggagctggaccttcagaacctggccgtcaacaccattctccagtctcaccatgtcaacgacatggagggggccgacagcatggggatcagcttcgacgtgatccagcaggcctccctggaggacatgatcacgggtggtcaggctgccagtgccccggccagctacgatgagacagccctgtgctctaacaccttcaggatcctgaagagcatggtcgtgggctgggtgaaggagatcacccagtaccacaacatctatgcagacaaccaggtgatgcacttctaccgctggcttcggtcgccatcctctctgcttcatgaccctgccctgcaccgcacactccacaacatgatgaagaagctcttcctgcagctcatcgctgagttcaagcgcctggggtcatcagtcatctacgccaacttcaaccgcatcatcctctgtacaaagaagcgccgtgtggaagatgccatcgcttacgtggagtacatcaccagcagcatccattcaaaggagaccttccattctctgacaatttctttctctcgatgctgggaatttcttctctggatggatccatctaactatggcggaatcaaaggaaaagtttcatctcgtattcactgtggactgcaagactcccagaaagcagggggagcagaggatgagcaggaaaatgaggacgatgaggaggaaagagatggggaggaggaggaagaggcggaggaatccaacgtggaggatttactggaaaacaactggaacattttgcagtttttgccacaggcagcctcctgccagaactacttcctcatgattgtttcagcgtacatcgtggccgtgtaccactgcatgaaggacgggctgaggcgcagtgctccagggagcacccccgtgaggaggaggggggccagccagctctcccaggaggccgagggggcggtcggagcccttcccggaatgatcaccttctctcaggattatgtcgcaaatgagctcactcagagcttcttcaccatcactcagaagattcagaagaaagtcacaggctctcggaactccactgagctctcagagatgtttcctgtcctccccggttcccacttgctgctcaataaccctgccctggagttcatcaaatacgtgtgcaaggtgctgtccctggacaccaacatcacaaaccaggtgaataagctgaaccgagacctgcttcgcctggtggatgtcggcgagttctccgaggaggcccagttccgagacccctgccgctcctacgtgcttcctgaggtcatctgccgcagctgtaacttctgccgcgacctggacctgtgtaaagactcttccttctcagaggatggggcggtcctgcctcagtggctctgctccaactgtcaggcgccctacgactcctctgccatcgagatgacgctggtggaagttctacagaagaagctgatggccttcaccctgcaggacctggtctgcctgaagtgccgcggggtgaaggagaccagcatgcctgtgtactgcagctgcgcgggagacttcgccctcaccatccacacccaggtcttcatggaacagatcggaatattccggaacattgcccagcactacggcatgtcgtacctcctggagaccctggagtggctgctgcagaagaacccacagctgggccattagccagccc

SEQ ID NO: 167401 - DNA, 659 bp, Homo sapiens
  Payload ID: 12934
  Gene Symbol: POLE
  Gene Name: polymerase (DNA directed), epsilon, catalytic subunit
  ENST ID: ENST00000544870
  CDS Start-End: 1-451
ttctctgacaatttctttctctcgatgctgggaatttcttctctggatggatccatctaactatggcggaatcaaaggaaaagtttcatctcgtattcactgtggactgcaagactcccagaaagcagggggagcagaggatgagcaggaaaatgaggacgatgaggaggaaagagatggggaggaggaggaagaggcggaggaatccaacgtggaggatttactggaaaacaactggaacattttgcagtttttgccacaggcagcctcctgccagaactacttcctcatgattgtttcagcgtacatcgtggccgtgtaccactgcatgaaggacgggctgaggcgcagtgctccagggagcacccccgtgaggaggaggggggccagccagctctcccaggaggccgagggggcggtcggagcccttcccggattatgtcgcaaatgagctcactcagagcttcttcaccatcactcagaagattcagaagaaagtcacaggctctcggaactccactgagctctcagagatgtttcctgtcctccccggttcccacttgctgctcaataaccctgccctggagttcatcaaatacgtgtgcaaggtgctgtccctggacaccaacatcacaaaccaggtgaataagctgaaccga

SEQ ID NO: 167402 - DNA, 556 bp, Homo sapiens
  Payload ID: 12934
  Gene Symbol: POLE
  Gene Name: polymerase (DNA directed), epsilon, catalytic subunit
  ENST ID: ENST00000441786
  CDS Start-End: 1-464
caatttctttctctcgatgctgggaatttcttctctggatggatccatctaactatggcggaatcaaaggaaaagtttcatctcgtattcactgtggactgcaagactcccagaaagcagggggagcagaggatgagcaggaaaatgaggacgatgaggaggaaagagatggggaggaggaggaagaggcggaggaatccaacgtggaggatttactggaaaacaactggaacattttgcagtttttgccacaggcagcctcctgccagaactacttcctcatgattgtttcagcgtacatcgtggccgtgtaccactgcatgaaggacgggctgaggcgcagtgctccagggagcacccccgtgaggaggaggggggccagccagctctcccaggaggccgagggggcggtcggagcccttcccgattcagaagaaagtcacaggctctcggaactccactgagctctcagagatgtttcctgtcctccccggttcccacttgctgctcaataaccctgccctggagttcatcaaatacgtgtgcaaggtgctgt

SEQ ID NO: 167403 - DNA, 3322 bp, Homo sapiens
  Payload ID: 12935
  Gene Symbol: POLH
  Gene Name: polymerase (DNA directed), eta
  Uniprot ID: Q9Y253
  ENST ID: ENST00000372226
  CDS Start-End: 149-1393
ataaatctcgctcgaaactcactggaccgctcctagaaaggcgaaaagatattcaggagcccttccattttccttccagtaggcaccgaacccagcattttcggcaaccgctgctggcagttttgccaggtgtttgttaccttgaaaaatggctactggacaggatcgagtggttgctctcgtggacatggactgtttttttgttcaagtggagcagcggcaaaatcctcatttgaggaataaaccttgtgcagttgtacagtacaaatcatggaagggtggtggaataattgcagtgagttatgaagctcgtgcatttggagtcactagaagtatgtgggcagatgatgctaagaagttatgtccagatcttctactggcacaagttcgtgagtcccgtgggaaagctaacctcaccaagtaccgggaagccagtgttgaagtgatggagataatgtctcgttttgctgtgattgaacgtgccagcattgatgaggcttacgtagatctgaccagtgctgtacaagagagactacaaaagctacaaggtcagcctatctcggcagacttgttgccaagcacttacattgaagggttgccccaaggccctacaacggcagaagagactgttcagaaagaggggatgcgaaaacaaggcttatttcaatggctcgattctcttcagattgataacctcacctctccagacctgcagctcaccgtgggagcagtgattgtggaggaaatgagagcagccatagagagggagactggttttcagtgttcagctggaatttcacacaataaggtcctggcaaaactggcctgtggactaaacaagcccaaccgccaaaccctggtttcacatgggtcagtcccacagctcttcagccaaatgcccattcgcaaaatccgtagtcttggaggaaagctaggggcctctgtcattgagatcctagggatagaatacatgggtgaactgacccagttcactgaatcccagctccagagtcattttggggagaagaatgggtcttggctatatgccatgtgccgagggattgaacatgatccagttaaacccaggcaactacccaaaaccattggctgtagtaagaacttcccaggaaaaacagctcttgctactcgggaacaggtacaatggtggctgttgcaattagcccaggaactagaggagagactgactaaagaccgaaatgataatgacagggtagccacccagctggttgtgagcattcgtgtacaaggagacaaacgcctcagcagcctgcgccgctgctgtgcccttacccgctatgatgctcacaagatgagccatgatgcatttactgtcatcaagaactgtaatacttctggaatccagacagaatgacatcaccagcttcttgagcagtgacccaagttctctgccaaaggtgccagttaccagctcagaagctaagacccagggaagtggcccagcggtgacagccactaagaaagcaaccacgtctctggaatcattcttccaaaaagctgcagaaaggcagaaagttaaagaagcttcgctttcatctcttactgctcccactcaggctcccatgagcaattcaccatccaagccctcattaccttttcaaaccagtcaaagtacaggaactgagcccttctttaagcagaaaagtctgcttctaaagcagaaacagcttaataattcttcagtttcttccccccaacaaaacccatggtccaactgtaaagcattaccaaactctttaccaacagagtatccagggtgtgtccctgtttgtgaaggggtgtcgaagctagaagaatcctctaaagcaactcctgcagagatggatttggcccacaacagccaaagcatgcacgcctcttcagcttccaaatctgtgctggaggtgactcagaaagcaaccccaaatccaagtcttctagctgctgaggaccaagtgccctgtgagaagtgtggctccctggtaccggtatgggatatgccagaacacatggactatcattttgcattggagttgcagaaatcctttttgcagccccactcttcaaacccccaggttgtttctgccgtatctcatcaaggcaaaagaaatcccaagagccctttggcctgcactaataaacgccccaggcctgagggcatgcaaacattggaatcattttttaagccattaacacattagtgctgccctcaggcttgcctgtaggatttaatattttttatctttacagatctttatctttaatattttatctttacagatttccctgagaaagggaattatgaaatttttaatacaaaaaataatccatttaggtgctgagttacggtcccatctcttcacaggcatggattctaatcccactgctgacagagatgtaaaaattcatcctaccagagtttttaatctttagcatttagggaggcagtgtcataaagtaaaaagtgtgtgggccttggagtctaagagacgtggttgcaaacttagctctggttattgcaatgagggccttgaacaagtcattttcttcacattctcatctgtaaaatggagataataccttacagattattgcagattaataacaatgtattcaaattatgtaactcggccgggtacaatggctcacgcctgtaatcctaacactttgggaggccgaggcagacagatcacctgaggtcaggagtttgagaccagcctggccaacatggcaaaaccatctctactaaaaatagaaaaattagccaggcacgttccaggcacctgtgatcccagctacttagaggctgaggcagaagaattgctttaaccttggaggcggaggttgcattgagctgagatcatgctagtgcgctccagcctgggcaacagagcgagacttcatctcagaaaataaaaaataggggccaggcacagtggctcatacctgtaatgccagcactttgggaggccaaggcgggcagatcacgaggtcaggagtttcagaccaatatggtgaaaccccatctctactaaaattacaaaaaaaattatccaggcgtggtggtgcacgcctgtaatcccagctactcaggaggctaaggcaggagaatcacttgaacccaggaggcagaggttggagtgagctgagatcgcgccaccgcactccagcctgggcaacagagcgagactccatctcaaacaaaaacaagaacaaaaacaaacataaagttggcacagaaaagggaccaagtttaaaaaagggttttaaatgtaatgagacttgcatagttaaaaaaaaaaaa

SEQ ID NO: 167404 - DNA, 3540 bp, Homo sapiens
  Payload ID: 12935
  Gene Symbol: POLH
  Gene Name: polymerase (DNA directed), eta
  Uniprot ID: Q9Y253
  ENST ID: ENST00000372236
  CDS Start-End: 296-2437
aacggcccttcgcagcgggcgcgctgtcagacctcagtctggcggctgcattgctgggcgcgccgctctcgtctgatccctgctggggacggttgcccgggcaggatcctttacgatcccttctcggtttctccgtcgtcacagggaataaatctcgctcgaaactcactggaccgctcctagaaaggcgaaaagatattcaggagcccttccattttccttccagtaggcaccgaacccagcattttcggcaaccgctgctggcagttttgccaggtgtttgttaccttgaaaaatggctactggacaggatcgagtggttgctctcgtggacatggactgtttttttgttcaagtggagcagcggcaaaatcctcatttgaggaataaaccttgtgcagttgtacagtacaaatcatggaagggtggtggaataattgcagtgagttatgaagctcgtgcatttggagtcactagaagtatgtgggcagatgatgctaagaagttatgtccagatcttctactggcacaagttcgtgagtcccgtgggaaagctaacctcaccaagtaccgggaagccagtgttgaagtgatggagataatgtctcgttttgctgtgattgaacgtgccagcattgatgaggcttacgtagatctgaccagtgctgtacaagagagactacaaaagctacaaggtcagcctatctcggcagacttgttgccaagcacttacattgaagggttgccccaaggccctacaacggcagaagagactgttcagaaagaggggatgcgaaaacaaggcttatttcaatggctcgattctcttcagattgataacctcacctctccagacctgcagctcaccgtgggagcagtgattgtggaggaaatgagagcagccatagagagggagactggttttcagtgttcagctggaatttcacacaataaggtcctggcaaaactggcctgtggactaaacaagcccaaccgccaaaccctggtttcacatgggtcagtcccacagctcttcagccaaatgcccattcgcaaaatccgtagtcttggaggaaagctaggggcctctgtcattgagatcctagggatagaatacatgggtgaactgacccagttcactgaatcccagctccagagtcattttggggagaagaatgggtcttggctatatgccatgtgccgagggattgaacatgatccagttaaacccaggcaactacccaaaaccattggctgtagtaagaacttcccaggaaaaacagctcttgctactcgggaacaggtacaatggtggctgttgcaattagcccaggaactagaggagagactgactaaagaccgaaatgataatgacagggtagccacccagctggttgtgagcattcgtgtacaaggagacaaacgcctcagcagcctgcgccgctgctgtgcccttacccgctatgatgctcacaagatgagccatgatgcatttactgtcatcaagaactgtaatacttctggaatccagacagaatggtctcctcctctcacaatgcttttcctctgtgctacaaaattttctgcctctgccccttcatcttctacagacatcaccagcttcttgagcagtgacccaagttctctgccaaaggtgccagttaccagctcagaagctaagacccagggaagtggcccagcggtgacagccactaagaaagcaaccacgtctctggaatcattcttccaaaaagctgcagaaaggcagaaagttaaagaagcttcgctttcatctcttactgctcccactcaggctcccatgagcaattcaccatccaagccctcattaccttttcaaaccagtcaaagtacaggaactgagcccttctttaagcagaaaagtctgcttctaaagcagaaacagcttaataattcttcagtttcttccccccaacaaaacccatggtccaactgtaaagcattaccaaactctttaccaacagagtatccagggtgtgtccctgtttgtgaaggggtgtcgaagctagaagaatcctctaaagcaactcctgcagagatggatttggcccacaacagccaaagcatgcacgcctcttcagcttccaaatctgtgctggaggtgactcagaaagcaaccccaaatccaagtcttctagctgctgaggaccaagtgccctgtgagaagtgtggctccctggtaccggtatgggatatgccagaacacatggactatcattttgcattggagttgcagaaatcctttttgcagccccactcttcaaacccccaggttgtttctgccgtatctcatcaaggcaaaagaaatcccaagagccctttggcctgcactaataaacgccccaggcctgagggcatgcaaacattggaatcattttttaagccattaacacattagtgctgccctcaggcttgcctgtaggatttaatattttttatctttacagatctttatctttaatattttatctttacagatttccctgagaaagggaattatgaaatttttaatacaaaaaataatccatttaggtgctgagttacggtcccatctcttcacaggcatggattctaatcccactgctgacagagatgtaaaaattcatcctaccagagtttttaatctttagcatttagggaggcagtgtcataaagtaaaaagtgtgtgggccttggagtctaagagacgtggttgcaaacttagctctggttattgcaatgagggccttgaacaagtcattttcttcacattctcatctgtaaaatggagataataccttacagattattgcagattaataacaatgtattcaaattatgtaactcggccgggtacaatggctcacgcctgtaatcctaacactttgggaggccgaggcagacagatcacctgaggtcaggagtttgagaccagcctggccaacatggcaaaaccatctctactaaaaatagaaaaattagccaggcacgttccaggcacctgtgatcccagctacttagaggctgaggcagaagaattgctttaaccttggaggcggaggttgcattgagctgagatcatgctagtgcgctccagcctgggcaacagagcgagacttcatctcagaaaataaaaaataggggccaggcacagtggctcatacctgtaatgccagcactttgggaggccaaggcgggcagatcacgaggtcaggagtttcagaccaatatggtgaaaccccatctctactaaaattacaaaaaaaattatccaggcgtggtggtgcacgcctgtaatcccagctactcaggaggctaaggcaggagaatcacttgaacccaggaggcagaggttggagtgagctgagatcgcgccaccgcactccagcctgggcaacagagcgagactccatctcaaacaaaaacaagaacaaaaacaaacataaagttggcacagaaaagggaccaagtttaaaaaagggttttaaatgtaatgagacttgcatagttaaaaaaaaaaaa

SEQ ID NO: 167405 - DNA, 331 bp, Homo sapiens
  Payload ID: 12935
  Gene Symbol: POLH
  Gene Name: polymerase (DNA directed), eta
  ENST ID: ENST00000443535
  CDS Start-End: 117-331
agtaggcaccgaacccagcattttcggcaaccgctgctggcagttttgccaggtgtttgttaccttgaataattgcagtgagttatgaagctcgtgcatttggagtcactagaagtatgtgggcagatgatgctaagaagttatgtccagatcttctactggcacaagttcgtgagtcccgtgggaaagctaacctcaccaagtaccgggaagccagtgttgaagtgatggagataatgtctcgttttgctgtgattgaacgtgccagcattgatgaggcttacgtagatctgaccagtgctgtacaagagagactacaaaagctacaagg

SEQ ID NO: 167406 - DNA, 4500 bp, Homo sapiens
  Payload ID: 12936
  Gene Symbol: POLG
  Gene Name: polymerase (DNA directed), gamma
  Uniprot ID: P54098
  ENST ID: ENST00000268124
  CDS Start-End: 335-4054
gtagccgcgggacctagctgggtgcagacgggaagttgcggctgccagcgaagcggaccggccgggtggaggccacacgctaccccgaggctgcgtaggccgcgcgaagggggacgccgtgccgtgggcctggggtcgggggagcagcagaccgggaagcaccgtgaggaccgaggatttggggtggaaggcaggcatggtcaaacccatttcactgacaggagagcagagacaggacgtgtctctctccacgtcttccagccagtaaaagaagccaagctggagcccaaagccaggtgttctgactcccagcgtgggggtccctgcaccaaccatgagccgcctgctctggaggaaggtggccggcgccaccgtcgggccagggccggttccagctccggggcgctgggtctccagctccgtccccgcgtccgaccccagcgacgggcagcggcggcggcagcagcagcagcagcagcagcagcagcagcaacagcagcctcagcagccgcaagtgctatcctcggagggcgggcagctgcggcacaacccattggacatccagatgctctcgagagggctgcacgagcaaatcttcgggcaaggaggggagatgcctggcgaggccgcggtgcgccgcagcgtcgagcacctgcagaagcacgggctctgggggcagccagccgtgcccttgcccgacgtggagctgcgcctgccgcccctctacggggacaacctggaccagcacttccgcctcctggcccagaagcagagcctgccctacctggaggcggccaacttgctgttgcaggcccagctgcccccgaagcccccggcttgggcctgggcggagggctggacccggtacggccccgagggggaggccgtacccgtggccatccccgaggagcgggccctggtgttcgacgtggaggtctgcttggcagagggaacttgccccacattggcggtggccatatccccctcggcctggtattcctggtgcagccagcggctggtggaagagcgttactcttggaccagccagctgtcgccggctgacctcatccccctggaggtccctactggtgccagcagccccacccagagagactggcaggagcagttagtggtggggcacaatgtttcctttgaccgagctcatatcagggagcagtacctgatccagggttcccgcatgcgtttcctggacaccatgagcatgcacatggccatctcagggctaagcagcttccagcgcagtctgtggatagcagccaagcagggcaaacacaaggtccagccccccacaaagcaaggccagaagtcccagaggaaagccagaagaggcccagcgatctcatcctgggactggctggacatcagcagtgtcaacagtctggcagaggtgcacagactttatgtaggggggcctcccttagagaaggagcctcgagaactgtttgtgaagggcaccatgaaggacattcgtgagaacttccaggacctgatgcagtactgtgcccaggacgtgtgggccacccatgaggttttccagcagcagctaccgctcttcttggagaggtgtccccacccagtgactctggccggcatgctggagatgggtgtctcctacctgcctgtcaaccagaactgggagcgttacctggcagaggcacagggcacttatgaggagctccagcgggagatgaagaagtcgttgatggatctggccaatgatgcctgccagctgctctcaggagagaggtacaaagaagacccctggctctgggacctggagtgggacctgcaagaatttaagcagaagaaagctaagaaggtgaagaaggaaccagccacagccagcaagttgcccatcgagggggctggggcccctggtgatcccatggatcaggaagacctcggcccctgcagtgaggaggaggagtttcaacaagatgtcatggcccgcgcctgcttgcagaagctgaaggggaccacagagctcctgcccaagcggccccagcaccttcctggacaccctggatggtaccggaagctctgcccccggctagacgaccctgcatggaccccgggccccagcctcctcagcctgcagatgcgggtcacacctaaactcatggcacttacctgggatggcttccctctgcactactcagagcgtcatggctggggctacttggtgcctgggcggcgggacaacctggccaagctgccgacaggtaccaccctggagtcagctggggtggtctgcccctacagagccatcgagtccctgtacaggaagcactgtctcgaacaggggaagcagcagctgatgccccaggaggccggcctggcggaggagttcctgctcactgacaatagtgccatatggcaaacggtagaagaactggattacttagaagtggaggctgaggccaagatggagaacttgcgagctgcagtgccaggtcaacccctagctctgactgcccgtggtggccccaaggacacccagcccagctatcaccatggcaatggaccttacaacgacgtggacatccctggctgctggtttttcaagctgcctcacaaggatggtaatagctgtaatgtgggaagcccctttgccaaggacttcctgcccaagatggaggatggcaccctgcaggctggcccaggaggtgccagtgggccccgtgctctggaaatcaacaaaatgatttctttctggaggaacgcccataaacgtatcagctcccagatggtggtgtggctgcccaggtcagctctgccccgtgctgtgatcaggcaccccgactatgatgaggaaggcctctatggggccatcctgccccaagtggtgactgccggcaccatcactcgccgggctgtggagcccacatggctcaccgccagcaatgcccggcctgaccgagtaggcagtgagttgaaagccatggtgcaggccccacctggctacacccttgtgggtgctgatgtggactcccaagagctgtggattgcagctgtgcttggagacgcccactttgccggcatgcatggctgcacagcctttgggtggatgacactgcagggcaggaagagcaggggcactgatctacacagtaagacagccactactgtgggcatcagccgtgagcatgccaaaatcttcaactacggccgcatctatggtgctgggcagccctttgctgagcgcttactaatgcagtttaaccaccggctcacacagcaggaggcagctgagaaggcccagcagatgtacgctgccaccaagggcctccgctggtatcggctgtcggatgagggcgagtggctggtgagggagttgaacctcccagtggacaggactgagggtggctggatttccctgcaggatctgcgcaaggtccagagagaaactgcaaggaagtcacagtggaagaagtgggaggtggttgctgaacgggcatggaaggggggcacagagtcagaaatgttcaataagcttgagagcattgctacgtctgacataccacgtaccccggtgctgggctgctgcatcagccgagccctggagccctcggctgtccaggaagagtttatgaccagccgtgtgaattgggtggtacagagctctgctgttgactacttacacctcatgcttgtggccatgaagtggctgtttgaagagtttgccatagatgggcgcttctgcatcagcatccatgacgaggttcgctacctggtgcgggaggaggaccgctaccgcgctgccctggccttgcagatcaccaacctcttgaccaggtgcatgtttgcctacaagctgggtctgaatgacttgccccagtcagtcgcctttttcagtgcagtcgatattgaccggtgcctcaggaaggaagtgaccatggattgtaaaaccccttccaacccaactgggatggaaaggagatacgggattccccagggtgaagcgctggatatttaccagataattgaactcaccaaaggctccttggaaaaacgaagccagcctggaccatagcactgcctggaggctctgtatttgctcccgtggagcttcatcggggtggtgcaggctcccaaactcaggctttcagctgtgctttttgcaaaagggcttgcctaaggccagccatttttcagtagcaggacctgccaagaagattccttctaactgaaggtgcagttgaattcagtgggttcagaaccaagatgccaacatcggtgtggactacaggacaaggggcattgttgcttgttgggtaaaaatgaagcagaagccccaaagttcacattaactcaggcatttcatttattttttccttttcttcttggctggttctttgttctgtcccccatgctctgatgcagtgccctagaaggggaaagaattaatgctctaacgtgataaacctgctccaaggcagtggaaataaaaagaaggaaaaaaaagactctatcttctca

SEQ ID NO: 167407 - DNA, 4487 bp, Homo sapiens
  Payload ID: 12936
  Gene Symbol: POLG
  Gene Name: polymerase (DNA directed), gamma
  Uniprot ID: P54098
  ENST ID: ENST00000442287
  CDS Start-End: 337-4056
cgcttgcctctcgggtagccgcgggacctagctgggtgcagacgggaagttgcggctgccagcgaagcggaccggccgggtggaggccacacgctaccccgaggctgcgtaggccgcgcgaagggggacgccgtgccgtgggcctggggtcgggggagcagcagaccgggaagcaccgatttggggtggaaggcaggcatggtcaaacccatttcactgacaggagagcagagacaggacgtgtctctctccacgtcttccagccagtaaaagaagccaagctggagcccaaagccaggtgttctgactcccagcgtgggggtccctgcaccaaccatgagccgcctgctctggaggaaggtggccggcgccaccgtcgggccagggccggttccagctccggggcgctgggtctccagctccgtccccgcgtccgaccccagcgacgggcagcggcggcggcagcagcagcagcagcagcagcagcagcagcaacagcagcctcagcagccgcaagtgctatcctcggagggcgggcagctgcggcacaacccattggacatccagatgctctcgagagggctgcacgagcaaatcttcgggcaaggaggggagatgcctggcgaggccgcggtgcgccgcagcgtcgagcacctgcagaagcacgggctctgggggcagccagccgtgcccttgcccgacgtggagctgcgcctgccgcccctctacggggacaacctggaccagcacttccgcctcctggcccagaagcagagcctgccctacctggaggcggccaacttgctgttgcaggcccagctgcccccgaagcccccggcttgggcctgggcggagggctggacccggtacggccccgagggggaggccgtacccgtggccatccccgaggagcgggccctggtgttcgacgtggaggtctgcttggcagagggaacttgccccacattggcggtggccatatccccctcggcctggtattcctggtgcagccagcggctggtggaagagcgttactcttggaccagccagctgtcgccggctgacctcatccccctggaggtccctactggtgccagcagccccacccagagagactggcaggagcagttagtggtggggcacaatgtttcctttgaccgagctcatatcagggagcagtacctgatccagggttcccgcatgcgtttcctggacaccatgagcatgcacatggccatctcagggctaagcagcttccagcgcagtctgtggatagcagccaagcagggcaaacacaaggtccagccccccacaaagcaaggccagaagtcccagaggaaagccagaagaggcccagcgatctcatcctgggactggctggacatcagcagtgtcaacagtctggcagaggtgcacagactttatgtaggggggcctcccttagagaaggagcctcgagaactgtttgtgaagggcaccatgaaggacattcgtgagaacttccaggacctgatgcagtactgtgcccaggacgtgtgggccacccatgaggttttccagcagcagctaccgctcttcttggagaggtgtccccacccagtgactctggccggcatgctggagatgggtgtctcctacctgcctgtcaaccagaactgggagcgttacctggcagaggcacagggcacttatgaggagctccagcgggagatgaagaagtcgttgatggatctggccaatgatgcctgccagctgctctcaggagagaggtacaaagaagacccctggctctgggacctggagtgggacctgcaagaatttaagcagaagaaagctaagaaggtgaagaaggaaccagccacagccagcaagttgcccatcgagggggctggggcccctggtgatcccatggatcaggaagacctcggcccctgcagtgaggaggaggagtttcaacaagatgtcatggcccgcgcctgcttgcagaagctgaaggggaccacagagctcctgcccaagcggccccagcaccttcctggacaccctggatggtaccggaagctctgcccccggctagacgaccctgcatggaccccgggccccagcctcctcagcctgcagatgcgggtcacacctaaactcatggcacttacctgggatggcttccctctgcactactcagagcgtcatggctggggctacttggtgcctgggcggcgggacaacctggccaagctgccgacaggtaccaccctggagtcagctggggtggtctgcccctacagagccatcgagtccctgtacaggaagcactgtctcgaacaggggaagcagcagctgatgccccaggaggccggcctggcggaggagttcctgctcactgacaatagtgccatatggcaaacggtagaagaactggattacttagaagtggaggctgaggccaagatggagaacttgcgagctgcagtgccaggtcaacccctagctctgactgcccgtggtggccccaaggacacccagcccagctatcaccatggcaatggaccttacaacgacgtggacatccctggctgctggtttttcaagctgcctcacaaggatggtaatagctgtaatgtgggaagcccctttgccaaggacttcctgcccaagatggaggatggcaccctgcaggctggcccaggaggtgccagtgggccccgtgctctggaaatcaacaaaatgatttctttctggaggaacgcccataaacgtatcagctcccagatggtggtgtggctgcccaggtcagctctgccccgtgctgtgatcaggcaccccgactatgatgaggaaggcctctatggggccatcctgccccaagtggtgactgccggcaccatcactcgccgggctgtggagcccacatggctcaccgccagcaatgcccggcctgaccgagtaggcagtgagttgaaagccatggtgcaggccccacctggctacacccttgtgggtgctgatgtggactcccaagagctgtggattgcagctgtgcttggagacgcccactttgccggcatgcatggctgcacagcctttgggtggatgacactgcagggcaggaagagcaggggcactgatctacacagtaagacagccactactgtgggcatcagccgtgagcatgccaaaatcttcaactacggccgcatctatggtgctgggcagccctttgctgagcgcttactaatgcagtttaaccaccggctcacacagcaggaggcagctgagaaggcccagcagatgtacgctgccaccaagggcctccgctggtatcggctgtcggatgagggcgagtggctggtgagggagttgaacctcccagtggacaggactgagggtggctggatttccctgcaggatctgcgcaaggtccagagagaaactgcaaggaagtcacagtggaagaagtgggaggtggttgctgaacgggcatggaaggggggcacagagtcagaaatgttcaataagcttgagagcattgctacgtctgacataccacgtaccccggtgctgggctgctgcatcagccgagccctggagccctcggctgtccaggaagagtttatgaccagccgtgtgaattgggtggtacagagctctgctgttgactacttacacctcatgcttgtggccatgaagtggctgtttgaagagtttgccatagatgggcgcttctgcatcagcatccatgacgaggttcgctacctggtgcgggaggaggaccgctaccgcgctgccctggccttgcagatcaccaacctcttgaccaggtgcatgtttgcctacaagctgggtctgaatgacttgccccagtcagtcgcctttttcagtgcagtcgatattgaccggtgcctcaggaaggaagtgaccatggattgtaaaaccccttccaacccaactgggatggaaaggagatacgggattccccagggtgaagcgctggatatttaccagataattgaactcaccaaaggctccttggaaaaacgaagccagcctggaccatagcactgcctggaggctctgtatttgctcccgtggagcttcatcggggtggtgcaggctcccaaactcaggctttcagctgtgctttttgcaaaagggcttgcctaaggccagccatttttcagtagcaggacctgccaagaagattccttctaactgaaggtgcagttgaattcagtgggttcagaaccaagatgccaacatcggtgtggactacaggacaaggggcattgttgcttgttgggtaaaaatgaagcagaagccccaaagttcacattaactcaggcatttcatttattttttccttttcttcttggctggttctttgttctgtcccccatgctctgatgcagtgccctagaaggggaaagaattaatgctctaacgtgataaacctgctccaaggcagtggaaataaaaagaaggaaaaaaaa

SEQ ID NO: 167408 - DNA, 372 bp, Homo sapiens
  Payload ID: 12936
  Gene Symbol: POLG
  Gene Name: polymerase (DNA directed), gamma
  ENST ID: ENST00000530715
  CDS Start-End: 1-207
tggtttttcaagctgcctcacaaggatggtaatagctgtaatgtgggaagcccctttgccaaggacttcctgcccaagatggaggatggcaccctgcaggctggcccaggaggtgccagtgggccccgtgctctggaaatcaacaaaatgatttctttctggaggaacgcccataaacgtatcagccctttgctgagcgcttactaatgcagtttaaccaccggctcacacagcaggaggcagctgagaaggcccagcagatgtacgctgccaccaagggcctccgctggtatcggctgtcggatgagggcgagtggctggtgagggagttgaacctcccagtggacaggactgagggtggctggatttccc

SEQ ID NO: 167409 - DNA, 700 bp, Homo sapiens
  Payload ID: 12936
  Gene Symbol: POLG
  Gene Name: polymerase (DNA directed), gamma
  ENST ID: ENST00000526314
  CDS Start-End: 1-700
aacaagatgtcatggcccgcgcctgcttgcagaagctgaaggggaccacagagctcctgcccaagcggccccagcaccttcctggacaccctggatggtaccggaagctctgcccccggctagacgaccctgcatggaccccgggccccagcctcctcagcctgcagatgcgggtcacacctaaactcatggcacttacctgggatggcttccctctgcactactcagagcgtcatggctggggctacttggtgcctgggcggcgggacaacctggccaagctgccgacaggtaccaccctggagtcagctggggtggtctgcccctacagagccatcgagtccctgtacaggaagcactgtctcgaacaggggaagcagcagctgatgccccaggaggccggcctggcggaggagttcctgctcactgacaatagtgccatatggcaaacggtagaagaactggattacttagaagtggaggctgaggccaagatggagaacttgcgagctgcagtgccaggtcaacccctagctctggatggtaatagctgtaatgtgggaagcccctttgccaaggacttcctgcccaagatggaggatggcaccctgcaggctggcccaggaggtgccagtgggccccgtgctctggaaatcaacaaaatgatttctttctggaggaacgcccataaacgtatcag

SEQ ID NO: 167410 - DNA, 1326 bp, Homo sapiens
  Payload ID: 12936
  Gene Symbol: POLG
  Gene Name: polymerase (DNA directed), gamma
  ENST ID: ENST00000530292
  CDS Start-End: 1-591
ctcacacagcaggaggcagctgagaaggcccagcagatgtacgctgccaccaagggcctccgctggtatcggctgtcggatgagggcgagtggctggtgagggagttgaacctcccagtggacaggactgagggtggctggatttccctgcaggatctgcgcaaggtccagagagaaactgcaaggaagtcacagtggaagaagtgggaggtggttgctgaacgggcatggaaggggggcacagagtcagaaatgttcaataagcttgagagcattgctacgtctgacataccacgtaccccggtgctgggctgctgcatcagccgagccctggagccctcggctgtccaggaagagtttatgaccagccgtgtgaattgggtggtacagagctctgctgttgactacttacacctcatgcttgtggccatgaagtggctgtttgaagagtttgccatagatgggcgcttctgcatcagcatccatgacgaggttcgctacctggtgcgggaggaggaccgctaccgcgctgccctggccttgcagatcaccaacctcttgaccagtaaaattcctagttcatatggatgaattaaatattaccgttccatgttgatctgccactcagaaccagtttgggaaccatgatctatcctgattattgggtgcatgtttgcctacaagctgggtctgaatgacttgccccagtcagtcgcctttttcagtgcagtcgatattgaccggtgcctcaggaaggaagtgaccatggattgtaaaaccccttccaacccaactgggatggaaaggagatacgggattccccagggtgaagcgctggatatttaccagataattgaactcaccaaaggctccttggaaaaacgaagccagcctggaccatagcactgcctggaggctctgtatttgctcccgtggagcttcatcggggtggtgcaggctcccaaactcaggctttcagctgtgctttttgcaaaagggcttgcctaaggccagccatttttcagtagcaggacctgccaagaagattccttctaactgaaggtgcagttgaattcagtgggttcagaaccaagatgccaacatcggtgtggactacaggacaaggggcattgttgcttgttgggtaaaaatgaagcagaagccccaaagttcacattaactcaggcatttcatttattttttccttttcttcttggctggttctttgttctgtcccccatgctctgatgcagtgccctagaaggggaaagaattaatgctctaacgtgataaacctgctccaaggcagtggaaataaaaagaagg

SEQ ID NO: 167411 - DNA, 524 bp, Homo sapiens
  Payload ID: 12936
  Gene Symbol: POLG
  Gene Name: polymerase (DNA directed), gamma
  ENST ID: ENST00000528881
  CDS Start-End: 1-208
ccctggctgctggtttttcaagctgcctcacaaggatggtaatagctgtaatgtgggaagcccctttgccaaggacttcctgcccaagatggaggatggcaccctgcaggctggcccaggaggtgccagtgggccccgtgctctggaaatcaacaaaatgatttctttctggaggaacgcccataaacgtatcagcctgaccgagtaggcagtgagttgaaagccatggtgcaggccccacctggctacacccttgtgggtgctgatgtggactcccaagagctgtggattgcagctgtgcttggagacgcccactttgccggcatgcatggctgcacagcctttgggtggatgacactgcagggcaggaagagcaggggcactgatctacacagtaagacagccactactgtgggcatcagccgtgagcatgccaaaatcttcaactacggccgcatctatggtgctgggcagccctttgctgagcgcttactaatgcagtttaaccaccggctcacacagca

SEQ ID NO: 167412 - DNA, 512 bp, Homo sapiens
  Payload ID: 12936
  Gene Symbol: POLG
  Gene Name: polymerase (DNA directed), gamma
  ENST ID: ENST00000526398
  CDS Start-End: 1-154
acttacctgggatggcttccctctgcactactcagagcgtcatggctggggctacttggtgcctgggcggcgggacaacctggccaagctgccgacaggtaccaccctggagtcagctggggtggtctgcccctacaggggaagcagcagctgatgccccaggaggccggcctggcggaggagttcctgctcactgacaatagtgccatatggcaaacggtagaagaactggattacttagaagtggaggctgaggccaagatggagaacttgcgagctgcagtgccaggtcaacccctagctctgactgcccgtggtggccccaaggacacccagcccagctatcaccatggcaatggaccttacaacgacgtggacatccctggctgctggtttttcaagctgcctcacaaggatggtaatagctgtaatgtgggaagcccctttgccaaggacttcctgcccaagatggaggatggcaccctgcaggctggcccaggaggtgccagtgg

SEQ ID NO: 167413 - DNA, 4668 bp, Homo sapiens
  Payload ID: 12936
  Gene Symbol: POLG
  Gene Name: polymerase (DNA directed), gamma
  ENST ID: ENST00000631044
  CDS Start-End: 305-1078
ggaagttgcggctgccagcgaagcggaccggccgggtggaggccacacgctaccccgaggctgcgtaggccgcgcgaagggggacgccgtgccgtgggcctggggtcgggggagcagcagaccgggaagcaccgtgaggaccgaggatttggggtggaaggcaggcatggtcaaacccatttcactgacaggagagcagagacaggacgtgtctctctccacgtcttccagccagtaaaagaagccaagctggagcccaaagccaggtgttctgactcccagcgtgggggtccctgcaccaaccatgagccgcctgctctggaggaaggtggccggcgccaccgtcgggccagggccggttccagctccggggcgctgggtctccagctccgtccccgcgtccgaccccagcgacgggcagcggcggcggcagcagcagcagcagcagcagcagcagcagcaacagcagcctcagcagccgcaagtgctatcctcggagggcgggcagctgcggcacaacccattggacatccagatgctctcgagagggctgcacgagcaaatcttcgggcaaggaggggagatgcctggcgaggccgcggtgcgccgcagcgtcgagcacctgcagaagcacgggctctgggggcagccagccgtgcccttgcccgacgtggagctgcgcctgccgcccctctacggggacaacctggaccagcacttccgcctcctggcccagaagcagagcctgccctacctggaggcggccaacttgctgttgcaggcccagctgcccccgaagcccccggcttgggcctgggcggagggctggacccggtacggccccgagggggaggccgtacccgtggccatccccgaggagcgggccctggtgttcgacgtggaggtctgcttggcagagggaacttgccccacattggcggtggccatatccccctcggcctggattaaaatactatttacaaccttaatgctttcaggcatggccagcaaaaaagttggcagtttctttattcctattggaagctacatctttgtaaagaaagctgcgaaatgttaaatatgcagttgaaaatggtgaaaacatggctaaatagataaggtattcctggtgcagccagcggctggtggaagagcgttactcttggaccagccagctgtcgccggctgacctcatccccctggaggtccctactggtgccagcagccccacccagagagactggcaggagcagttagtggtggggcacaatgtttcctttgaccgagctcatatcagggagcagtacctgatccagggttcccgcatgcgtttcctggacaccatgagcatgcacatggccatctcagggctaagcagcttccagcgcagtctgtggatagcagccaagcagggcaaacacaaggtccagccccccacaaagcaaggccagaagtcccagaggaaagccagaagaggcccagcgatctcatcctgggactggctggacatcagcagtgtcaacagtctggcagaggtgcacagactttatgtaggggggcctcccttagagaaggagcctcgagaactgtttgtgaagggcaccatgaaggacattcgtgagaacttccaggacctgatgcagtactgtgcccaggacgtgtgggccacccatgaggttttccagcagcagctaccgctcttcttggagaggtgtccccacccagtgactctggccggcatgctggagatgggtgtctcctacctgcctgtcaaccagaactgggagcgttacctggcagaggcacagggcacttatgaggagctccagcgggagatgaagaagtcgttgatggatctggccaatgatgcctgccagctgctctcaggagagaggtacaaagaagacccctggctctgggacctggagtgggacctgcaagaatttaagcagaagaaagctaagaaggtgaagaaggaaccagccacagccagcaagttgcccatcgagggggctggggcccctggtgatcccatggatcaggaagacctcggcccctgcagtgaggaggaggagtttcaacaagatgtcatggcccgcgcctgcttgcagaagctgaaggggaccacagagctcctgcccaagcggccccagcaccttcctggacaccctggatggtaccggaagctctgcccccggctagacgaccctgcatggaccccgggccccagcctcctcagcctgcagatgcgggtcacacctaaactcatggcacttacctgggatggcttccctctgcactactcagagcgtcatggctggggctacttggtgcctgggcggcgggacaacctggccaagctgccgacaggtaccaccctggagtcagctggggtggtctgcccctacagagccatcgagtccctgtacaggaagcactgtctcgaacaggggaagcagcagctgatgccccaggaggccggcctggcggaggagttcctgctcactgacaatagtgccatatggcaaacggtagaagaactggattacttagaagtggaggctgaggccaagatggagaacttgcgagctgcagtgccaggtcaacccctagctctggtgctggagcagggcctgatataggtgtgtggccctcacagactgcccgtggtggccccaaggacacccagcccagctatcaccatggcaatggaccttacaacgacgtggacatccctggctgctggtttttcaagctgcctcacaaggatggtaatagctgtaatgtgggaagcccctttgccaaggacttcctgcccaagatggaggatggcaccctgcaggctggcccaggaggtgccagtgggccccgtgctctggaaatcaacaaaatgatttctttctggaggaacgcccataaacgtatcagctcccagatggtggtgtggctgcccaggtcagctctgccccgtgctgtgatcaggcaccccgactatgatgaggaaggcctctatggggccatcctgccccaagtggtgactgccggcaccatcactcgccgggctgtggagcccacatggctcaccgccagcaatgcccggcctgaccgagtaggcagtgagttgaaagccatggtgcaggccccacctggctacacccttgtgggtgctgatgtggactcccaagagctgtggattgcagctgtgcttggagacgcccactttgccggcatgcatggctgcacagcctttgggtggatgacactgcagggcaggaagagcaggggcactgatctacacagtaagacagccactactgtgggcatcagccgtgagcatgccaaaatcttcaactacggccgcatctatggtgctgggcagccctttgctgagcgcttactaatgcagtttaaccaccggctcacacagcaggaggcagctgagaaggcccagcagatgtacgctgccaccaagggcctccgctggtatcggctgtcggatgagggcgagtggctggtgagggagttgaacctcccagtggacaggactgagggtggctggatttccctgcaggatctgcgcaaggtccagagagaaactgcaaggaagtcacagtggaagaagtgggaggtggttgctgaacgggcatggaaggggggcacagagtcagaaatgttcaataagcttgagagcattgctacgtctgacataccacgtaccccggtgctgggctgctgcatcagccgagccctggagccctcggctgtccaggaagagtttatgaccagccgtgtgaattgggtggtacagagctctgctgttgactacttacacctcatgcttgtggccatgaagtggctgtttgaagagtttgccatagatgggcgcttctgcatcagcatccatgacgaggttcgctacctggtgcgggaggaggaccgctaccgcgctgccctggccttgcagatcaccaacctcttgaccaggtgcatgtttgcctacaagctgggtctgaatgacttgccccagtcagtcgcctttttcagtgcagtcgatattgaccggtgcctcaggaaggaagtgaccatggattgtaaaaccccttccaacccaactgggatggaaaggagatacgggattccccagggtgaagcgctggatatttaccagataattgaactcaccaaaggctccttggaaaaacgaagccagcctggaccatagcactgcctggaggctctgtatttgctcccgtggagcttcatcggggtggtgcaggctcccaaactcaggctttcagctgtgctttttgcaaaagggcttgcctaaggccagccatttttcagtagcaggacctgccaagaagattccttctaactgaaggtgcagttgaattcagtgggttcagaaccaagatgccaacatcggtgtggactacaggacaaggggcattgttgcttgttgggtaaaaatgaagcagaagccccaaagttcacattaactcaggcatttcatttattttttccttttcttcttggctggttctttgttctgtcccccatgctctgatgcagtgccctagaaggggaaagaattaatgctctaacgtgataaacctgctccaaggcagtggaaataaaaagaaggaaaaaaaagactctatcttctca

SEQ ID NO: 167414 - DNA, 1564 bp, Homo sapiens
  Payload ID: 12937
  Gene Symbol: POLG2
  Gene Name: polymerase (DNA directed), gamma 2, accessory subunit
  Uniprot ID: Q9UHN1
  ENST ID: ENST00000539111
  CDS Start-End: 69-1526
aacggtagtggtggcttgttgggatccgttgagtgatgggagagtgtgctctttaacttcggagagagatgcgctctcgtgtagccgtcagggcctgccataaggtctgcaggtgcctgttgtctgggtttgggggtcgagtagatgcggggcagccggagctgttgacggaaaggagtagccccaaaggagggcatgtgaagtcgcacgcggagctcgaggggaacggcgagcacccagaagcccccgggtctggagagggaagcgaggcgctgttagagatctgtcagagaaggcatttcctaagtggaagcaagcagcagcttagccgggattctcttctgagtgggtgccaccccggcttcggacccttgggcgtagagttgcggaagaacctggccgcagaatggtggacctcggtggtggtgttcagggagcaggtattcccggtggacgccctccaccacaaaccaggccctttgctacccggggacagtgccttcaggttagtttctgcagaaactctacgcgaaatcttgcaagacaaagagctgagtaaggaacagctagtagcatttcttgagaacgtattaaaaacttctgggaaactacgggagaaccttcttcacggtgccttggaacactatgttaattgcctggatctggtaaacaagaggctaccttatggccttgctcagattggagtgtgttttcatcctgtttttgacactaagcagatacgaaatggtgttaaaagtattggtgagaagactgaagcttcgttagtatggtttactcctccgagaacttcaaaccagtggcttgatttctggttacgtcatcgactccagtggtggagaaagtttgccatgagtccatctaacttcagcagcagtgactgtcaggatgaagaaggccggaaaggaaacaaactttactacaattttccctggggaaaggagttaatagaaaccctgtggaacctaggagatcacgaacttttacacatgtatcctggcaatgtgtctaaattacatggccgagatggacgaaaaaatgtggttccttgtgttctctctgtaaatggggacctagaccgaggcatgctggcctacctctatgattctttccagctgacagagaactcctttacaagaaagaaaaatcttcatagaaaggtacttaaacttcacccttgtttagcccctattaaggttgctttggatgtaggaagaggccccacattggaactaagacaggtttgtcaagggctatttaatgagttactagaaaatgggatttctgtgtggcctggttatttggaaactatgcagtcctcattggaacaactttattcgaagtatgatgaaatgagtattctcttcacagttttggttactgaaactactttggagaatggattaatacatctgagaagcagagacaccacaatgaaggaaatgatgcatatatccaaattaaaagactttttgattaagtatatatcatcagctaagaatgtatagatttttatatttgtataataaatattcttctctcctaa

SEQ ID NO: 167415 - DNA, 652 bp, Homo sapiens
  Payload ID: 12937
  Gene Symbol: POLG2
  Gene Name: polymerase (DNA directed), gamma 2, accessory subunit
  ENST ID: ENST00000581355
  CDS Start-End: 1-456
tcaaaccagtggcttgatttctggttacgtcatcgactccagtggtggagaaagtttgccatgagtccatctaacttcagcagcagtgactgtcaggatgaagaaggccggaaaggaaacaaactttactacaattttccctggggaaaggagttaatagaaaccctgtggaacctaggagatcacgaacttttacacatgtatcctggcaatgtgtctaaattacatggccgagatggacgaaaaaatgtggttccttgtgttctctctgtaaatggggacctagaccgaggcatgctggcctacctctatgattctttccagctgacagagaactcctttacaagaaagaaaaatcttcatagaaaggtacttaaacttcacccttgtttagcccctattaaggttgctttggatgtaggaagaggccccacattggaactaagacaggtatgatgaaatgagtattctcttcacagttttggttactgaaactactttggagaatggattaatacatctgagaagcagagacaccacaatgaaggaaatgatgcatatatccaaattaaaagactttttgattaagtatatatcatcagctaagaatgtatagatttttatatttgtataataaatattcttctctcct

SEQ ID NO: 167416 - DNA, 565 bp, Homo sapiens
  Payload ID: 12937
  Gene Symbol: POLG2
  Gene Name: polymerase (DNA directed), gamma 2, accessory subunit
  ENST ID: ENST00000578997
  CDS Start-End: 1-246
atctgtcagagaaggcatttcctaagtggaagcaagcagcagcttagccgggattctcttctgagtgggtgccaccccggcttcggacccttgggcgtagagttgcggaagaacctggccgcagaatggtggacctcggtggtggtgttcagggagcaggtattcccggtggacgccctccaccacaaaccaggccctttgctacccggggacagtgccttcaggtgccttggaacactatgttaattgcctggatctggtaaacaagaggctaccttatggccttgctcagattggagtgtgttttcatcctgtttttgacactaagcagatacgaaatggtgttaaaagtattggtgagaagactgaagcttcgttagtatggtttactcctccgagaacttcaaaccagtggcttgatttctggttacgtcatcgactccagtggtggagaaagtttgccatgagtccatctaacttcagcagcagtgactgtcaggatgaagaaggccggaaaggaaacaaactttactacaattttccctggggaaaggagttaatagaa

SEQ ID NO: 167417 - DNA, 2670 bp, Homo sapiens
  Payload ID: 12938
  Gene Symbol: POLL
  Gene Name: polymerase (DNA directed), lambda
  Uniprot ID: Q9UGP5
  ENST ID: ENST00000299206
  CDS Start-End: 372-2099
ctgctggtaagtggtctattcctgcccacccccgggtgactagcttggccagtagtcgaccccacccggggaccgactctgggggttggagagactcttggggccggggtcgggcactccagctttcttctagccccgagctgggattccctggcctgcgccagctgcgtacacggcgagtacaccgcacctgcccgggacttcacccgcagctgcgagactcctccattcccggagggctccccacacctgctgcggccgtgccccatctccccgcagctgcggcgctgagcacccccatgtcgagaggctgagaccaggacagcagccctgaccaacgctccaataggccgggatccagccatacttcaatggatcccaggggtatcttgaaggcatttcccaagcggcagaaaattcatgctgatgcatcatcaaaagtacttgcaaagattcctaggagggaagagggagaagaagcagaagagtggctgagctcccttcgggcccatgttgtgcgcactggcattggacgagcccgggcagaactctttgagaagcagattgttcagcatggcggccagctatgccctgcccagggcccaggtgtcactcacattgtggtggatgaaggcatggactatgagcgagccctccgccttctcagactaccccagctgcccccgggtgctcagctggtgaagtcagcctggctgagcttgtgccttcaggagaggaggctggtggatgtagctggattcagcatcttcatccccagtaggtacttggaccatccacagcccagcaaggcagagcaggatgcttctattcctcctggcacccatgaggccctgcttcagacagccctttctcctcctcctcctcccaccaggcctgtgtctcctccccaaaaggcaaaagaggcaccaaacacccaagcccagcccatctctgatgatgaagccagtgatggggaagaaacccaggttagtgcagctgatctggaagccctcatcagtggccactaccccacctcccttgagggagattgtgagcctagcccagcccctgctgtcctggataagtgggtctgtgcacagccctcaagccagaaggcgaccaatcacaacctccatatcacagagaagctggaagttctggccaaagcctacagtgttcagggagacaagtggagggccctgggctatgccaaggccatcaatgccctcaagagcttccataagcctgtcacctcgtaccaggaggcctgcagtatccctgggattgggaagcggatggctgagaaaatcatagagatcctggagagcgggcatttgcggaagctggaccatatcagtgagagcgtgcctgtcttggagctcttctccaacatctggggagctgggaccaagactgcccagatgtggtaccaacagggcttccgaagtctggaagacatccgcagccaggcctccctgacaacccagcaggccatcggcctgaagcattacagtgacttcctggaacgtatgcccagggaggaggctacagagattgagcagacagtccagaaagcagcccaggcctttaactctgggctgctgtgtgtggcatgtggttcataccgacggggaaaggcgacctgtggtgatgtcgacgtgctcatcactcacccagatggccggtcccaccggggtatcttcagccgcctccttgacagtcttcggcaggaagggttcctcacagatgacttggtgagccaagaggagaatggtcagcaacagaagtacttgggggtgtgccggctcccagggccagggcggcggcaccggcgcctggacatcatcgtggtgccctatagcgagtttgcctgtgccctgctctacttcaccggctctgcacacttcaaccgctccatgcgagccctggccaaaaccaagggcatgagtctgtcagaacatgccctcagcactgctgtggtccggaacacccatggctgcaaggtggggcctggccgagtgctgcccactcccactgagaaggatgtcttcaggctcttaggcctcccctaccgagaacctgctgagcgggactggtgacccatggctgggggtgctgaggagagccgagttggactggctacccctcctggccacccagtactccctccagcctcagctggctgaacctcgccgctccaaccaccagcttcctcagcgagcagggcccagggctctgggcctgaagcaagagccagcccggctcccagtgtctgcccggctcccagtgtctgcccagccctctcccagacaggagcaggctgccaccccttctacctcaccactgcccctcgaagaattttgcaaatggccccttgccccattttaagcaggagcaggtggctggtttgaagccccaggtatcccccttccctgctatgggaaaggccaagctgctgggtggggacagaagctgcaggggagagggaagcagccgtgctgtcaacatcatccggcaccctctggggtaggagaacagccattccacatgtgttccctctatccgtcctgcttcctgggcagctggtggtgctgggaatggggtgccccagccttggtgaggacagtgttgggaggcccaggggcccagtaaagtgcatttgacattgaa

SEQ ID NO: 167418 - DNA, 2289 bp, Homo sapiens
  Payload ID: 12938
  Gene Symbol: POLL
  Gene Name: polymerase (DNA directed), lambda
  ENST ID: ENST00000339310
  CDS Start-End: 822-1718
ggttggagagactcttggggccggggtcgggcactccagctttcttctagccccgagctgggattccctggcctgcgccagctgcgtacacggcgagtacaccgcacctgcccgggacttcacccgcagctgcgagactcctccattcccggagggctccccacacctgctgcggccgtgccccatctccccgcagctgcggcgctgagcacccccatgtcgagaggctgagaccaggacaggtgcagggcgttcccactcacccccgaaagtcctcctccttcctctgcgagtctgtgttggaggtagagaaatagtatgtggggtttatgtgcaggtcctccccaggctccgctccatcccctaaagctccatttcctagcccagcatcccatttggtaaagcccttcgaagtgggccgcagcagggctgtgctgaatctttagcgcaacccctctgaggaatggtgtcgtttcctactcctcaaaagtacccccgatggcaccagccttcccctcatttcccgtaatactccaacttcgaaaggctggggagtgtgaagctaggctaaaccactgaagtttaaccgggtttgaagagaccccctcccccgacccgcttccccaaactgggctgctacccccaaagcctggtcaggaaagaccctacctccataggcaaaggggttggagggcctcaattctggatttccacgtgcagcagccctgaccaacgctccaataggccgggatccagccatacttcaatggatcccaggggtatcttgaaggcatttcccaagcggcagaaaattcatgctgatgcatcatcaaaagtacttgcaaagattcctaggagggaagagggagaagaagcagaaggaggcctgcagtatccctgggattgggaagcggatggctgagaaaatcatagagatcctggagagcgggcatttgcggaagctggaccatatcagtgagagcgtgcctgtcttggagctcttctccaacatctggggagctgggaccaagactgcccagatgtggtaccaacagggcttccgaagtctggaagacatccgcagccaggcctccctgacaacccagcaggccatcggcctgaagcattacagtgacttcctggaacgtatgcccagggaggaggctacagagattgagcagacagtccagaaagcagcccaggcctttaactctgggctgctgtgtgtggcatgtggttcataccgacggggaaaggcgacctgtggtgatgtcgacgtgctcatcactcacccagatggccggtcccaccggggtatcttcagccgcctccttgacagtcttcggcaggaagggttcctcacagatgacttggtgagccaagaggagaatggtcagcaacagaagtacttgggggtgtgccggctcccagggccagggcggcggcaccggcgcctggacatcatcgtggtgccctatagcgagtttgcctgtgccctgctctacttcaccggctctgcacacttcaaccgctccatgcgagccctggccaaaaccaagggcatgagtctgtcagaacatgccctcagcactgctgtggtccggaacacccatggctgcaaggtggggcctggccgagtgctgcccactcccactgagaaggatgtcttcaggctcttaggcctcccctaccgagaacctgctgagcgggactggtgacccatggctgggggtgctgaggagagccgagttggactggctacccctcctggccacccagtactccctccagcctcagctggctgaacctcgccgctccaaccaccagcttcctcagcgagcagggcccagggctctgggcctgaagcaagagccagcccggctcccagtgtctgcccggctcccagtgtctgcccagccctctcccagacaggagcaggctgccaccccttctacctcaccactgcccctcgaagaattttgcaaatggccccttgccccattttaagcaggagcaggtggctggtttgaagccccaggtatcccccttccctgctatgggaaaggccaagctgctgggtggggacagaagctgcaggggagagggaagcagccgtgctgtcaacatcatccggcaccctctggggtaggagaacagccattccacatgtgttccctctatccgtcctgcttcctgggcagctggtggtgctgggaatggggtgccccagccttggtgaggacagtgttgggaggcccaggggcccagtaaagtgcatttgacattgaa

SEQ ID NO: 167419 - DNA, 2792 bp, Homo sapiens
  Payload ID: 12938
  Gene Symbol: POLL
  Gene Name: polymerase (DNA directed), lambda
  Uniprot ID: Q9UGP5
  ENST ID: ENST00000370162
  CDS Start-End: 496-2223
tgactcggaagctattctggccatttgccctccttccccccttcgtccgctctcattggctctgctggtaagtggtctattcctgcccacccccgggtgactagcttggccagtagtcgaccccacccggggaccgactctgggggttggagagactcttggggccggggtcgggcactccagctttcttctagccccgagctgggattccctggcctgcgccagctgcgtacacggcgagtacaccgcacctgcccgggacttcacccgcagctgcgagactcctccattcccggagggctccccacacctgctgcggccgtgccccatctccccgcagctgcggcgctgagcacccccatgtcgagaggctgagaccaggacaggtgcagggcgttcccactcacccccgaaagtcctcctccttcctctgcgagtctgtgttggagcagccctgaccaacgctccaataggccgggatccagccatacttcaatggatcccaggggtatcttgaaggcatttcccaagcggcagaaaattcatgctgatgcatcatcaaaagtacttgcaaagattcctaggagggaagagggagaagaagcagaagagtggctgagctcccttcgggcccatgttgtgcgcactggcattggacgagcccgggcagaactctttgagaagcagattgttcagcatggcggccagctatgccctgcccagggcccaggtgtcactcacattgtggtggatgaaggcatggactatgagcgagccctccgccttctcagactaccccagctgcccccgggtgctcagctggtgaagtcagcctggctgagcttgtgccttcaggagaggaggctggtggatgtagctggattcagcatcttcatccccagtaggtacttggaccatccacagcccagcaaggcagagcaggatgcttctattcctcctggcacccatgaggccctgcttcagacagccctttctcctcctcctcctcccaccaggcctgtgtctcctccccaaaaggcaaaagaggcaccaaacacccaagcccagcccatctctgatgatgaagccagtgatggggaagaaacccaggttagtgcagctgatctggaagccctcatcagtggccactaccccacctcccttgagggagattgtgagcctagcccagcccctgctgtcctggataagtgggtctgtgcacagccctcaagccagaaggcgaccaatcacaacctccatatcacagagaagctggaagttctggccaaagcctacagtgttcagggagacaagtggagggccctgggctatgccaaggccatcaatgccctcaagagcttccataagcctgtcacctcgtaccaggaggcctgcagtatccctgggattgggaagcggatggctgagaaaatcatagagatcctggagagcgggcatttgcggaagctggaccatatcagtgagagcgtgcctgtcttggagctcttctccaacatctggggagctgggaccaagactgcccagatgtggtaccaacagggcttccgaagtctggaagacatccgcagccaggcctccctgacaacccagcaggccatcggcctgaagcattacagtgacttcctggaacgtatgcccagggaggaggctacagagattgagcagacagtccagaaagcagcccaggcctttaactctgggctgctgtgtgtggcatgtggttcataccgacggggaaaggcgacctgtggtgatgtcgacgtgctcatcactcacccagatggccggtcccaccggggtatcttcagccgcctccttgacagtcttcggcaggaagggttcctcacagatgacttggtgagccaagaggagaatggtcagcaacagaagtacttgggggtgtgccggctcccagggccagggcggcggcaccggcgcctggacatcatcgtggtgccctatagcgagtttgcctgtgccctgctctacttcaccggctctgcacacttcaaccgctccatgcgagccctggccaaaaccaagggcatgagtctgtcagaacatgccctcagcactgctgtggtccggaacacccatggctgcaaggtggggcctggccgagtgctgcccactcccactgagaaggatgtcttcaggctcttaggcctcccctaccgagaacctgctgagcgggactggtgacccatggctgggggtgctgaggagagccgagttggactggctacccctcctggccacccagtactccctccagcctcagctggctgaacctcgccgctccaaccaccagcttcctcagcgagcagggcccagggctctgggcctgaagcaagagccagcccggctcccagtgtctgcccggctcccagtgtctgcccagccctctcccagacaggagcaggctgccaccccttctacctcaccactgcccctcgaagaattttgcaaatggccccttgccccattttaagcaggagcaggtggctggtttgaagccccaggtatcccccttccctgctatgggaaaggccaagctgctgggtggggacagaagctgcaggggagagggaagcagccgtgctgtcaacatcatccggcaccctctggggtaggagaacagccattccacatgtgttccctctatccgtcctgcttcctgggcagctggtggtgctgggaatggggtgccccagccttggtgaggacagtgttgggaggcccaggggcccagtaaagtgcatttgacattg

SEQ ID NO: 167420 - DNA, 1536 bp, Homo sapiens
  Payload ID: 12938
  Gene Symbol: POLL
  Gene Name: polymerase (DNA directed), lambda
  ENST ID: ENST00000370168
  CDS Start-End: 219-965
cctggctctgcccacaatcaccagggcagcttggtaaggatgaagatgacaaggtccatcctcagactgatggaatcatgaacgagcatcttaggatagtggcagggctggatgatggcatgtttcccatgctccctgcctttcccaagtcctgctgagtacagacccaactgcccctaggttggtcctgcctctagccttccctagagtctggggcgatggaagccttgtgtgtgtgctcactcatgcctcttcattggtcctggatccttacagcttcccatctggctgcttttttccagggcttccgaagtctggaagacatccgcagccaggcctccctgacaacccagcaggccatcggcctgaagcattacagtgacttcctggaacgtatgcccagggaggaggctacagagattgagcagacagtccagaaagcagcccaggcctttaactctgggctgctgtgtgtggcatgtggttcataccgacggggaaaggcgacctgtggtgatgtcgacgtgctcatcactcacccagatggccggtcccaccggggtatcttcagccgcctccttgacagtcttcggcaggaagggttcctcacagatgacttggtgagccaagaggagaatggtcagcaacagaagtacttgggggtgtgccggctcccagggccagggcggcggcaccggcgcctggacatcatcgtggtgccctatagcgagtttgcctgtgccctgctctacttcaccggctctgcacacttcaaccgctccatgcgagccctggccaaaaccaagggcatgagtctgtcagaacatgccctcagcactgctgtggtccggaacacccatggctgcaaggtggggcctggccgagtgctgcccactcccactgagaaggatgtcttcaggctcttaggcctcccctaccgagaacctgctgagcgggactggtgacccatggctgggggtgctgaggagagccgagttggactggctacccctcctggccacccagtactccctccagcctcagctggctgaacctcgccgctccaaccaccagcttcctcagcgagcagggcccagggctctgggcctgaagcaagagccagcccggctcccagtgtctgcccggctcccagtgtctgcccagccctctcccagacaggagcaggctgccaccccttctacctcaccactgcccctcgaagaattttgcaaatggccccttgccccattttaagcaggagcaggtggctggtttgaagccccaggtatcccccttccctgctatgggaaaggccaagctgctgggtggggacagaagctgcaggggagagggaagcagccgtgctgtcaacatcatccggcaccctctggggtaggagaacagccattccacatgtgttccctctatccgtcctgcttcctgggcagctggtggtgctgggaatggggtgccccagccttggtgaggacagtgttgggaggcccaggggcccagtaaagtgcatttgacattgaa

SEQ ID NO: 167421 - DNA, 2360 bp, Homo sapiens
  Payload ID: 12938
  Gene Symbol: POLL
  Gene Name: polymerase (DNA directed), lambda
  Uniprot ID: Q9UGP5
  ENST ID: ENST00000370169
  CDS Start-End: 62-1789
gatttccacgtgcagcagccctgaccaacgctccaataggccgggatccagccatacttcaatggatcccaggggtatcttgaaggcatttcccaagcggcagaaaattcatgctgatgcatcatcaaaagtacttgcaaagattcctaggagggaagagggagaagaagcagaagagtggctgagctcccttcgggcccatgttgtgcgcactggcattggacgagcccgggcagaactctttgagaagcagattgttcagcatggcggccagctatgccctgcccagggcccaggtgtcactcacattgtggtggatgaaggcatggactatgagcgagccctccgccttctcagactaccccagctgcccccgggtgctcagctggtgaagtcagcctggctgagcttgtgccttcaggagaggaggctggtggatgtagctggattcagcatcttcatccccagtaggtacttggaccatccacagcccagcaaggcagagcaggatgcttctattcctcctggcacccatgaggccctgcttcagacagccctttctcctcctcctcctcccaccaggcctgtgtctcctccccaaaaggcaaaagaggcaccaaacacccaagcccagcccatctctgatgatgaagccagtgatggggaagaaacccaggttagtgcagctgatctggaagccctcatcagtggccactaccccacctcccttgagggagattgtgagcctagcccagcccctgctgtcctggataagtgggtctgtgcacagccctcaagccagaaggcgaccaatcacaacctccatatcacagagaagctggaagttctggccaaagcctacagtgttcagggagacaagtggagggccctgggctatgccaaggccatcaatgccctcaagagcttccataagcctgtcacctcgtaccaggaggcctgcagtatccctgggattgggaagcggatggctgagaaaatcatagagatcctggagagcgggcatttgcggaagctggaccatatcagtgagagcgtgcctgtcttggagctcttctccaacatctggggagctgggaccaagactgcccagatgtggtaccaacagggcttccgaagtctggaagacatccgcagccaggcctccctgacaacccagcaggccatcggcctgaagcattacagtgacttcctggaacgtatgcccagggaggaggctacagagattgagcagacagtccagaaagcagcccaggcctttaactctgggctgctgtgtgtggcatgtggttcataccgacggggaaaggcgacctgtggtgatgtcgacgtgctcatcactcacccagatggccggtcccaccggggtatcttcagccgcctccttgacagtcttcggcaggaagggttcctcacagatgacttggtgagccaagaggagaatggtcagcaacagaagtacttgggggtgtgccggctcccagggccagggcggcggcaccggcgcctggacatcatcgtggtgccctatagcgagtttgcctgtgccctgctctacttcaccggctctgcacacttcaaccgctccatgcgagccctggccaaaaccaagggcatgagtctgtcagaacatgccctcagcactgctgtggtccggaacacccatggctgcaaggtggggcctggccgagtgctgcccactcccactgagaaggatgtcttcaggctcttaggcctcccctaccgagaacctgctgagcgggactggtgacccatggctgggggtgctgaggagagccgagttggactggctacccctcctggccacccagtactccctccagcctcagctggctgaacctcgccgctccaaccaccagcttcctcagcgagcagggcccagggctctgggcctgaagcaagagccagcccggctcccagtgtctgcccggctcccagtgtctgcccagccctctcccagacaggagcaggctgccaccccttctacctcaccactgcccctcgaagaattttgcaaatggccccttgccccattttaagcaggagcaggtggctggtttgaagccccaggtatcccccttccctgctatgggaaaggccaagctgctgggtggggacagaagctgcaggggagagggaagcagccgtgctgtcaacatcatccggcaccctctggggtaggagaacagccattccacatgtgttccctctatccgtcctgcttcctgggcagctggtggtgctgggaatggggtgccccagccttggtgaggacagtgttgggaggcccaggggcccagtaaagtgcatttgacattgaa

SEQ ID NO: 167422 - DNA, 2308 bp, Homo sapiens
  Payload ID: 12938
  Gene Symbol: POLL
  Gene Name: polymerase (DNA directed), lambda
  ENST ID: ENST00000370172
  CDS Start-End: 274-1737
atttgccctccttccccccttcgtccgctctcattggctctgctgccttcatgtgcttcagccctacgttgtttatgtccagaatcagatattggagctgactctgcctgtccagggcctgcagagtggctgagctcccttcgggcccatgttgtgcgcactggcattggacgagcccgggcagaactctttgagaagcagattgttcagcatggcggccagctatgccctgcccagggcccaggtgtcactcacattgtggtggatgaaggcatggactatgagcgagccctccgccttctcagactaccccagctgcccccgggtgctcagctggtgaagtcagcctggctgagcttgtgccttcaggagaggaggctggtggatgtagctggattcagcatcttcatccccagtaggtacttggaccatccacagcccagcaaggcagagcaggatgcttctattcctcctggcacccatgaggccctgcttcagacagccctttctcctcctcctcctcccaccaggcctgtgtctcctccccaaaaggcaaaagaggcaccaaacacccaagcccagcccatctctgatgatgaagccagtgatggggaagaaacccaggttagtgcagctgatctggaagccctcatcagtggccactaccccacctcccttgagggagattgtgagcctagcccagcccctgctgtcctggataagtgggtctgtgcacagccctcaagccagaaggcgaccaatcacaacctccatatcacagagaagctggaagttctggccaaagcctacagtgttcagggagacaagtggagggccctgggctatgccaaggccatcaatgccctcaagagcttccataagcctgtcacctcgtaccaggaggcctgcagtatccctgggattgggaagcggatggctgagaaaatcatagagatcctggagagcgggcatttgcggaagctggaccatatcagtgagagcgtgcctgtcttggagctcttctccaacatctggggagctgggaccaagactgcccagatgtggtaccaacagggcttccgaagtctggaagacatccgcagccaggcctccctgacaacccagcaggccatcggcctgaagcattacagtgacttcctggaacgtatgcccagggaggaggctacagagattgagcagacagtccagaaagcagcccaggcctttaactctgggctgctgtgtgtggcatgtggttcataccgacggggaaaggcgacctgtggtgatgtcgacgtgctcatcactcacccagatggccggtcccaccggggtatcttcagccgcctccttgacagtcttcggcaggaagggttcctcacagatgacttggtgagccaagaggagaatggtcagcaacagaagtacttgggggtgtgccggctcccagggccagggcggcggcaccggcgcctggacatcatcgtggtgccctatagcgagtttgcctgtgccctgctctacttcaccggctctgcacacttcaaccgctccatgcgagccctggccaaaaccaagggcatgagtctgtcagaacatgccctcagcactgctgtggtccggaacacccatggctgcaaggtggggcctggccgagtgctgcccactcccactgagaaggatgtcttcaggctcttaggcctcccctaccgagaacctgctgagcgggactggtgacccatggctgggggtgctgaggagagccgagttggactggctacccctcctggccacccagtactccctccagcctcagctggctgaacctcgccgctccaaccaccagcttcctcagcgagcagggcccagggctctgggcctgaagcaagagccagcccggctcccagtgtctgcccggctcccagtgtctgcccagccctctcccagacaggagcaggctgccaccccttctacctcaccactgcccctcgaagaattttgcaaatggccccttgccccattttaagcaggagcaggtggctggtttgaagccccaggtatcccccttccctgctatgggaaaggccaagctgctgggtggggacagaagctgcaggggagagggaagcagccgtgctgtcaacatcatccggcaccctctggggtaggagaacagccattccacatgtgttccctctatccgtcctgcttcctgggcagctggtggtgctgggaatggggtgccccagccttggtgaggacagtgttgggaggcccaggggcccagtaaagtgcatttgacattgaa

SEQ ID NO: 167423 - DNA, 683 bp, Homo sapiens
  Payload ID: 12938
  Gene Symbol: POLL
  Gene Name: polymerase (DNA directed), lambda
  ENST ID: ENST00000454524
  CDS Start-End: 229-683
ccttcatgtgcttcagccctacgttgtttatgtccagaatcagatattggagctgactctgcctgtccagggcctgcagagtggctgagctcccttcgggcccatgttgtgcgcactggcattggacgagcccgggcagaactctttgagaagcagattgttcagcatggcggccagctatgccctgcccagggcccaggtgtcactcacattgtggtggatgaaggcatggactatgagcgagccctccgccttctcagactaccccagctgcccccgggtgctcagctggtgaagtcagcctggctgagcttgtgccttcaggagaggaggctggtggatgtagctggattcagcatcttcatccccagtagcccatctctgatgatgaagccagtgatggggaagaaacccaggttagtgcagctgatctggaagccctcatcagtggccactaccccacctcccttgagggagattgtgagcctagcccagcccctgctgtcctggataagtgggtctgtgcacagccctcaagccagaaggcgaccaatcacaacctccatatcacagagaagctggaagttctggccaaagcctacagtgttcagggagacaagtggagggccctgggctatgccaaggccatcaatgccctcaagagcttccataagcctgtcacc

SEQ ID NO: 167424 - DNA, 855 bp, Homo sapiens
  Payload ID: 12938
  Gene Symbol: POLL
  Gene Name: polymerase (DNA directed), lambda
  ENST ID: ENST00000413344
  CDS Start-End: 50-855
cttcgtccgctctcattggctctgctggccgggatccagccatacttcaatggatcccaggggtatcttgaaggcatttcccaagcggcagaaaattcatgctgatgcatcatcaaaagtacttgcaaagattcctaggagggaagagggagaagaagcagaagagtggctgagctcccttcgggcccatgttgtgcgcactggcattggacgagcccgggcagaactctttgagaagcagattgttcagcatggcggccagctatgccctgcccagggcccaggtgtcactcacattgtggtggatgaaggcatggactatgagcgagccctccgccttctcagactaccccagctgcccccgggtgctcagctggtgaagtcagcctggctgagcttgtgccttcaggagaggaggctggtggatgtagctggattcagcatcttcatccccagtaggtacttggaccatccacagcccagcaaggcagagcaggatgcttctattcctcctggcacccatgaggccctgcttcagacagccctttctcctcctcctcctcccaccaggcctgtgtctcctccccaaaaggcaaaagaggcaccaaacacccaagcccagcccatctctgatgatgaagccagtgatggggaagaaacccaggttagtgcagctgatctggaagccctcatcagtggccactaccccacctcccttgagggagattgtgagcctagcccagcccctgctgtcctggataagtgggtctgtgcacagccctcaagccagaaggcgaccaatcacaacctccatatcacagagaagctggaagttctggccaaagcctacagtgt

SEQ ID NO: 167425 - DNA, 1457 bp, Homo sapiens
  Payload ID: 12938
  Gene Symbol: POLL
  Gene Name: polymerase (DNA directed), lambda
  ENST ID: ENST00000415897
  CDS Start-End: 47-1457
cagccctgaccaacgctccaataggccgggatccagccatacttcaatggatcccaggggtatcttgaaggcatttcccaagcggcagaaaattcatgctgatgcatcatcaaaagtacttgcaaagattcctaggagggaagagggagaagaagcagaagagtggctgagctcccttcgggcccatgttgtgcgcactggcattggacgagcccgggcagaactctttgagaagcagattgttcagcatggcggccagctatgccctgcccagggcccaggtgtcactcacattgtggtggatgaaggcatggactatgagcgagccctccgccttctcagactaccccagctgcccccgggtgctcagctggtgaagtcagcctggctgagcttgtgccttcaggagaggaggctggtggatgtagctggattcagcatcttcatccccagtaggtacttggaccatccacagcccagcaaggcagagcaggatgcttctattcctcctggcacccatgaggccctgcttcagacagccctttctcctcctcctcctcccaccaggcctgtgtctcctccccaaaaggcaaaagaggcaccaaacacccaagcccagcccatctctgatgatgaagccagtgatggggaagaaacccaggaggcctgcagtatccctgggattgggaagcggatggctgagaaaatcatagagatcctggagagcgggcatttgcggaagctggaccatatcagtgagagcgtgcctgtcttggagctcttctccaacatctggggagctgggaccaagactgcccagatgtggtaccaacagggcttccgaagtctggaagacatccgcagccaggcctccctgacaacccagcaggccatcggcctgaagcattacagtgacttcctggaacgtatgcccagggaggaggctacagagattgagcagacagtccagaaagcagcccaggcctttaactctgggctgctgtgtgtggcatgtggttcataccgacggggaaaggcgacctgtggtgatgtcgacgtgctcatcactcacccagatggccggtcccaccggggtatcttcagccgcctccttgacagtcttcggcaggaagcagtcccctctgttgggccagggttcctcacagatgacttggtgagccaagaggagaatggtcagcaacagaagtacttgggggtgtgccggctcccagggccagggcggcggcaccggcgcctggacatcatcgtggtgccctatagcgagtttgcctgtgccctgctctacttcaccggctctgcacacttcaaccgctccatgcgagccctggccaaaaccaagggcatgagtctgtcagaacatgccctcagcactgctgtggtccggaacacccatggctgcaaggtggggcctggccgagtgctgcccactcccactg

SEQ ID NO: 167426 - DNA, 784 bp, Homo sapiens
  Payload ID: 12938
  Gene Symbol: POLL
  Gene Name: polymerase (DNA directed), lambda
  ENST ID: ENST00000429502
  CDS Start-End: 131-784
cccttcgtccgctctcattggctctgctgcagccctgaccaacgctccaataggccgggatccagccatacttcaatggatcccaggggtatcttgaaggcatttcccaagcggcagaaaattcatgctgatgcatcatcaaaagtacttgcaaagattcctaggagggaagagggagaagaagcagaaggaggcctgcagtatccctgggattgggaagcggatggctgagaaaatcatagagatcctggagagcgggcatttgcggaagctggaccatatcagtgagagcgtgcctgtcttggagctcttctccaacatctggggagctgggaccaagactgcccagatgtggtaccaacagggcttccgaagtctggaagacatccgcagccaggcctccctgacaacccagcaggccatcggcctgaagcattacagtgacttcctggaacgtatgcccagggaggaggctacagagattgagcagacagtccagaaagcagcccaggcctttaactctgggctgctgtgtgtggcatgtggttcataccgacggggaaaggcgacctgtggtgatgtcgacgtgctcatcactcacccagatggccggtcccaccggggtatcttcagccgcctccttgacagtcttcggcaggaagggttcctcacagatgacttggtgagccaagaggagaatggtcagcaacagaagtacttgggggtgtgccggctcccagggccagggcggcggcaccggcgcctggacatcatcgtggtgccc

SEQ ID NO: 167427 - DNA, 1049 bp, Homo sapiens
  Payload ID: 12938
  Gene Symbol: POLL
  Gene Name: polymerase (DNA directed), lambda
  ENST ID: ENST00000426919
  CDS Start-End: 46-1049
agccctgaccaacgctccaataggccgggatccagccatacttcaatggatcccaggggtatcttgaaggcatttcccaagcggcagaaaattcatgctgatgcatcatcaaaaccttcatgtgcttcagccctacgttgtttatgtccagaatcagatattggagctgactctgcctgtccagggcctgcagagtggctgagctcccttcgggcccatgttgtgcgcactggcattggacgagcccgggcagaactctttgagaagcagattgttcagcatggcggccagctatgccctgcccagggcccaggtgtcactcacattgtggtggatgaaggcatggactatgagcgagccctccgccttctcagactaccccagctgcccccgggtgctcagctggtgaagtcagcctggctgagcttgtgccttcaggagaggaggctggtggatgtagctggattcagcatcttcatccccagtaggtacttggaccatccacagcccagcaaggcagagcaggatgcttctattcctcctggcacccatgaggccctgcttcagacagccctttctcctcctcctcctcccaccaggcctgtgtctcctccccaaaaggcaaaagaggcaccaaacacccaagcccagcccatctctgatgatgaagccagtgatggggaagaaacccaggttagtgcagctgatctggaagccctcatcagtggccactaccccacctcccttgagggagattgtgagcctagcccagcccctgctgtcctggataagtgggtctgtgcacagccctcaagccagaaggcgaccaatcacaacctccatatcacagagaagctggaagttctggccaaagcctacagtgttcagggagacaagtggagggccctgggctatgccaaggccatcaatgccctcaagagcttccataagcctgtcacctcgtaccaggaggcctgcagtatccctgggattgggaagcggatggctgagaaaatcatagagatcctggagagcgggcatttgcggaa

SEQ ID NO: 167428 - DNA, 1022 bp, Homo sapiens
  Payload ID: 12938
  Gene Symbol: POLL
  Gene Name: polymerase (DNA directed), lambda
  ENST ID: ENST00000430045
  CDS Start-End: 458-1022
cccttcgtccgctctcattggctctgctggtaagtggtctattcctgcccacccccgggtgactagcttggccagtagtcgaccccacccggggaccgactctgggggttggagagactcttggggccggggtcgggcactccagctttcttctagccccgagctgggattccctggcctgcgccagctgcgtacacggcgagtacaccgcacctgcccgggacttcacccgcagctgcgagactcctccattcccggagggctccccacacctgctgcggccgtgccccatctccccgcagctgcggcgctgagcacccccatgtcgagaggctgagaccaggacaggtgcagggcgttcccactcacccccgaaagtcctcctccttcctctgcgagtctgtgttggagcagccctgaccaacgctccaataggccgggatccagccatacttcaatggatcccaggggtatcttgaaggcatttcccaagcggcagaaaattcatgctgatgcatcatcaaaagtacttgcaaagattcctaggagggaagagggagaagaagcagaagagtggctgagctcccttcgggcccatgttgtgcgcactggcattggacgagcccgggcagaactctttgagaagcagattgttcagcatggcggccagctatgccctgcccagggcccaggtgtcactcacattgtggtggatgaaggcatggactatgagcgagccctccgccttctcagactaccccagctgcccccgggtgctcagctggtgaagtcagcctggctgagcttgtgccttcaggagaggaggctggtggatgtagctggattcagcatcttcatccccagtaggtacttggaccatccacagcccagcaaggcagagcaggatgcttctattcctcctggcacccatgaggccctgcttcagacagccctttctcctcctcctcctcccaccaggcctgtgtctcctccccaaaaggcaaaagaggcaccaaacaccc

SEQ ID NO: 167429 - DNA, 1953 bp, Homo sapiens
  Payload ID: 12938
  Gene Symbol: POLL
  Gene Name: polymerase (DNA directed), lambda
  Uniprot ID: Q9UGP5
  ENST ID: ENST00000628479
  CDS Start-End: 482-1384
tgactcggaagctattctggccatttgccctccttccccccttcgtccgctctcattggctctgctggtaagtggtctattcctgcccacccccgggtgactagcttggccagtagtcgaccccacccggggaccgactctgggggttggagagactcttggggccggggtcgggcactccagctttcttctagccccgagctgggattccctggcctgcgccagctgcgtacacggcgagtacaccgcacctgcccgggacttcacccgcagctgcgagactcctccattcccggagggctccccacacctgctgcggccgtgccccatctccccgcagctgcggcgctgagcacccccatgtcgagaggctgagaccaggacagcagccctgaccaacgctccaataggccgggatccagccatacttcaatggatcccaggggtatcttgaaggcatttcccaagcggcagaaaattcatgctgatgcatcatcaaaagtacttgcaaagattcctaggagggaagagggagaagaagcagaaggaggcctgcagtatccctgggattgggaagcggatggctgagaaaatcatagagatcctggagagcgggcatttgcggaagctggaccatatcagtgagagcgtgcctgtcttggagctcttctccaacatctggggagctgggaccaagactgcccagatgtggtaccaacagggcttccgaagtctggaagacatccgcagccaggcctccctgacaacccagcaggccatcggcctgaagcattacagtgacttcctggaacgtatgcccagggaggaggctacagagattgagcagacagtccagaaagcagcccaggcctttaactctgggctgctgtgtgtggcatgtggttcataccgacggggaaaggcgacctgtggtgatgtcgacgtgctcatcactcacccagatggccggtcccaccggggtatcttcagccgcctccttgacagtcttcggcaggaagggttcctcacagatgacttggtgagccaagaggagaatggtcagcaacagaagtacttgggggtgtgccggctcccagggccagggcggcggcaccggcgcctggacatcatcgtggtgccctatagcgagtttgcctgtgccctgctctacttcaccggctctgcacacttcaaccgctccatgcgagccctggccaaaaccaagggcatgagtctgtcagaacatgccctcagcactgctgtggtccggaacacccatggctgcaaggtggggcctggccgagtgctgcccactcccactgagaaggatgtcttcaggctcttaggcctcccctaccgagaacctgctgagcgggactggtgacccatggctgggggtgctgaggagagccgagttggactggctacccctcctggccacccagtactccctccagcctcagctggctgaacctcgccgctccaaccaccagcttcctcagcgagcagggcccagggctctgggcctgaagcaagagccagcccggctcccagtgtctgcccggctcccagtgtctgcccagccctctcccagacaggagcaggctgccaccccttctacctcaccactgcccctcgaagaattttgcaaatggccccttgccccattttaagcaggagcaggtggctggtttgaagccccaggtatcccccttccctgctatgggaaaggccaagctgctgggtggggacagaagctgcaggggagagggaagcagccgtgctgtcaacatcatccggcaccctctggggtaggagaacagccattccacatgtgttccctctatccgtcctgcttcctgggcagctggtggtgctgggaatggggtgccccagccttggtgaggacagtgttgggaggcccaggggcccagtaaagtgcatttgacattg

SEQ ID NO: 167430 - DNA, 2631 bp, Homo sapiens
  Payload ID: 12939
  Gene Symbol: POLM
  Gene Name: polymerase (DNA directed), mu
  Uniprot ID: Q9NP87
  ENST ID: ENST00000242248
  CDS Start-End: 103-1587
ccgcccgcccacccgcttccgtcagcctcactggggcttccttccgtctcgctcggagtttccctctgcgttcgctccgcgctgctggaggctgtcgtcccaatgctccccaaacggcggcgagcgcgggtcgggtcccctagcggcgatgccgcttcctccacgccgccctcgacgcgcttcccgggagtcgccatctacctggtcgagcctcgcatgggtcgcagccgccgggccttcctcacaggcctggcgcgctccaaaggcttccgcgtccttgacgcctgcagctccgaagcgacacatgttgtgatggaagagacctcagcagaggaggccgtcagctggcaggagcgcaggatggcagctgctcccccgggttgcacccccccagctctgctggacataagctggttaacagagagcctgggagctgggcagcctgtacctgtggagtgccggcaccgcctggaggtggctgggccaaggaaggggcctctgagcccagcatggatgcctgcctatgcctgccagcgccctacgcccctcacacaccacaacactggcctctccgaggctctggagatactggccgaggcagcaggctttgaaggcagtgagggccgcctcctcaccttctgcagagcagcctcggtgctcaaggcccttcccagccctgtcacaaccctgagccagctgcaggggcttccccactttggagaacactcctctagggttgtccaggagctgctggagcatggagtgtgtgaggaggtggagagagttcggcgctcagagaggtaccagaccatgaagctcttcacccagatcttcggggtcggtgtgaagactgctgaccggtggtaccgggaaggactgcgaaccttagatgacctccgagagcagccccagaaactaacccaacagcagaaagcggggctccagcaccaccaggacctgagcaccccagtcctgcggtccgatgtagatgccctgcagcaggtggtggaggaagctgtggggcaggccctgcctggggccaccgtcacgctgaccggcggcttccgcagggggaagttgcagggccatgacgtggacttcctcatcacccaccccaaggagggtcaggaggcggggctgctgcctagagtgatgtgccgcctgcaggaccagggcctcatcctgtaccaccagcaccagcacagctgctgtgagtcccctacccgcctggcccaacagagccacatggacgcttttgagagaagtttctgcattttccgcctaccacaacctccaggggctgctgtggggggatccacgaggccctgcccatcctggaaggccgtgagagtggacttggtagttgcacccgtcagccagttccctttcgccctgctcggttggactggctccaagcttttccagcgggagctgcgccgcttcagccggaaggagaagggcctgtggctgaacagccatgggctgtttgacccggagcagaagacatttttccaagcggcttcagaggaagacatcttcagacacctgggccttgagtaccttcctccagagcagagaaacgcctgagcctgcctgtgtcccccacttccactcaggaaattgggctgcccccaacctggccactgaatgtctccaggcagatatgctgccccctgacccccaccttcacccctccccgccaaggcctggctcttccggaggtcaattgtgcctgcaggatcagttgagcccctgctggtgtgctgcagggtgtgatgaggtgggagccctcagtgccagcctcatcactgtgtgaccctgggtctgctcttagcctccccatggctcacgttcctgccctggatgggatgtgagtggggcccacatcgtggagctgtggtggggcctgcagtcatgaatggcaagtggtccctgatgtgcagtgtctcattagttgcactgcagttaactgtggctcctgcagggcaccctgcccagaatgcccagaagagaaccatgcatacctgcactgcatttgagagccatgagctggaggctgtggttcgtgccagcaaggagcctactgtctggtgtgctgtaggcatctggagagggagagggcctgggtaggagctgggaggaagataattttcaactatggggcttcagtactgcagcgccccgagccaggctctgtgcttctgcctttaaggcctgttctcagcacaatgtctcaaaaataggtcatatcctgccactcccgtcgcagagccctttaatggttccaaaccctaagtccacacatagcccctggctctggcatctctccagccccactggccccgagctgcttgactcaccggcttcctatttgatgcacccaggcccccttgtggccaactccctccccttctcactgaggcagaagcactgaggtgggctggacatgggtgccctccacgtccctcatatccccaggcacactctggcctcaggttttgccctggccatgtcatctacctggagtgggccctccccttcttcaggccttgaatcaaaagccactttgttaggcgaggatttcccagaccactcatcacattaaaaaatattttgaaaacatgcagtaaa

SEQ ID NO: 167431 - DNA, 2444 bp, Homo sapiens
  Payload ID: 12939
  Gene Symbol: POLM
  Gene Name: polymerase (DNA directed), mu
  Uniprot ID: Q9NP87
  ENST ID: ENST00000335195
  CDS Start-End: 27-1400
ccgcgctgctggaggctgtcgtcccaatgctccccaaacggcggcgagcgcgggtcgggtcccctagcggcgatgccgcttcctccacgccgccctcgacgcgcttcccgggagtcgccatctacctggtcgagcctcgcatgggtcgcagccgccgggccttcctcacaggcctggcgcgctccaaaggcttccgcgtccttgacgcctgcagctccgaagcgacacatgttgtgatggaagagacctcagcagaggaggccgtcagctggcaggagcgcaggatggcagctgctcccccgggttgcacccccccagctctgctggacataagctggttaacagagagcctgggagctgggcagcctgtacctgtggagtgccggcaccgcctggaggtggctgggccaaggaaggggcctctgagcccagcatggatgcctgcctatgcctgccagcgccctacgcccctcacacaccacaacactggcctctccgaggctctggagatactggccgaggcagcaggctttgaaggcagtgagggccgcctcctcaccttctgcagagcagcctcggtgctcaaggcccttcccagccctgtcacaaccctgagccagctgcaggggcttccccactttggagaacactcctctagggttgtccaggagctgctggagcatggagtgtgtgaggaggtggagagagttcggcgctcagagaggtaccagaccatgaagctcttcacccagatcttcggggtcggtgtgaagactgctgaccggtggtaccgggaaggactgcgaaccttagatgacctccgagagcagccccagaaactaacccaacagcagaaagcggcaccaccaggacctgagcaccccagtcctgcggtccgatgtagatgccctgcagcaggtggtggaggaagctgtggggcaggccctgcctggggccaccgtcacgctgaccggcggcttccgcagggcctcatcctgtaccaccagcaccagcacagctgctgtgagtcccctacccgcctggcccaacagagccacatggacgcttttgagagaagtttctgcattttccgcctaccacaacctccaggggctgctgtggggggatccacgaggccctgcccatcctggaaggccgtgagagtggacttggtagttgcacccgtcagccagttccctttcgccctgctcggttggactggctccaagcttttccagcgggagctgcgccgcttcagccggaaggagaagggcctgtggctgaacagccatgggctgtttgacccggagcagaagacatttttccaagcggcttcagaggaagacatcttcagacacctgggccttgagtaccttcctccagagcagagaaacgcctgagcctgcctgtgtcccccacttccactcaggaaattgggctgcccccaacctggccactgaatgtctccaggcagatatgctgccccctgacccccaccttcacccctccccgccaaggcctggctcttccggaggtcaattgtgcctgcaggatcagttgagcccctgctggtgtgctgcagggtgtgatgaggtgggagccctcagtgccagcctcatcactgtgtgaccctgggtctgctcttagcctccccatggctcacgttcctgccctggatgggatgtgagtggggcccacatcgtggagctgtggtggggcctgcagtcatgaatggcaagtggtccctgatgtgcagtgtctcattagttgcactgcagttaactgtggctcctgcagggcaccctgcccagaatgcccagaagagaaccatgcatacctgcactgcatttgagagccatgagctggaggctgtggttcgtgccagcaaggagcctactgtctggtgtgctgtaggcatctggagagggagagggcctgggtaggagctgggaggaagataattttcaactatggggcttcagtactgcagcgccccgagccaggctctgtgcttctgcctttaaggcctgttctcagcacaatgtctcaaaaataggtcatatcctgccactcccgtcgcagagccctttaatggttccaaaccctaagtccacacatagcccctggctctggcatctctccagccccactggccccgagctgcttgactcaccggcttcctatttgatgcacccaggcccccttgtggccaactccctccccttctcactgaggcagaagcactgaggtgggctggacatgggtgccctccacgtccctcatatccccaggcacactctggcctcaggttttgccctggccatgtcatctacctggagtgggccctccccttcttcaggccttgaatcaaaagccactttgttaggcgaggatttcccagaccactcatcacattaaaaaatattttgaaaacatgcagtaaa

SEQ ID NO: 167432 - DNA, 2380 bp, Homo sapiens
  Payload ID: 12939
  Gene Symbol: POLM
  Gene Name: polymerase (DNA directed), mu
  Uniprot ID: Q9NP87
  ENST ID: ENST00000395831
  CDS Start-End: 48-1574
gagtttccctctgcgttcgctccgcgctgctggaggctgtcgtcccaatgctccccaaacggcggcgagcgcgggtcgggtcccctagcggcgatgccgcttcctccacgccgccctcgacgcgcttcccgggagtcgccatctacctggtcgagcctcgcatgggtcgcagccgccgggccttcctcacaggcctggcgcgctccaaaggcttccgcgtccttgacgcctgcagctccgaagcgacacatgttgtgatggaagagacctcagcagaggaggccgtcagctggcaggagcgcaggatggcagctgctcccccgggttgcacccccccagctctgctggacataagctggttaacagagagcctgggagctgggcagcctgtacctgtggagtgccggcaccgcctggaggtggctgggccaaggaaggggcctctgagcccagcatggatgcctgcctatgcctgccagcgccctacgcccctcacacaccacaacactggcctctccgaggctctggagatactggccgaggcagcaggctttgaaggcagtgagggccgcctcctcaccttctgcagagcagcctcggtgctcaaggcccttcccagccctgtcacaaccctgagccagctgcaggggcttccccactttggagaacactcctctagggttgtccaggagctgctggagcatggagtgtgtgaggaggtggagagagttcggcgctcagagagggctccagcaccaccaggacctgagcaccccagtcctgcggtccgatgtagatgccctgcagcaggtggtggaggaagctgtggggcaggccctgcctggggccaccgtcacgctgaccggcggcttccgcagggcctcatcctgtaccaccagcaccagcacagctgctgtgagtcccctacccgcctggcccaacagagccacatggacgcttttgagagaagtttctgcattttccgcctaccacaacctccaggggctgctgtggggggatccacgaggccctgcccatcctggaaggccgtgagagtggacttggtagttgcacccgtcagccagttccctttcgccctgctcggttggactggctccaagcttttccagcgggagctgcgccgcttcagccggaaggagaagggcctgtggctgaacagccatgggctgtttgacccggagcagggaagcagcagtggcaagactcctaggtcacggaagtcctgcttctgttgcagaagacatttttccaagcggcttcagaggaagacatcttcagacacctgggccttgagtaccttcctccagagcagagaaacgcctgagcctgcctgtgtcccccacttccactcaggaaattgggctgcccccaacctggccactgaatgtctccaggcagatatgctgccccctgacccccaccttcacccctccccgccaaggcctggctcttccggaggtcaattgtgcctgcaggatcagttgagcccctgctggtgtgctgcagggtgtgatgaggtgggagccctcagtgccagcctcatcactgtgtgaccctgggtctgctcttagcctccccatggctcacgttcctgccctggatgggatgtgagtggggcccacatcgtggagctgtggtggggcctgcagtcatgaatggcaagtggtccctgatgtgcagtgtctcattagttgcactgcagttaactgtggctcctgcagggcaccctgcccagaatgcccagaagagaaccatgcatacctgcactgcatttgagagccatgagctggaggctgtggttcgtgccagcaaggagcctactgtctggtgtgctgtaggcatctggagagggagagggcctgggtaggagctgggaggaagataattttcaactatggggcttcagtactgcagcgccccgagccaggctctgtgcttctgcctttaaggcctgttctcagcacaatgtctcaaaaataggtcatatcctgccactcccgtcgcagagccctttaatggttccaaaccctaagtccacacatagcccctggctctggcatctctccagccccactggccccgagctgcttgactcaccggcttcctatttgatgcacccaggcccccttgtggccaactccctccccttctcactgaggcagaagcactgaggtgggctggacatgggtgccctccacgtccctcatatccccaggcacactctggcctcaggttttgccctggccatgtcatctacctggagtgggccctccccttcttcaggccttgaatcaaaagccactttgttaggcgaggatttcccagaccactcatcacattaaaaaatattttgaaaaca

SEQ ID NO: 167433 - DNA, 2404 bp, Homo sapiens
  Payload ID: 12939
  Gene Symbol: POLM
  Gene Name: polymerase (DNA directed), mu
  ENST ID: ENST00000435068
  CDS Start-End: 53-520
gctcggagtttccctctgcgttcgctccgcgctgctggaggctgtcgtcccaatgctccccaaacggcggcgagcgcgggtcgggtcccctagcggcgatgccgcttcctccacgccgccctcgacgcgcttcccgggagtcgccatctacctggtcgagcctcgcatgggtcgcagccgccgggccttcctcacaggcctggcgcgctccaaaggcttccgcgtccttgacgcctgcagctccgaagcgacacatgttgtgatggaagagacctcagcagaggaggccgtcagctggcaggagcgcaggatggcagctgctcccccgggttgcacccccccagctctgctggacataagctggttaacagagagcctgggagctgggcagcctgtacctgtggagtgccggcaccgcctggaggagctgctggagcatggagtgtgtgaggaggtggagagagttcggcgctcagagaggtaccagaccatgaagggctccagcaccaccaggacctgagcaccccagtcctgcggtccgatgtagatgccctgcagcaggtggtggaggaagctgtggggcaggccctgcctggggccaccgtcacgctgaccggcggcttccgcaggtaagaaggcccgacgtgcccctctggcttggcttcagacccctccccagtgaagggacctgagtcggggaccctgaagcgggcccactcgttggaagggatgtggcctggggctggagtgagcaggccgtgtccctgagtcagagtcagactgacgccctcagggggaagttgcagggccatgacgtggacttcctcatcacccaccccaaggagggtcaggaggcggggctgctgcctagagtgatgtgccgcctgcaggaccagggcctcatcctgtaccaccagcaccagcacagctgctgtgagtcccctacccgcctggcccaacagagccacatggacgcttttgagagaagtttctgcattttccgcctaccacaacctccaggggctgctgtggggggatccacgaggccctgcccatcctggaaggccgtgagagtggacttggtagttgcacccgtcagccagttccctttcgccctgctcggttggactggctccaagcttttccagcgggagctgcgccgcttcagccggaaggagaagggcctgtggctgaacagccatgggctgtttgacccggagcagggaagcagcagtggcaagactcctaggtcacggaagtcctgcttctgttgcagaagacatttttccaagcggcttcagaggaagacatcttcagacacctgggccttgagtaccttcctccagagcagagaaacgcctgagcctgcctgtgtcccccacttccactcaggaaattgggctgcccccaacctggccactgaatgtctccaggcagatatgctgccccctgacccccaccttcacccctccccgccaaggcctggctcttccggaggtcaattgtgcctgcaggatcagttgagcccctgctggtgtgctgcagggtgtgatgaggtgggagccctcagtgccagcctcatcactgtgtgaccctgggtctgctcttagcctccccatggctcacgttcctgccctggatgggatgtgagtggggcccacatcgtggagctgtggtggggcctgcagtcatgaatggcaagtggtccctgatgtgcagtgtctcattagttgcactgcagttaactgtggctcctgcagggcaccctgcccagaatgcccagaagagaaccatgcatacctgcactgcatttgagagccatgagctggaggctgtggttcgtgccagcaaggagcctactgtctggtgtgctgtaggcatctggagagggagagggcctgggtaggagctgggaggaagataattttcaactatggggcttcagtactgcagcgccccgagccaggctctgtgcttctgcctttaaggcctgttctcagcacaatgtctcaaaaataggtcatatcctgccactcccgtcgcagagccctttaatggttccaaaccctaagtccacacatagcccctggctctggcatctctccagccccactggccccgagctgcttgactcaccggcttcctatttgatgcacccaggcccccttgtggccaactccctccccttctcactgaggcagaagcactgaggtgggctggacatgggtgccctccacgtccctcatatccccaggcacactctggcctcaggttttgccctggccatgtcatctacctggagtgggccctccccttcttcaggccttgaatcaaaagccactttgttaggcgaggatttcccagaccactcatcacattaaaaaatattttgaaaacatgcagt

SEQ ID NO: 167434 - DNA, 550 bp, Homo sapiens
  Payload ID: 12939
  Gene Symbol: POLM
  Gene Name: polymerase (DNA directed), mu
  ENST ID: ENST00000414235
  CDS Start-End: 74-550
actggggcttccttccgtctcgctcggagtttccctctgcgttcgctccgcgctgctggaggctgtcgtcccaatgctccccaaacggcggcgagcgcgggtcgggtcccctagcggcgatgccgcttcctccacgccgccctcgacgcgcttcccgggagtcgccatctacctggtcgagcctcgcatgggtcgcagccgccgggccttcctcacaggcctggcgcgctccaaaggcttccgcgtccttgacgcctgcagctccgaagcgacacatgttgtgatggaagagacctcagcagaggaggccgtcagctggcaggagcgcaggatggcagctgctcccccgggttgcacccccccagctctgctggacataagctggttaacagagagcctgggagctgggcagcctgtacctgtggagtgccggcaccgcctggaggaggctctggagatactggccgaggcagcaggctttgaaggcagtgagggccgcctcctcaccttctgcagagcagcctcggtgctcaaggcccttcccagccct

SEQ ID NO: 167435 - DNA, 1174 bp, Homo sapiens
  Payload ID: 12939
  Gene Symbol: POLM
  Gene Name: polymerase (DNA directed), mu
  ENST ID: ENST00000434229
  CDS Start-End: 46-747
gtttccctctgcgttcgctccgcgctgctggaggctgtcgtcccaatgctccccaaacggcggcgagcgcgggtcgggtcccctagcggcgatgccgcttcctccacgccgccctcgacgcgcttcccgggagtcgccatctacctggtcgagcctcgcatgggtcgcagccgccgggccttcctcacaggcctggcgcgctccaaaggcttccgcgtccttgacgcctgcagctccgaagcgacacatgttgtgatggaagagacctcagcagaggaggccgtcagctggcaggagcgcaggatggcagctgctcccccgggttgcacccccccagctctgctggacataagctggttaacagagagcctgggagctgggcagcctgtacctgtggagtgccggcaccgcctggaggagctgctggagcatggagtgtgtgaggaggtggagagagttcggcgctcagagaggtaccagaccatgaagctcttcacccagatcttcggggtcggtgtgaagactgctgaccggtggtaccgggaaggactgcgaaccttagatgacctccgagagcagccccagaaactaacccaacagcagaaagcggggctccagcaccaccaggacctgagcaccccagtcctgcggtccgatgtagatgccctgcagcaggtggtggaggaagctgtggggcaggccctgcctggggccaccgtcacgctgaccggcggcttccgcaggtaagaaggcccgacgtgcccctctggcttggcttcagacccctccccagtgaagggacctgagtcggggaccctgaagcgggcccactcgttggaagggatgtggcctggggctggagtgagcaggccgtgtccctgagtcagagtcagactgacgccctcagggggaagttgcagggccatgacgtggacttcctcatcacccaccccaaggagggtcaggaggcggggctgctgcctagagtgatgtgccgcctgcaggaccagggcctcatcctgtaccaccagcaccagcacagctgctgtgagtcccctacccgcctggcccaacagagccacatggacgcttttgagagaagtttctgcattttccgcctaccacaacctccaggggctgctgtggggggatccacgaggccctgcccatcctg

SEQ ID NO: 167436 - DNA, 2561 bp, Homo sapiens
  Payload ID: 12939
  Gene Symbol: POLM
  Gene Name: polymerase (DNA directed), mu
  ENST ID: ENST00000430942
  CDS Start-End: 77-805
ctcactggggcttccttccgtctcgctcggagtttccctctgcgttcgctccgcgctgctggaggctgtcgtcccaatgctccccaaacggcggcgagcgcgggtcgggtcccctagcggcgatgccgcttcctccacgccgccctcgacgcgcttcccgggagtcgccatctacctggtcgagcctcgcatgggtcgcagccgccgggccttcctcacaggcctggcgcgctccaaaggcttccgcgtccttgacgcctgcagctccgaagcgacacatgttgtgatggaagagacctcagcagaggaggccgtcagctggcaggagcgcaggatggcagctgctcccccgggttgcacccccccagctctgctggacataagctggttaacagagagcctgggagctgggcagcctgtacctgtggagtgccggcaccgcctggaggtggctgggccaaggaaggggcctctgagcccagcatggatgcctgcctatgcctgccagcgccctacgcccctcacacaccacaacactggcctctccgaggctctggagatactggccgaggcagcaggctttgaaggcagtgagggccgcctcctcaccttctgcagagcagcctcggtgctcaaggcccttcccagccctgtcacaaccctgagccagctgcaggggcttccccactttggagaacactcctctagggttgtccaggagctgctggagcatggagtgtgtgaggaggtggagagagttcggcgctcagagagctcttcacccagatcttcggggtcggtgtgaagactgctgaccggtggtaccgggaaggactgcgaaccttagatgacctccgagagcagccccagaaactaacccaacagcagaaagcggggctccagcaccaccaggacctgagcaccccagtcctgcggtccgatgtagatgccctgcagcaggtggtggaggaagctgtggggcaggccctgcctggggccaccgtcacgctgaccggcggcttccgcagggccatgacgtggacttcctcatcacccaccccaaggagggtcaggaggcggggctgctgcctagagtgatgtgccgcctgcaggaccagggcctcatcctgtaccaccagcaccagcacagctgctgtgagtcccctacccgcctggcccaacagagccacatggacgcttttgagagaagtttctgcattttccgcctaccacaacctccaggggctgctgtggggggatccacgaggccctgcccatcctggaaggccgtgagagtggacttggtagttgcacccgtcagccagttccctttcgccctgctcggttggactggctccaagcttttccagcgggagctgcgccgcttcagccggaaggagaagggcctgtggctgaacagccatgggctgtttgacccggagcagaagacatttttccaagcggcttcagaggaagacatcttcagacacctgggccttgagtaccttcctccagagcagagaaacgcctgagcctgcctgtgtcccccacttccactcaggaaattgggctgcccccaacctggccactgaatgtctccaggcagatatgctgccccctgacccccaccttcacccctccccgccaaggcctggctcttccggaggtcaattgtgcctgcaggatcagttgagcccctgctggtgtgctgcagggtgtgatgaggtgggagccctcagtgccagcctcatcactgtgtgaccctgggtctgctcttagcctccccatggctcacgttcctgccctggatgggatgtgagtggggcccacatcgtggagctgtggtggggcctgcagtcatgaatggcaagtggtccctgatgtgcagtgtctcattagttgcactgcagttaactgtggctcctgcagggcaccctgcccagaatgcccagaagagaaccatgcatacctgcactgcatttgagagccatgagctggaggctgtggttcgtgccagcaaggagcctactgtctggtgtgctgtaggcatctggagagggagagggcctgggtaggagctgggaggaagataattttcaactatggggcttcagtactgcagcgccccgagccaggctctgtgcttctgcctttaaggcctgttctcagcacaatgtctcaaaaataggtcatatcctgccactcccgtcgcagagccctttaatggttccaaaccctaagtccacacatagcccctggctctggcatctctccagccccactggccccgagctgcttgactcaccggcttcctatttgatgcacccaggcccccttgtggccaactccctccccttctcactgaggcagaagcactgaggtgggctggacatgggtgccctccacgtccctcatatccccaggcacactctggcctcaggttttgccctggccatgtcatctacctggagtgggccctccccttcttcaggccttgaatcaaaagccactttgttaggcgaggatttcccagaccactcatcacattaaaaaatattttg

SEQ ID NO: 167437 - DNA, 811 bp, Homo sapiens
  Payload ID: 12939
  Gene Symbol: POLM
  Gene Name: polymerase (DNA directed), mu
  ENST ID: ENST00000445616
  CDS Start-End: 63-569
cttccgtctcgctcggagtttccctctgcgttcgctccgcgctgctggaggctgtcgtcccaatgctccccaaacggcggcgagcgcgggtcgggtcccctagcggcgatgccgcttcctccacgccgccctcgacgcgcttcccgggagtcgccatctacctggtcgagcctcgcatgggtcgcagccgccgggccttcctcacaggcctggcgcgctccaaaggcttccgcgtccttgacgcctgcagctccgaagcgacacatgttgtgatggaagagacctcagcagaggaggccgtcagctggcaggagcgcaggatggcagctgctcccccgggttgcacccccccagctctgctggacataagctggttaacagagagcctgggagctgggcagcctgtacctgtggagtgccggcaccgcctggaggcctttcttcctcaccaagtagatgacacagcaactccgagcgggatgacccatgggttagcaggagcctgtcctctggatgctataaggctcccggcctctgacaggtggctgggccaaggaaggggcctctgagcccagcatggatgcctgcctatgcctgccagcgccctacgcccctcacacaccacaacactggcctctccgaggctctggagatactggccgaggcagcaggctttgaaggcagtgagggccgcctcctcaccttctgcagagcagcctcggtgctcaaggcccttcccagccctgtcacaaccctgagccagctgcaggggcttccccactttggagaacactcctctagggttgtccag

SEQ ID NO: 167438 - DNA, 587 bp, Homo sapiens
  Payload ID: 12939
  Gene Symbol: POLM
  Gene Name: polymerase (DNA directed), mu
  ENST ID: ENST00000452049
  CDS Start-End: 93-587
acccgcttccgtcagcctcactggggcttccttccgtctcgctcggagtttccctctgcgttcgctccgcgctgctggaggctgtcgtcccaatgctccccaaacggcggcgagcgcgggtcgggtcccctagcggcgatgccgcttcctccacgccgccctcgacgcgcttcccgggagtcgccatctacctggtcgagcctcgcatgggtcgcagccgccgggccttcctcacaggcctggcgcgctccaaaggcttccgcgtccttgacgcctgcagctccgaagcgacacatgttgtgatggaagagacctcagcagaggaggccgtcagctggcaggagcgcaggatggcagctgctcccccgggttgcacccccccagctctgctggacataagctggttaacagagagcctgggagctgggcagcctgtacctgtggagtgccggcaccgcctggaggtggctgggccaaggaaggggcctctgagcccagcatggatgcctgcctatgcctgccagcgccctacgcccctcacacaccacaacactggcctctccggcccctccctgcaggaggctctg

SEQ ID NO: 167439 - DNA, 546 bp, Homo sapiens
  Payload ID: 12939
  Gene Symbol: POLM
  Gene Name: polymerase (DNA directed), mu
  ENST ID: ENST00000418926
  CDS Start-End: 1-406
atggatgcctgcctatgcctgccagcgccctacgcccctcacacaccacaacactggcctctccgaggctctggagatactggccgaggcagcaggctttgaaggcagtgagggccgcctcctcaccttctgcagagcagcctcggtgctcaaggcccttcccagccctgtcacaaccctgagccagctgcaggggcttccccactttggagaacactcctctagggttgtccaggagctgctggagcatggagtgtgtgaggaggtggagagagttcggcgctcagagaggtaccagaccatgaaggtgcgcagggcagggctcggacctaccccaggaatgtcctgccctgggaatgacaacacagtccacaccatgcacggggaggcaaacaggggcagctgacccagcccaggggtcagagaaggtcttgccgaggaagtggcagctaagctgatacctgatatgcacaaggcagccaagtggagacagctcttcacccagatcttcggggtcggtgtgaagactgctgaccggtggtaccg

SEQ ID NO: 167440 - DNA, 3218 bp, Homo sapiens
  Payload ID: 12939
  Gene Symbol: POLM
  Gene Name: polymerase (DNA directed), mu
  ENST ID: ENST00000458246
  CDS Start-End: 74-886
actggggcttccttccgtctcgctcggagtttccctctgcgttcgctccgcgctgctggaggctgtcgtcccaatgctccccaaacggcggcgagcgcgggtcgggtcccctagcggcgatgccgcttcctccacgccgccctcgacgcgcttcccgggagtcgccatctacctggtcgagcctcgcatgggtcgcagccgccgggccttcctcacaggcctggcgcgctccaaaggcttccgcgtccttgacgcctgcagctccgaagcgacacatgttgtgatggaagagacctcagcagaggaggccgtcagctggcaggagcgcaggatggcagctgctcccccgggttgcacccccccagctctgctggacataagctggttaacagagagcctgggagctgggcagcctgtacctgtggagtgccggcaccgcctggaggtggctgggccaaggaaggggcctctgagcccagcatggatgcctgcctatgcctgccagcgccctacgcccctcacacaccacaacactggcctctccgaggctctggagatactggccgaggcagcaggctttgaaggcagtgagggccgcctcctcaccttctgcagagcagcctcggtgctcaaggcccttcccagccctgtcacaaccctgagccagctgcaggggcttccccactttggagaacactcctctagggttgtccaggagctgctggagcatggagtgtgtgaggaggtggagagagttcggcgctcagagaggtaccagaccatgaaggtgcgcagggcagggctcggacctaccccaggaatgtcctgccctgggaatgacaacacagtccacaccatgcacggggaggcaaacaggggcagctgacccagcccaggggtcagagaaggtcttgccgaggaagtggcagctaagctgatacctgatatgcacaaggcagccaagtggagacaggctggagtacagtggtgcgatcacagctcacggcagccttgacttcctgggctcaaaccatcctcccacctcagtctctggagtagctgggactacaggcatgtgccaccacaccagctcttcacccagatcttcggggtcggtgtgaagactgctgaccggtggtaccgggaaggactgcgaaccttagatgacctccgagagcagccccagaaactaacccaacagcagaaagcggggctccagcaccaccaggacctgagcaccccagtcctgcggtccgatgtagatgccctgcagcaggtggtggaggaagctgtggggcaggccctgcctggggccaccgtcacgctgaccggcggcttccgcaggtaagaaggcccgacgtgcccctctggcttggcttcagacccctccccagtgaagggacctgagtcggggaccctgaagcgggcccactcgttggaagggatgtggcctggggctggagtgagcaggccgtgtccctgagtcagagtcagactgacgccctcagggggaagttgcagggccatgacgtggacttcctcatcacccaccccaaggagggtcaggaggcggggctgctgcctagagtgatgtgccgcctgcaggaccaggtgagggcctccctgctccccaagagccaccgctggccaatgccactgcctcctgctctctccacaccaccggatggtctcagccacgcccgcctctccccacagggcctcatcctgtaccaccagcaccagcacagctgctgtgagtcccctacccgcctggcccaacagagccacatggacgcttttgagagaagtttctgcattttccgcctaccacaacctccaggggctgctgtggggggatccacgaggccctgcccatcctggaaggccgtgagagtggacttggtagttgcacccgtcagccagttccctttcgccctgctcggttggactggctccaagcttttccagcgggagctgcgccgcttcagccggaaggagaagggcctgtggctgaacagccatgggctgtttgacccggagcagggaagcagcagtggcaagactcctaggtcacggaagtcctgcttctgttgcagaagacatttttccaagcggcttcagaggaagacatcttcagacacctgggccttgagtaccttcctccagagcagagaaacgcctgagcctgcctgtgtcccccacttccactcaggaaattgggctgcccccaacctggccactgaatgtctccaggcagatatgctgccccctgacccccaccttcacccctccccgccaaggcctggctcttccggaggtcaattgtgcctgcaggatcagttgagcccctgctggtgtgctgcagggtgtgatgaggtgggagccctcagtgccagcctcatcactgtgtgaccctgggtctgctcttagcctccccatggctcacgttcctgccctggatgggatgtgagtggggcccacatcgtggagctgtggtggggcctgcagtcatgaatggcaagtggtccctgatgtgcagtgtctcattagttgcactgcagttaactgtggctcctgcagggcaccctgcccagaatgcccagaagagaaccatgcatacctgcactgcatttgagagccatgagctggaggctgtggttcgtgccagcaaggagcctactgtctggtgtgctgtaggcatctggagagggagagggcctgggtaggagctgggaggaagataattttcaactatggggcttcagtactgcagcgccccgagccaggctctgtgcttctgcctttaaggcctgttctcagcacaatgtctcaaaaataggtcatatcctgccactcccgtcgcagagccctttaatggttccaaaccctaagtccacacatagcccctggctctggcatctctccagccccactggccccgagctgcttgactcaccggcttcctatttgatgcacccaggcccccttgtggccaactccctccccttctcactgaggcagaagcactgaggtgggctggacatgggtgccctccacgtccctcatatccccaggcacactctggcctcaggttttgccctggccatgtcatctacctggagtgggccctccccttcttcaggccttgaatcaaaagccactttgttaggcgaggatttcccagaccactcatcacattaaaaaatattttgaaaaca

SEQ ID NO: 167441 - DNA, 8775 bp, Homo sapiens
  Payload ID: 12940
  Gene Symbol: POLQ
  Gene Name: polymerase (DNA directed), theta
  Uniprot ID: O75417
  ENST ID: ENST00000264233
  CDS Start-End: 130-7902
gggcgggccgggaggtttgagtttgaagactggcgggaagatgtccgcagctgttgccaggccagggttctcccgagagggaggacgctgggactgtggcttgccctgatcggccgagaagagtttgccatgaatcttctgcgtcggagtgggaaacggcggcgttcagaatcaggctcagattcgttctcgggaagcggcggtgacagcagtgccagcccccagttcctctccgggtccgtgctgagcccgccgcccggccttggtcgctgcctgaaggccgcagctgcaggagaatgcaagcctacagttcctgactacgaaagagacaagctactattggcaaactggggacttcctaaagcagttctggaaaaataccacagttttggtgtaaaaaagatgtttgaatggcaggcagagtgccttttgcttggacaagtcctggaaggaaagaatttagtttattcagctcctacaagtgctgggaagactcttgtggcagaattacttattttgaagcgggttttggaaatgcggaagaaagctttgtttattcttccctttgtttctgtggctaaagagaagaaatactacctccagagtctgtttcaggaagtaggaataaaagtagacggttatatgggcagcacctctccatcaaggcatttctcttcattggatattgcagtctgcacaattgagagagccaatggtctgatcaatcgcctcatagaggaaaataagatggatctgttaggaatggtggttgtggatgaattacatatgctgggagactctcaccgagggtatctgctggaacttttgctgaccaagatttgctatattactcggaaatcagcatcttgtcaggcagatctagccagttctctgtctaatgctgtgcaaatcgttggcatgagtgctacccttcctaatttggagcttgtggcttcctggttgaatgctgaactctaccataccgactttcgccctgtaccgcttttggagtcagtaaaagttggaaattccatatatgactcttcaatgaaacttgtgagggaatttgagcccatgctacaagtgaagggagatgaggaccatgttgttagtttatgttatgagacgatttgtgataaccattcagtattacttttttgtccatcaaagaaatggtgtgagaagctggcagatatcattgctcgagagttttataatctacatcatcaagctgagggattggtgaaaccctctgaatgcccaccagtaattctggaacaaaaagaactcctggaagtgatggatcagttaagacgtttgccttcaggactggactctgtattacagaaaactgtaccatggggagtagcatttcatcatgcaggtcttacttttgaggagagggatatcattgaaggagcctttcgtcaaggtctcattcgggtcttggcggcaacttctactctttcttctggggtgaatttacctgcacgtcgtgtgattattcgaacccctatttttggtggtcgacctctagatattcttacttataagcagatggttggccgtgctggcaggaaaggagtggacacagtaggcgagagtatcttaatttgtaagaactctgagaaatcaaaaggcatagctctccttcagggttctctaaagcctgttcgcagctgtctgcaaagacgagaaggagaagaagtaactggcagcatgatacgagctattctggagataatagttggtggagtggcaagtacatcacaagatatgcatacttatgctgcctgcacatttttggctgcaagtatgaaagaagggaagcaaggaattcagagaaatcaagagtctgttcagcttggagcgattgaggcctgtgtgatgtggctactagaaaatgaattcatccagagtacagaagccagtgatggaacagaaggaaaggtgtatcatccaacacatcttggttcggccactctttcttcttcactttctccagctgatactttagatatttttgctgacctgcaaagagcaatgaagggctttgttttagagaatgatcttcatattctctatctggttacacctatgtttgaggattggactactattgattggtatcgatttttctgtttatgggagaagttgccaacttcaatgaaaagggtggcagagctagtgggagttgaagaggggttcttggcccgttgtgtgaaaggaaaagtagtagccagaactgagagacagcatcgacaaatggccatccataaaaggtttttcaccagtcttgtgctattagatttaatcagtgaagttcccttaagggaaataaatcagaaatatggatgcaatcgtgggcagattcaatctttgcaacagtcagctgctgtttatgcagggatgattacagtattttccaaccgtctgggctggcacaacatggaactactactttcccaatttcagaagcgtcttacgtttggcatccagagggagctgtgtgacctggttcgggtatccttactaaatgctcagagagccagggttctctatgcttctggctttcatactgtggcagaccttgctagagcaaatattgtggaggtggaggtgattctgaaaaatgctgtgcctttcaaaagtgcccggaaggcagtggatgaggaagaggaagcagttgaagaacgtcgcaatatgcgaactatctgggtgactggcagaaaaggtttaactgaaagggaagcagcagcccttatagtggaagaagccagaatgattctgcagcaggacttagttgaaatgggagtgcaatggaatccatgtgccctgttacattctagtacatgctcattgactcatagtgagtccgaagtaaaggaacacacatttatatcccaaactaagagttcttataaaaaattaacatcaaagaacaaaagtaacacaatatttagtgattcttatattaagcattcaccaaatatagtgcaagacttaaataaaagtagagagcatacaagttcctttaattgtaatttccagaatgggaatcaagaacatcagacatgttccattttcagagcaagaaaacgggcctctttagatataaataaagagaagccaggagcctctcagaatgaggggaaaacaagtgataagaaagttgttcagactttttcacagaaaacaaaaaaggcacctttgaatttcaattcagaaaagatgagcagaagttttcgatcttggaaacgtagaaagcatctaaagcgatctagggacagcagccccctgaaagactctggagcgtgtagaatccatttacaaggacagactctgtctaatcctagtctttgtgaagacccgtttaccttagatgagaagaaaacggaatttagaaattcagggccatttgctaaaaatgtatctttgagtggtaaggaaaaagataataaaacatcattcccattacaaataaagcaaaattgttcatggaacataacactaactaatgataattttgtggagcatattgtcacaggatctcagagtaaaaatgtgacttgtcaggccactagtgtggttagtgaaaagggcagaggagtagctgttgaggcagaaaaaataaatgaagtgctgatacaaaatggttcaaaaaaccagaatgtttatatgaaacaccatgacatccatccaattaaccagtacctgcgaaagcaatctcatgaacagacaagcactattaccaaacagaaaaatataatagagagacaaatgccctgtgaagcagtcagtagttacataaatagagactcaaatgttactatcaattgtgaaaggataaagcttaatacagaggaaaataaaccaagtcattttcaggcattaggagatgatataagcagaactgtgatacccagtgaagtacttccatcagctggagcatttagcaaatcagaaggccagcatgagaattttctaaatatttctagactacaagaaaaaacaggtacttatacaacaaacaaaactaaaaataatcatgtttctgacttaggtttagtcctctgtgattttgaagatagtttctatctggatactcagtcagagaaaataatacaacagatggcaactgaaaatgccaaactaggagcaaaggacaccaacctggcagcagggataatgcagaagagcttagtccaacagaactcaatgaactcttttcagaaggagtgtcacattccttttcctgctgaacagcaccctctaggagcgactaagatagatcatttggaccttaagactgtaggtactatgaaacaaagcagtgattcacatggggttgatatcctgactccagaaagcccgattttccattctccaatactattggaggaaaatggtctttttttaaaaaagaatgaagtttctgttactgattcacaattaaatagttttcttcaaggttatcaaacacaagaaactgtgaaaccagttatacttctgattcctcaaaagagaactcccactggtgtagaaggagaatgtcttccagttcctgaaacaagtttgaatatgagtgatagtttactatttgatagcttcagtgatgactatctagtaaaagaacaattacctgatatgcaaatgaaagaaccccttccttcagaagtaacatcaaaccattttagtgattctctgtgtctacaagaagacctaattaaaaaatcaaatgtaaatgagaatcaagatacccaccagcagttgacttgttccaatgatgaatctattatattttcagaaatggattctgttcagatggttgaagctttggacaatgtggatatatttcctgtccaagagaagaatcatactgtagtatctcctagagcattagaactaagtgatccagtacttgatgagcaccaccaaggtgatcaagatggaggagatcaagatgaaagggctgaaaaatcaaaattaactgggaccaggcaaaatcattcattcatatggtcaggggcatcatttgatctaagtccaggactgcaaaggattttagataaagtatccagtcctctagaaaatgaaaagctaaaatcaatgactataaacttttccagtttgaatagaaaaaatacagagttaaatgaagaacaagaagttatttcaaacttggagacaaaacaagtgcagggaatttcattttcttctaataatgaagtaaaaagcaagattgagatgctagaaaacaatgccaatcatgatgaaacctcatccctcttacctcgtaaagaaagtaatatagttgatgataatggtctcattcctcctacacccattccaacatctgcttctaagctgacatttccagggattcttgaaacacctgtaaacccttggaaaactaataatgttttacaacctggtgaaagttatttatttggctcaccttcagatattaaaaaccacgatttaagtccagggagtagaaatgggttcaaagacaacagccctattagtgacacaagcttttcacttcagttatcacaggatggattacagttaactccagcctcaagcagttcagaaagtttgtccataattgatgtagcaagtgaccaaaatcttttccaaacattcattaaggagtggcggtgcaaaaagcgattttccatctcactggcttgtgaaaagattagaagtttgacatcttctaaaactgctactattggcagtaggtttaagcaagctagctcacctcaggaaattcctattagagatgatggatttcccattaaaggttgtgatgacaccttggtggttggactggcagtatgctggggtggaagggatgcctattatttttcactgcagaaggaacaaaagcattctgaaattagtgccagtttggttccaccttctttagatccaagcctgactttgaaagacaggatgtggtaccttcaatcttgcttgcgaaaggaatctgataaagaatgttctgttgtcatctatgacttcatccagagctataaaattcttcttctttcttgtggcatctccttggagcaaagttatgaagatcctaaggtggcatgctggttactagatccagattctcaggagccgactcttcatagcatagttaccagttttcttcctcatgagcttccactcctagaagggatggagaccagccaagggattcaaagcctggggctaaatgctggcagtgagcattctgggcgatacagagcatctgtggagtccattctcatcttcaactctatgaatcagctcaactctttgttgcagaaggaaaaccttcaagatgttttccgtaaggtggaaatgccctctcagtactgcttggccttgctagaactaaatggaattggctttagtactgcagaatgtgaaagtcagaaacatataatgcaagccaagctggatgcaattgagacccaggcctatcaactagctggccacagtttttctttcaccagttcagatgacatcgctgaggttttatttttggaattgaagttgcccccaaatagagagatgaaaaaccaaggcagcaagaaaactctgggttctaccagaagagggattgacaatggacgcaagctaaggctgggaagacagttcagcactagtaaggacgttttaaataaattaaaggcattacatcctttaccaggcttgatattagaatggagaagaatcactaatgctattaccaaagtggtctttccccttcagcgggaaaagtgtcttaatccttttcttggaatggaaagaatctatcctgtatcacagtcgcacactgctacaggacgaataacctttacagaaccaaatattcagaatgtgccaagagattttgaaatcaaaatgccaacactagtaggagaaagcccaccttctcaagctgtaggcaaaggcctacttcccatgggcagaggaaaatataagaagggtttcagcgtgaatcctagatgccaggcacagatggaggagagagctgcagacagaggaatgccattttcaattagcatgcgacatgcctttgtgcctttcccaggtggttcaatactggctgctgactactctcagcttgaactgaggatcttggctcatttatcccatgatcgtcgtctcattcaagtgttaaacactggagctgatgttttcaggagcattgcagcagagtggaagatgattgagccagagtctgttggggatgatctgaggcagcaggcaaaacagatttgctatgggatcatttatggaatgggagctaaatctttgggagagcagatgggcattaaagaaaatgatgctgcatgctatattgactccttcaaatccagatacacagggattaatcaattcatgacagagacagtgaagaattgtaaaagagacggatttgttcagaccattttgggaaggcgtagatatttgccaggaatcaaagacaacaacccttatcgtaaagctcacgctgagcgtcaagctatcaacacaatagtccaaggatcagcagctgatattgtcaaaatagccacagttaacattcagaagcaattagagaccttccactcaaccttcaaatcccatggtcatcgagagggtatgctccaaagtgaccaaacaggattgtcacgaaagagaaaactgcaagggatgttctgcccaatcagaggaggcttcttcatccttcaactccatgatgaactcctatatgaagtggcagaagaagatgttgttcaggtagctcagattgtcaagaatgaaatggaaagtgctgtaaaactgtctgtgaaattgaaagtgaaagtgaaaataggcgccagctggggagagctaaaggactttgatgtgtaactgtgctgttgatgaagtcctcccagggaagcctgtgcagatgcagtcacctggaaagaacagagattaccctttcacctacctcagcaaaacaaactttcaagtcttgatagacttagcctagtaattttatagtgagagtttcaaactatatatcagtgtctatagcatcaaaaacttctgggggcgtgggggaagtagaataccaagtataatagttacattcactttcaaagagcatctatgaatttgccttttgtaacttactgtggctttaaacatattcagaacagatgcttgaaatatgcacttagcactttggttccacatctgtctgggtaaaccatgaagaaaatgaagctgctgcctcaatcgacccagacagcagccataggcagataaagatttggtttcaccctggtggtggtaggcatcgtgtgtgactttttttcctctaatatcaattttacagtacggaaatagtattttaaaatagtattggctaataaattatgaattctataaagtagtaagacttggtatggttggagtgtaggaatgaatattcatgaaatgtttcttattgcttttccttccctaattcatacaatgaatgtatttggaatacttacatattataaaataaactatacctcttcaagaggtatcctgttctgtaagatcagatgtttttattgcaggtcaatataatactgccagagacagaaaatacccccttatcagtcccttagtgcctctttctgtttgtggcatggtgagaaaacccatgctgaaaagattgtactttgtgatcccaatcagagggatggagctaatctttttgctgttgaaataaaatgaatttatgagaaa

SEQ ID NO: 167442 - DNA, 9055 bp, Homo sapiens
  Payload ID: 12940
  Gene Symbol: POLQ
  Gene Name: polymerase (DNA directed), theta
  ENST ID: ENST00000621776
  CDS Start-End: 1-8178
atgaatggtcaccgttttacgttcagaactcgttcgcttctacctttacaaaagggacaacacagatgcattactaagctcttggctcataacgatccctggggtatattcagagccccttcctcgcggcgttcatatagtgtctcaggggtctgtcagccagcaatccccaattcctcattacatattcctcacaatgcatgctggctaaaatggaaattgtgttcagaaatagccctgccctaccatcatatactaggagaaaggaggaaattatgctctattagaaactttgaagactggcgggaagatgtccgcagctgttgccaggccagggttctcccgagagggaggacgctgggactgtggcttgccctgatcggccgagaagagtttgccatgaatcttctgcgtcggagtgggaaacggcggcgttcagaatcaggctcagattcgttctcgggaagcggcggtgacagcagtgccagcccccagttcctctccgggtccgtgctgagcccgccgcccggccttggtcgctgcctgaaggccgcagctgcaggagaatgcaagcctacagttcctgactacgaaagagacaagctactattggcaaactggggacttcctaaagcagttctggaaaaataccacagttttggtgtaaaaaagatgtttgaatggcaggcagagtgccttttgcttggacaagtcctggaaggaaagaatttagtttattcagctcctacaagtgctgggaagactcttgtggcagaattacttattttgaagcgggttttggaaatgcggaagaaagctttgtttattcttccctttgtttctgtggctaaagagaagaaatactacctccagagtctgtttcaggaagtaggaataaaagtagacggttatatgggcagcacctctccatcaaggcatttctcttcattggatattgcagtctgcacaattgagagagccaatggtctgatcaatcgcctcatagaggaaaataagatggatctgttaggaatggtggttgtggatgaattacatatgctgggagactctcaccgagggtatctgctggaacttttgctgaccaagatttgctatattactcggaaatcagcatcttgtcaggcagatctagccagttctctgtctaatgctgtgcaaatcgttggcatgagtgctacccttcctaatttggagcttgtggcttcctggttgaatgctgaactctaccataccgactttcgccctgtaccgcttttggagtcagtaaaagttggaaattccatatatgactcttcaatgaaacttgtgagggaatttgagcccatgctacaagtgaagggagatgaggaccatgttgttagtttatgttatgagacgatttgtgataaccattcagtattacttttttgtccatcaaagaaatggtgtgagaagctggcagatatcattgctcgagagttttataatctacatcatcaagctgagggtgaaggattggtgaaaccctctgaatgcccaccagtaattctggaacaaaaagaactcctggaagtgatggatcagttaagacgtttgccttcaggactggactctgtattacagaaaactgtaccatggggagtagcatttcatcatgcaggtcttacttttgaggagagggatatcattgaaggagcctttcgtcaaggtctcattcgggtcttggcggcaacttctactctttcttctggggtgaatttacctgcacgtcgtgtgattattcgaacccctatttttggtggtcgacctctagatattcttacttataagcagatggttggccgtgctggcaggaaaggagtggacacagtaggcgagagtatcttaatttgtaagaactctgagaaatcaaaaggcatagctctccttcagggttctctaaagcctgttcgcagctgtctgcaaagacgagaaggagaagaagtaactggcagcatgatacgagctattctggagataatagttggtggagtggcaagtacatcacaagatatgcatacttatgctgcctgcacatttttggctgcaagtatgaaagaagggaagcaaggaattcagagaaatcaagagtctgttcagcttggagcgattgaggcctgtgtgatgtggctactagaaaatgaattcatccagagtacagaagccagtgatggaacagaaggaaaggtgtatcatccaacacatcttggttcggccactctttcttcttcactttctccagctgatactttagatatttttgctgacctgcaaagagcaatgaagggctttgttttagagaatgatcttcatattctctatctggttacacctatgtttgaggattggactactattgattggtatcgatttttctgtttatgggagaagttgccaacttcaatgaaaagggtggcagagctagtgggagttgaagaggggttcttggcccgttgtgtgaaaggaaaagtagtagccagaactgagagacagcatcgacaaatggccatccataaaaggtttttcaccagtcttgtgctattagatttaatcagtgaagttcccttaagggaaataaatcagaaatatggatgcaatcgtgggcagattcaatctttgcaacagtcagctgctgtttatgcagggatgattacagtattttccaaccgtctgggctggcacaacatggaactactactttcccaatttcagaagcgtcttacgtttggcatccagagggagctgtgtgacctggttcgggtatccttactaaatgctcagagagccagggttctctatgcttctggctttcatactgtggcagaccttgctagagcaaatattgtggaggtggaggtgattctgaaaaatgctgtgcctttcaaaagtgcccggaaggcagtggatgaggaagaggaagcagttgaagaacgtcgcaatatgcgaactatctgggtgactggcagaaaaggtttaactgaaagggaagcagcagcccttatagtggaagaagccagaatgattctgcagcaggacttagttgaaatgggagtgcaatggaatccatgtgccctgttacattctagtacatgctcattgactcatagtgagtccgaagtaaaggaacacacatttatatcccaaactaagagttcttataaaaaattaacatcaaagaacaaaagtaacacaatatttagtgattcttatattaagcattcaccaaatatagtgcaagacttaaataaaagtagagagcatacaagttcctttaattgtaatttccagaatgggaatcaagaacatcagacatgttccattttcagagcaagaaaacgggcctctttagatataaataaagagaagccaggagcctctcagaatgaggggaaaacaagtgataagaaagttgttcagactttttcacagaaaacaaaaaaggcacctttgaatttcaattcagaaaagatgagcagaagttttcgatcttggaaacgtagaaagcatctaaagcgatctagggacagcagccccctgaaagactctggagcgtgtagaatccatttacaaggacagactctgtctaatcctagtctttgtgaagacccgtttaccttagatgagaagaaaacggaatttagaaattcagggccatttgctaaaaatgtatctttgagtggtaaggaaaaagataataaaacatcattcccattacaaataaagcaaaattgttcatggaacataacactaactaatgataattttgtggagcatattgtcacaggatctcagagtaaaaatgtgacttgtcaggccactagtgtggttagtgaaaagggcagaggagtagctgttgaggcagaaaaaataaatgaagtgctgatacaaaatggttcaaaaaaccagaatgtttatatgaaacaccatgacatccatccaattaaccagtacctgcgaaagcaatctcatgaacagacaagcactattaccaaacagaaaaatataatagagagacaaatgccctgtgaagcagtcagtagttacataaatagagactcaaatgttactatcaattgtgaaaggataaagcttaatacagaggaaaataaaccaagtcattttcaggcattaggagatgatataagcagaactgtgatacccagtgaagtacttccatcagctggagcatttagcaaatcagaaggccagcatgagaattttctaaatatttctagactacaagaaaaaacaggtacttatacaacaaacaaaactaaaaataatcatgtttctgacttaggtttagtcctctgtgattttgaagatagtttctatctggatactcagtcagagaaaataatacaacagatggcaactgaaaatgccaaactaggagcaaaggacaccaacctggcagcagggataatgcagaagagcttagtccaacagaactcaatgaactcttttcagaaggagtgtcacattccttttcctgctgaacagcaccctctaggagcgactaagatagatcatttggaccttaagactgtaggtactatgaaacaaagcagtgattcacatggggttgatatcctgactccagaaagcccgattttccattctccaatactattggaggaaaatggtctttttttaaaaaagaatgaagtttctgttactgattcacaattaaatagttttcttcaaggttatcaaacacaagaaactgtgaaaccagttatacttctgattcctcaaaagagaactcccactggtgtagaaggagaatgtcttccagttcctgaaacaagtttgaatatgagtgatagtttactatttgatagcttcagtgatgactatctagtaaaagaacaattacctgatatgcaaatgaaagaaccccttccttcagaagtaacatcaaaccattttagtgattctctgtgtctacaagaagacctaattaaaaaatcaaatgtaaatgagaatcaagatacccaccagcagttgacttgttccaatgatgaatctattatattttcagaaatggattctgttcagatggttgaagctttggacaatgtggatatatttcctgtccaagagaagaatcatactgtagtatctcctagagcattagaactaagtgatccagtacttgatgagcaccaccaaggtgatcaagatggaggagatcaagatgaaagggctgaaaaatcaaaattaactgggaccaggcaaaatcattcattcatatggtcaggggcatcatttgatctaagtccaggactgcaaaggattttagataaagtatccagtcctctagaaaatgaaaagctaaaatcaatgactataaacttttccagtttgaatagaaaaaatacagagttaaatgaagaacaagaagttatttcaaacttggagacaaaacaagtgcagggaatttcattttcttctaataatgaagtaaaaagcaagattgagatgctagaaaacaatgccaatcatgatgaaacctcatccctcttacctcgtaaagaaagtaatatagttgatgataatggtctcattcctcctacacccattccaacatctgcttctaagctgacatttccagggattcttgaaacacctgtaaacccttggaaaactaataatgttttacaacctggtgaaagttatttatttggctcaccttcagatattaaaaaccacgatttaagtccagggagtagaaatgggttcaaagacaacagccctattagtgacacaagcttttcacttcagttatcacaggatggattacagttaactccagcctcaagcagttcagaaagtttgtccataattgatgtagcaagtgaccaaaatcttttccaaacattcattaaggagtggcggtgcaaaaagcgattttccatctcactggcttgtgaaaagattagaagtttgacatcttctaaaactgctactattggcagtaggtttaagcaagctagctcacctcaggaaattcctattagagatgatggatttcccattaaaggttgtgatgacaccttggtggttggactggcagtatgctggggtggaagggatgcctattatttttcactgcagaaggaacaaaagcattctgaaattagtgccagtttggttccaccttctttagatccaagcctgactttgaaagacaggatgtggtaccttcaatcttgcttgcgaaaggaatctgataaagaatgttctgttgtcatctatgacttcatccagagctataaaattcttcttctttcttgtggcatctccttggagcaaagttatgaagatcctaaggtggcatgctggttactagatccagattctcaggagccgactcttcatagcatagttaccagttttcttcctcatgagcttccactcctagaagggatggagaccagccaagggattcaaagcctggggctaaatgctggcagtgagcattctgggcgatacagagcatctgtggagtccattctcatcttcaactctatgaatcagctcaactctttgttgcagaaggaaaaccttcaagatgttttccgtaaggtggaaatgccctctcagtactgcttggccttgctagaactaaatggaattggctttagtactgcagaatgtgaaagtcagaaacatataatgcaagccaagctggatgcaattgagacccaggcctatcaactagctggccacagtttttctttcaccagttcagatgacatcgctgaggttttatttttggaattgaagttgcccccaaatagagagatgaaaaaccaaggcagcaagaaaactctgggttctaccagaagagggattgacaatggacgcaagctaaggctgggaagacagttcagcactagtaaggacgttttaaataaattaaaggcattacatcctttaccaggcttgatattagaatggagaagaatcactaatgctattaccaaagtggtctttccccttcagcgggaaaagtgtcttaatccttttcttggaatggaaagaatctatcctgtatcacagtcgcacactgctacaggacgaataacctttacagaaccaaatattcagaatgtgccaagagattttgaaatcaaaatgccaacactagtaggagaaagcccaccttctcaagctgtaggcaaaggcctacttcccatgggcagaggaaaatataagaagggtttcagcgtgaatcctagatgccaggcacagatggaggagagagctgcagacagaggaatgccattttcaattagcatgcgacatgcctttgtgcctttcccaggtggttcaatactggctgctgactactctcagcttgaactgaggatcttggctcatttatcccatgatcgtcgtctcattcaagtgttaaacactggagctgatgttttcaggagcattgcagcagagtggaagatgattgagccagagtctgttggggatgatctgaggcagcaggcaaaacagatttgctatgggatcatttatggaatgggagctaaatctttgggagagcagatgggcattaaagaaaatgatgctgcatgctatattgactccttcaaatccagatacacagggattaatcaattcatgacagagacagtgaagaattgtaaaagagacggatttgttcagaccattttgggaaggcgtagatatttgccaggaatcaaagacaacaacccttatcgtaaagctcacgctgagcgtcaagctatcaacacaatagtccaaggatcagcagctgatattgtcaaaatagccacagttaacattcagaagcaattagagaccttccactcaaccttcaaatcccatggtcatcgagagggtatgctccaaagtgaccaaacaggattgtcacgaaagagaaaactgcaagggatgttctgcccaatcagaggaggcttcttcatccttcaactccatgatgaactcctatatgaagtggcagaagaagatgttgttcaggtagctcagattgtcaagaatgaaatggaaagtgctgtaaaactgtctgtgaaattgaaagtgaaagtgaaaataggcgccagctggggagagctaaaggactttgatgtgtaactgtgctgttgatgaagtcctcccagggaagcctgtgcagatgcagtcacctggaaagaacagagattaccctttcacctacctcagcaaaacaaactttcaagtcttgatagacttagcctagtaattttatagtgagagtttcaaactatatatcagtgtctatagcatcaaaaacttctgggggcgtgggggaagtagaataccaagtataatagttacattcactttcaaagagcatctatgaatttgccttttgtaacttactgtggctttaaacatattcagaacagatgcttgaaatatgcacttagcactttggttccacatctgtctgggtaaaccatgaagaaaatgaagctgctgcctcaatcgacccagacagcagccataggcagataaagatttggtttcaccctggtggtggtaggcatcgtgtgtgactttttttcctctaatatcaattttacagtacggaaatagtattttaaaatagtattggctaataaattatgaattctataaagtagtaagacttggtatggttggagtgtaggaatgaatattcatgaaatgtttcttattgcttttccttccctaattcatacaatgaatgtatttggaatacttacatattataaaataaactatacctcttcaagaggtatcctgttctgtaagatcagatgtttttattgcaggtcaatataatactgccagagacagaaaatacccccttatcagtcccttagtgcctctttctgtttgtggcatggtgagaaaacccatgctgaaaagattgtactttgtgatcccaatcagagggatggagctaatctttttgctgttgaaataaaatgaatttatgagaaacttt

SEQ ID NO: 167443 - DNA, 3821 bp, Homo sapiens
  Payload ID: 12941
  Gene Symbol: POLD3
  Gene Name: polymerase (DNA-directed), delta 3, accessory subunit
  Uniprot ID: Q15054
  ENST ID: ENST00000263681
  CDS Start-End: 130-1530
gtagtgcgtcgcctccgttgccggggaaacgacccgggacctgggagggagcaaagacgtttcccgccggcgggagctgtggctgtgattgagagaggggttagaggcgggtcccagcgctgccgcaccatggcggaccagctttatctggaaaatatagacgagttcgtcacggaccaaaacaagatcgtgacatacaaatggctgagctatacactaggggttcatgttaaccaggccaaacagatgctgtatgattatgttgaaaggaaacgaaaagaaaattcaggagcccaactgcatgttacctacttggtgtctggcagtctcattcagaatggacattcctgccacaaggttgcagtagtgagagaagataaattggaagcagtgaagtccaagctagctgtgactgccagcatccatgtgtacagcatccagaaagccatgctaaaggacagtgggcctctgttcaatactgactatgacatccttaaaagcaacttgcagaactgcagcaaatttagtgctatacaatgtgcagctgccgtccctagagctcctgctgaatcctcttcgtcttccaaaaagtttgagcagtcacatcttcacatgtcaagtgagacacaagccaacaatgagctgaccaccaatggtcatggcccacctgcatccaagcaggtttcccagcagcccaaaggaattatgggaatgtttgcctccaaagctgctgctaaaacccaagaaaccaacaaggaaacgaaaacagaggctaaagaagtaacaaatgcatctgcagcaggcaacaaggcaccagggaaagggaatatgatgagcaacttttttggaaaagctgctatgaataaatttaaagtcaatttggactcagaacaagcagtgaaagaagaaaaaatagtggagcagcctacagtgtctgtcacggaaccaaagctggcaactcctgcaggcctgaaaaaatccagcaaaaaagcagagcctgttaaggtgctgcagaaggaaaaaaaaagggggaagcgagtagcattatctgatgatgagacaaaggaaactgaaaacatgaggaaaaagaggagaagaatcaaacttcctgaatctgatagcagtgaagatgaagtctttccagactctcctggggcttatgaagctgagtcaccatccccacctcctcctccgtctccacctcttgaaccagtgccaaagactgagcctgaacctccttctgtcaagagctcaagtggagaaaacaaaagaaaacgaaaacgcgtactaaaatctaaaacttacctggatggggaaggctgcatagtgactgaaaaagtctacgagagtgaatcctgcacagatagtgaagaggagcttaacatgaagacatcctcagtacacagaccccctgccatgactgtgaaaaaagaacccagagaggaacgaaagggccccaagaaagggactgctgctctgggcaaagccaacagacaggtgtccattactggcttcttccagaggaaataaactgccatctctggtagatcagagacttggagtggtcaagggagaagaccaagaaatgtactcctcacttactatgtaagttcatctagatctccacctcacctgtatcaaaagactgttctttcatcctgtgaggtttatactatttctggtttttaaccaaaaggaaatcatctggaagcaggaggcaaaaagctgttaccttctaatgacatttaaaaagcacagtctttgacctgtccaggagaaggatttactccaaaattatactggaacagttttcagaattctcactgaagccatttagtggctaacccactgtgctccactcaccctatgccctggtccgcatatggcacaggaattattccttcttgttcctctgtattctaagaattcatgtgggtgtttcttatccttacattctgctggatacgtttacccctcttgtcttcctgcagtaccacacttctgtcccctaacctcctgaggctgttctctgtaagtcttttaagttttggttggactaaaggctgaagtgaaaatctccctgtaatcctcttcctccattatgcagtacacggacacctggctacagaccaggacgtggcttgtgttctgttcctttcacaaaagctctctgggaccttcacttgcaattagtggttagggaaaagcctcaggcagaacacaaatagaaatttaatgatgtgttcaactccaccagaaattacctcgagtcagcattgacgatattggaggagctgccgtgctgctgatacggggtgtgctttatgctgctctttgcggtttgttgatcccctcctcccccactctcaatacctagagagtgaaacccgtacaatgagataaagactaaaaagagaaatcccttcctatatacagtgtgctacatttacaaaaaatttctccttaagaaaacagaatattcaaaaacagcacttttccaggaagttagtgaggaagataaggcacacatttatttataaatggatgttgctcctttgtatttttagcttccctatttgcttaaaagtacaggctccctaagagaggatggagagggagagactgaattgttagtaggtctaaacatcaaagaaaacatttttattagttacttatggaaaatcatctattacaatgataaccttcaagtgacttccattatggctggacaggcggtgagctcagtggattgcagtggtgtgctggtgattttgcacagtgagctctgcggaaggggtcaggctcaactgctgatgtgtctcacacgtagcagacaaggggtgtctgactggcttcttttgcctcaagatggtgtatgtcgtaagtgatgcaatcagctgtctgctttttaaggttgggattgtgctgactttgggattaacatgagcttctttagcaaccaagcatgaacttgattaagaccagaagtttgggagatgagtcctggcattatgtctaggactaaagcagtggctttgtatagcaagctgagtaaaggttgacatattccaaaacccttctttttaaaaggaaaaaggatggagagaaggatggaaagcctggacttaaacctttagaaaaaacttctggagagaaatcccttttaaacagttacttttgtcattgcctctggtcatttgtctaaataggaatggaaaattaaaagaaaagcaacaatccaatcttttttctaaaaattatgctggggtctcgactaaaactgaatttgaattggaaaattctggtgttggttggagttccatcttgcaagggataatacaaatcctatgatctctatgcccaatatgctgcctcaactctgagctgtctgcaaggcttagtaagtattgagtggtgttttttttttctttttatacaataccatgttaaccacatgagttaaataaatttgagaagttgttttaaaacagtgcttcaaactgagtatctgatgagtctcttatttgatggatggtaacagtgttgcaattatttaagctctgaatgggaagaaggctggttttcagttgatattgttaaaactgcatacccacagtctgagatgaacaagttatttgctgccttcatcgtttttttcagcactggggaaatgttagtttcagccaacctcattttttagttcatctagaagaaaatctagcacattgtattagtttggcttcatcacttgctagctgtatgactgtgggcaagtttcacagcctcaagttctttatcaaaataaaactaaaatgagttac

SEQ ID NO: 167444 - DNA, 513 bp, Homo sapiens
  Payload ID: 12941
  Gene Symbol: POLD3
  Gene Name: polymerase (DNA-directed), delta 3, accessory subunit
  ENST ID: ENST00000528481
  CDS Start-End: 181-513
aaagcgcggggccagactcatcggttcattcaacaaccagtatttagtgcctgctgtgttctgcaggccctgccataggcgcttgatacagcggtgcatagcgtatgagaaagatctgtcctggtgacatacaaatggctgagctatacactaggggttcatgttaaccaggccaaacagatgctgtatgattatgttgaaaggaaacgaaaagaaaattcaggagcccaactgcatgttacctacttggtgtctggcagtctcattcagaatggacattcctgccacaaggttgcagtagtgagagaagataaattggaagcagtgaagtccaagctagctgtgactgccagcatccatgtgtacagcatccagaaagccatgctaaaggacagtgggcctctgttcaatactgactatgacatccttaaaagcaacttgcagaactgcagcaaatttagtgctatacaatgtgcagctgccgtccctagagctcctgctgaatcctcttcg

SEQ ID NO: 167445 - DNA, 854 bp, Homo sapiens
  Payload ID: 12941
  Gene Symbol: POLD3
  Gene Name: polymerase (DNA-directed), delta 3, accessory subunit
  ENST ID: ENST00000530511
  CDS Start-End: 346-854
cagcgctgccgcaccatggcggaccagctttatctggaaaatatagacgagttcgtcacggaccaaaacaagatcgtgagcagctactactggggaacgcgggcgtgcgaccggggtcctgggcccggctagggcggcgggagccttgaccctctgtctgcttgtggcttcgtggggaccaggggagacaggtccccacgaggggacctgggcgagctctgtgccccagagcgagcgaggactcgtcgggaaggtcctccagcacacacggaagtccgcgtcccttgggtgacatacaaatggctgagctatacactaggggttcatgttaaccaggccaaacagatgctgtatgattatgttgaaaggaaacgaaaagaaaattcaggagcccaactgcatgttacctacttggtgtctggcagtctcattcagaatggacattcctgccacaaggttgcagtagtgagagaagataaattggaagcagtgaagtccaagctagctgtgactgccagcatccatgtgtacagcatccagaaagccatgctaaaggacagtgggcctctgttcaatactgactatgacatccttaaaagcaacttgcagaactgcagcaaatttagtgctatacaatgtgcagctgccgtccctagagctcctgctgaatcctcttcgtcttccaaaaagtttgagcagtcacatcttcacatgtcaagtgagacacaagccaacaatgagctgaccaccaatggtcatggcccacctgcatccaagcaggtttcccagcagcccaaaggaattatgggaatgtttgcctccaaagctgctgctaaaacccaagaaaccaacaa

SEQ ID NO: 167446 - DNA, 2122 bp, Homo sapiens
  Payload ID: 12941
  Gene Symbol: POLD3
  Gene Name: polymerase (DNA-directed), delta 3, accessory subunit
  Uniprot ID: Q15054
  ENST ID: ENST00000527458
  CDS Start-End: 491-1774
gctgtggctgtgattgagagaggggttagaggcgggtcccagcgctgccgcaccatggcggaccagctttatctggaaaatatagacgagttcgtcacggaccaaaacaagatcgtgagcagctactactggggaacgcgggcgtgcgaccggggtcctgggcccggctagggcggcgggagccttgaccctctgtctgcttgtggcttcgtggggaccaggggagacaggtccccacgaggggacctgggcgagctctgtgccccagagcgagcgaggactcgtcgggaaggtcctccagcacacacggaagtccgcgtcccttgggtgggcgtgctgggaacagagcctggggctggagccgcggagaccgggcgcggagggagggccgttggctgagagttctaaggcgtccctacacctttcttttaaggtgacatacaaatggctgagctatacactaggggttcatgttaaccaggccaaacagatgctgtatgattatgttgaaaggaaacgaaaagaaaattcaggagcccaactgcatgttacctacttggtgtctggcagtctcattcagaatggacattcctgccacaaggttgcagtagtgagagaagataaattggaagcagtgaagtccaagctagctgtgactgccagcatccatgtgtacagcatccagaaagccatgctaaaggacagtgggcctctgttcaatactgactatgacatccttaaaagcaacttgcagaactgcagcaaatttagtgctatacaatgtgcagctgccgtccctagagctcctgctgaatcctcttcgtcttccaaaaagtttgagcagtcacatcttcacatgtcaagtgagacacaagccaacaatgagctgaccaccaatggtcatggcccacctgcatccaagcaggtttcccagcagcccaaaggaattatgggaatgtttgcctccaaagctgctgctaaaacccaagaaaccaacaaggaaacgaaaacagaggctaaagaagtaacaaatgcatctgcagcaggcaacaaggcaccagggaaagggaatatgatgagcaacttttttggaaaagctgctatgaataaatttaaagtcaatttggactcagaacaagcagtgaaagaagaaaaaatagtggagcagcctacagtgtctgtcacggaaccaaagctggcaactcctgcaggcctgaaaaaatccagcaaaaaagcagagcctgttaaggtgctgcagaaggaaaaaaaaagggggaagcgagtagcattatctgatgatgagacaaaggaaactgaaaacatgaggaaaaagaggagaagaatcaaacttcctgaatctgatagcagtgaagatgaagtctttccagactctcctggggcttatgaagctgagtcaccatccccacctcctcctccgtctccacctcttgaaccagtgccaaagactgagcctgaacctccttctgtcaagagctcaagtggagaaaacaaaagaaaacgaaaacgcgtactaaaatctaaaacttacctggatggggaaggctgcatagtgactgaaaaagtctacgagagtgaatcctgcacagatagtgaagaggagcttaacatgaagacatcctcagtacacagaccccctgccatgactgtgaaaaaagaacccagagaggaacgaaagggccccaagaaagggactgctgctctgggcaaagccaacagacaggtgtccattactggcttcttccagaggaaataaactgccatctctggtagatcagagacttggagtggtcaagggagaagaccaagaaatgtactcctcacttactatgtaagttcatctagatctccacctcacctgtatcaaaagactgttctttcatcctgtgaggtttatactatttctggtttttaaccaaaaggaaatcatctggaagcaggaggcaaaaagctgttaccttctaatgacatttaaaaagcacagtctttgacctgtccaggagaaggatttactccaaaattatactggaacagttttcagaattctcactgaagccatttagtggctaacccactgtgctccactcaccctatgccctggtcc

SEQ ID NO: 167447 - DNA, 710 bp, Homo sapiens
  Payload ID: 12941
  Gene Symbol: POLD3
  Gene Name: polymerase (DNA-directed), delta 3, accessory subunit
  ENST ID: ENST00000524752
  CDS Start-End: 1-449
ctcctgcaggcctgaaaaaatccagcaaaaaagcagagcctgttaaggtgctgcagaaggaaaaaaaaagggggaagcgagtagcattatctgatgatgagacaaaggaaactgaaaacatgaggaaaaagaggagaagaatcaaacttcctgaatctgatagcagtgaagatgaagtctttccagactctcctggggcttatgaagctgagtcaccatccccacctcctcctccgtctccacctcttgaaccagtgccaaagactgagcctgaacctccttctgtcaagagctcaagtggagaaaacaaaagaaaacgaaaacgcgtactaaaatctaaaacttacctggatggggaaggctgcatagtggtgctggacatgcagtcccactcactagacattttggagcattacgtggaaatgcccatccagcggttggagaggtagggtaggatctgaagatctcaagcctcggaagcacagatttaggagtcactgacttagaggtggtagtttcaagtgacgtgatggttaagttcaccaagagaaaaagtttagaaagaaaaagagctgagccttctgccctattttttagaagagggtttctgagagcctgggtattcaaatgataagatgggtgtgtggtgcagggacaagacttcagtcagaggacccagggtctctgctttagcaccatcttgctgtgtg

SEQ ID NO: 167448 - DNA, 1700 bp, Homo sapiens
  Payload ID: 12941
  Gene Symbol: POLD3
  Gene Name: polymerase (DNA-directed), delta 3, accessory subunit
  Uniprot ID: Q15054
  ENST ID: ENST00000532497
  CDS Start-End: 270-1352
gctgtggctgtgattgagagaggggttagaggcgggtcccagcgctgccgcaccatggcggaccagctttatctggaaaatatagacgagttcgtcacggaccaaaacaagatcgtgacatacaaatggctgagctatacactaggggttcatgttaaccaggccaaacatgccacaaggttgcagtagtgagagaagataaattggaagcagtgaagtccaagctagctgtgactgccagcatccatgtgtacagcatccagaaagccatgctaaaggacagtgggcctctgttcaatactgactatgacatccttaaaagcaacttgcagaactgcagcaaatttagtgctatacaatgtgcagctgccgtccctagagctcctgctgaatcctcttcgtcttccaaaaagtttgagcagtcacatcttcacatgtcaagtgagacacaagccaacaatgagctgaccaccaatggtcatggcccacctgcatccaagcaggtttcccagcagcccaaaggaattatgggaatgtttgcctccaaagctgctgctaaaacccaagaaaccaacaaggaaacgaaaacagaggctaaagaagtaacaaatgcatctgcagcaggcaacaaggcaccagggaaagggaatatgatgagcaacttttttggaaaagctgctatgaataaatttaaagtcaatttggactcagaacaagcagtgaaagaagaaaaaatagtggagcagcctacagtgtctgtcacggaaccaaagctggcaactcctgcaggcctgaaaaaatccagcaaaaaagcagagcctgttaaggtgctgcagaaggaaaaaaaaagggggaagcgagtagcattatctgatgatgagacaaaggaaactgaaaacatgaggaaaaagaggagaagaatcaaacttcctgaatctgatagcagtgaagatgaagtctttccagactctcctggggcttatgaagctgagtcaccatccccacctcctcctccgtctccacctcttgaaccagtgccaaagactgagcctgaacctccttctgtcaagagctcaagtggagaaaacaaaagaaaacgaaaacgcgtactaaaatctaaaacttacctggatggggaaggctgcatagtgactgaaaaagtctacgagagtgaatcctgcacagatagtgaagaggagcttaacatgaagacatcctcagtacacagaccccctgccatgactgtgaaaaaagaacccagagaggaacgaaagggccccaagaaagggactgctgctctgggcaaagccaacagacaggtgtccattactggcttcttccagaggaaataaactgccatctctggtagatcagagacttggagtggtcaagggagaagaccaagaaatgtactcctcacttactatgtaagttcatctagatctccacctcacctgtatcaaaagactgttctttcatcctgtgaggtttatactatttctggtttttaaccaaaaggaaatcatctggaagcaggaggcaaaaagctgttaccttctaatgacatttaaaaagcacagtctttgacctgtccaggagaaggatttactccaaaattatactggaacagttttcagaattctcactgaagccatttagtggctaacccactgtgctccactcaccctatgccctggtcc

SEQ ID NO: 167449 - DNA, 564 bp, Homo sapiens
  Payload ID: 12941
  Gene Symbol: POLD3
  Gene Name: polymerase (DNA-directed), delta 3, accessory subunit
  ENST ID: ENST00000532954
  CDS Start-End: 1-268
taatgcttttgaagatgcatgtgagatggaggtggtgttctggggtctaattgctgaacgaatagtgactgaaaaagtctacgagagtgaatcctgcacagatagtgaagaggagcttaacatgaagacatcctcagtacacagaccccctgccatgactgtgaaaaaagaacccagagaggaacgaaagggccccaagaaagggactgctgctctgggcaaagccaacagacaggtgtccattactggcttcttccagaggaaataaactgccatctctggtagatcagagacttggagtggtcaagggagaagaccaagaaatgtactcctcacttactatgtaagttcatctagatctccacctcacctgtatcaaaagactgttctttcatcctgtgaggtttatactatttctggtttttaaccaaaaggaaatcatctggaagcaggaggcaaaaagctgttaccttctaatgacatttaaaaagcacagtctttgacctgtccaggagaaggatttactccaaaattatactggaacagttttcagaattctcactg

SEQ ID NO: 167450 - DNA, 544 bp, Homo sapiens
  Payload ID: 12941
  Gene Symbol: POLD3
  Gene Name: polymerase (DNA-directed), delta 3, accessory subunit
  ENST ID: ENST00000531615
  CDS Start-End: 131-544
aaaaatgctactgttcagaaaatttgatggactaccagatttcatttatcttttaagtcattaattaagagttgatcatgtaaaaactcttactgatgtcttacttgtgccttcttttctttggaataggatgctgtatgattatgttgaaaggaaacgaaaagaaaattcaggagcccaactgcatgttacctacttggtgtctggcagtctcattcagaatggacattcctgccacaaggttgcagtagtgagagaagataaattggaagcagtgaagtccaagctagctgtgactgccagcatccatgtgtacagcatccagaaagccatgctaaaggacagtgggcctctgttcaatactgactatgacatccttaaaagcaacttgcagaactgcagcaaatttagtgctatacaatgtgcagctgccgtccctagagctcctgctgaatcctcttcgtcttccaaaaagtttgagcagtcacatcttcacatgtcaagtgagacacaagccaacaatgagctgaccaccaatggtcat

SEQ ID NO: 167451 - DNA, 918 bp, Homo sapiens
  Payload ID: 12942
  Gene Symbol: POLD4
  Gene Name: polymerase (DNA-directed), delta 4, accessory subunit
  Uniprot ID: Q9HCU8
  ENST ID: ENST00000312419
  CDS Start-End: 148-471
ctctctcggtttgtctgggtcatcttgtctgcccgccgctggcctggccccgtctgtctctctcagcagctgtctttctcgcgcccactggccggtctctcctcttccccgcagttgcctccttctctgcctgcctgggtggccgccatgggccggaagcggctcatcactgattcctacccggttgtgaagaggagggaggggcccgctgggcacagcaagggggagctggcacccgagctaggggaggagccccagccccgcgacgaggaggaagcggagctggagctgctgaggcagtttgacctggcctggcagtacgggccctgcaccgggatcacacggctgcagcgctggtgtcgggccaagcagatgggcttggagcctcccccagaggtgtggcaggtgctgaagacccaccccggagacccccgcttccagtgcagtctctggcatctctatcccctatgaggcaccacgtaagacctcctgcccttagctctcttgctcaccacccaagaacctcaggacagaagcgagagcccattgctcctgctcagctcagcccggctgcggaggaacccttggcaggcagaacctggaggtgtcagaggctcaactcctccatctaaccagcaggctcccagagtccccggaagagcctgcgcagctgaagcagagtgcttctagatggagagtggtcactggggaaaaggacctggccatcaccttccaatacctgctgcctgtctccctgacccatgatctggcaagttaggcacagtcagacatggacagttgatccatgaggaaaagatgctctcccacctaaggccaggaatctgagagcaggactggctgagctcccagggcaaggggttcactaatgcttatcaataaagaatattgagcctggaa

SEQ ID NO: 167452 - DNA, 584 bp, Homo sapiens
  Payload ID: 12942
  Gene Symbol: POLD4
  Gene Name: polymerase (DNA-directed), delta 4, accessory subunit
  ENST ID: ENST00000531239
  CDS Start-End: 300-398
gtctgggtcatcttgtctgcccgccgctggcctggccccgtctgtctctctcagcagctgtctttctcgcgcccactggccggtctctcctcttccccgcagttgcctccttctctgcctgcctgggtggccgccatgggccggaagcggctcatcactgattcctacccggggaggagccccagccccgcgacgaggaggaagcggagctggagctgctgaggcagtttgacctggcctggcagtacgggccctgcaccgggatcacacggctgcagcgctggtgtcgggccaagcagatgggcttggagcctcccccagaggtgtggcaggtgctgaagacccaccccggagacccccgcttccagtgcagtctctggcatctctatcccctatgaggcaccacgtaagacctcctgcccttagctctcttgctcaccacccaagaacctcaggacagaagcgagagcccattgctcctgctcagctcagcccggctgcggaggaacccttggcaggcagaacctggaggtgtcagaggctcaactcctccatctaaccagcaggctcccagagtccccgga

SEQ ID NO: 167453 - DNA, 899 bp, Homo sapiens
  Payload ID: 12942
  Gene Symbol: POLD4
  Gene Name: polymerase (DNA-directed), delta 4, accessory subunit
  ENST ID: ENST00000530584
  CDS Start-End: 354-452
ctgcccgccgctggcctggccccgtctgtctctctcagcagctgtctttctcgcgcccactggccggtctctcctcttccccgcagttgcctccttctctgcctgcctgggtggccgccatgggccggaagcggctcatcactgattcctacccggttgtgaagaggagggaggggcccgctgggcacagcaagggggagctggcacccgagctaggtctctgaggggaggagccccagccccgcgacgaggaggaagcggagctggagctgctgaggcagtttgacctggcctggcagtacgggccctgcaccgggatcacacggctgcagcgctggtgtcgggccaagcagatgggcttggagcctcccccagaggtgtggcaggtgctgaagacccaccccggagacccccgcttccagtgcagtctctggcatctctatcccctatgaggcaccacgtaagacctcctgcccttagctctcttgctcaccacccaagaacctcaggacagaagcgagagcccattgctcctgctcagctcagcccggctgcggaggaacccttggcaggcagaacctggaggtgtcagaggctcaactcctccatctaaccagcaggctcccagagtccccggaagagcctgcgcagctgaagcagagtgcttctagatggagagtggtcactggggaaaaggacctggccatcaccttccaatacctgctgcctgtctccctgacccatgatctggcaagttaggcacagtcagacatggacagttgatccatgaggaaaagatgctctcccacctaaggccaggaatctgagagcaggactggctgagctcccagggcaaggggttcactaatgcttatcaataaagaatattgagcctggaa

SEQ ID NO: 167454 - DNA, 714 bp, Homo sapiens
  Payload ID: 12942
  Gene Symbol: POLD4
  Gene Name: polymerase (DNA-directed), delta 4, accessory subunit
  Uniprot ID: Q9HCU8
  ENST ID: ENST00000539074
  CDS Start-End: 116-355
ccgccgctggcctggccccgtctgtctctctcagcagctgtctttctcgcgcccactggccggtctctcctcttccccgcagttgcctccttctctgcctgcctgggtggccgccatgggccggaagcggctcatcactgattcctacccggttgtgaagaggagggaggggcccgctgggcacagcaagggggagctggcacccgagctaggggaggagccccagccccgcgacgaggaggaagcggagctggagctgctgaggcagtttgacctggcctggcagtacgggccctgcaccgtctctggcatctctatcccctatgaggcaccacgtaagacctcctgcccttagctctcttgctcaccacccaagaacctcaggacagaagcgagagcccattgctcctgctcagctcagcccggctgcggaggaacccttggcaggcagaacctggaggtgtcagaggctcaactcctccatctaaccagcaggctcccagagtccccggaagagcctgcgcagctgaagcagagtgcttctagatggagagtggtcactggggaaaaggacctggccatcaccttccaatacctgctgcctgtctccctgacccatgatctggcaagttaggcacagtcagacatggacagttgatccatgaggaaaagatgctctcccacctaaggccaggaatctgagagcaggactgg

SEQ ID NO: 167455 - DNA, 904 bp, Homo sapiens
  Payload ID: 12942
  Gene Symbol: POLD4
  Gene Name: polymerase (DNA-directed), delta 4, accessory subunit
  ENST ID: ENST00000532830
  CDS Start-End: 359-457
cctggatggccaaggtgaaagaggaggtgactagagaagaaggtgtggagggtggtaggagcaggacagaagatgcagtggtagaaaaacccagagaccccatcctttccactcaagctgctgcgatggaagcacattaggccagagaacctggaccaggggaagagggagtgtctgggaaggcagtgagggactaggaaggactgcctgaaagaattctggcccacagggggaggagccccagccccgcgacgaggaggaagcggagctggagctgctgaggcagtttgacctggcctggcagtacgggccctgcaccgggatcacacggctgcagcgctggtgtcgggccaagcagatgggcttggagcctcccccagaggtgtggcaggtgctgaagacccaccccggagacccccgcttccagtgcagtctctggcatctctatcccctatgaggcaccacgtaagacctcctgcccttagctctcttgctcaccacccaagaacctcaggacagaagcgagagcccattgctcctgctcagctcagcccggctgcggaggaacccttggcaggcagaacctggaggtgtcagaggctcaactcctccatctaaccagcaggctcccagagtccccggaagagcctgcgcagctgaagcagagtgcttctagatggagagtggtcactggggaaaaggacctggccatcaccttccaatacctgctgcctgtctccctgacccatgatctggcaagttaggcacagtcagacatggacagttgatccatgaggaaaagatgctctcccacctaaggccaggaatctgagagcaggactggctgagctcccagggcaaggggttcactaatgcttatcaataaagaatattgagcctggaa

SEQ ID NO: 167456 - DNA, 1486 bp, Homo sapiens
  Payload ID: 12942
  Gene Symbol: POLD4
  Gene Name: polymerase (DNA-directed), delta 4, accessory subunit
  ENST ID: ENST00000529704
  CDS Start-End: 170-268
gggaggcgtccctccctggaccccggcgacttcctctctcggggaggagccccagccccgcgacgaggaggaagcggagctggagctgctgaggcagtttgacctggcctggcagtacgggccctgcaccgggatcacacggctgcagcgctggtgtcgggccaagcagatgggcttggagcctcccccagaggtgtggcaggtgctgaagacccaccccggagacccccgcttccagtgcagtctctggcatctctatcccctatgaggcaccacgtaagacctcctgcccttagctctcttgctcaccacccaagaacctcaggacagaagcgagagcccattgctcctgctcagctcagcccggctgcggaggaacccttggcaggcagaacctggaggtgtcagaggctcaactcctccatctaaccagcaggctcccagagtccccggaagagcctgcgcagctgaagcagagtgcttctagatggagagtggtcactggggaaaaggacctggccatcaccttccaatacctgctgcctgtctccctgacccatgatctggcaagttaggcacagtcagacatggacagttgatccatgaggaaaagatgctctcccacctaaggccaggaatctgagagcaggactggctgagctcccagggcaaggggttcactaatgcttatcaataaagaatattgagcctggaatcctgaccttcagtcctttactgtggccctgctttgactggcagtccctagcaagttaggagatgagagaggcaccactacagctcttttccttcaagaaagtcctaggccgaagagggaggagacagtcatcttgagacggatcaagtcctcggaagagctgagcgacctctggtgccccctggtggcccacagggaaactactcatgactcaccttctggagcagccagggaaaacctacctgactagccagccacctgccttgctaagcggtgcccacctcacaaacatgggtgctttgccagagaaggacccctggggtccatagctcatgaagtccaaacatatctatacattcccagcaagcacctctggcttcccacatcgggggccaccttgatccaaagcagggctggcgagggtctcaacttgcaggacctgctcagacatgaccatcatctgaggggctttggtaagaaactgatggctgggcgcggtggctcacacctgtaatcccagcactttgggaggccaaggagggcggatcacgaggtcaagagatcgagaccatcctggctaacatggtgaaaccccatctctactaaaaatacaaaaaattagccaggtgtagtcccagctactcaggaggctgaggcaggagaatggcgtgaacccgggaggcagagctggcagtgagctgagaccgcatcactgcactccagcctgggtgacagagagagaccccgtctcaaaaaataaaaaaatacaaa

SEQ ID NO: 167457 - DNA, 2121 bp, Homo sapiens
  Payload ID: 12943
  Gene Symbol: POLDIP2
  Gene Name: polymerase (DNA-directed), delta interacting protein 2
  Uniprot ID: Q9Y2S7
  ENST ID: ENST00000540200
  CDS Start-End: 75-1181
gggactggggcggaacgccgcccggccgcgggtcgggctctgtgtcagcagccgggcgggcgctcgggcgggacatggcagcctgtacagcccggcgggccctggccgtgggcagccgctggtggtcccggtcgctgactggggcccggtggccaaggccgctctgtgcggcggccggagctggagccttctcgccagcgtcgaccacgacgacgcggaggcacctctcgtcccgaaaccgaccagagggcaaagtgttggagacagttggtgtgtttgaggtgccaaaacagaatggaaaatatgagaccgggcagcttttccttcatagcatttttggctaccgaggtgtcgtcctgtttccctggcaggccagactgtatgaccgggatgtggcttctgcagctccagaaaaagcagagaaccctgctggccatggctccaaggaggtgaaaggcaaaactcacacttactatcaggtgctgattgatgctcgtgactgcccacatatatctcagagatctcagacagaagctgtgaccttcttggctaaccatgatgacagtcgggccctctatgccatcccaggcttggactatgtcagccatgaagacatcctcccctacacctccactgatcaggttcccatccaacatgaactctttgaaagatttcttctgtatgaccagacaaaagcacctccttttgtggctcgggagacgctaagggcctggcaagagaagaatcacccctggctggagctctccgatgttcatcgggaaacaactgagaacatacgtgtcactgtcatccccttctacatgggcatgagggaagcccagaattcccacgtgtactggtggcgctactgtatccgtttggagaaccttgacagtgatgtggtacagctccgggagcggcactggaggatattcagtctctctggcaccttggagacagtgcgaggccgaggggtagtgggcagggaaccagtgttatccaaggagcagcctgcgttccagtatagcagccacgtctcgctgcaggcttccagtgggcacatgtggggcacgttccgctttgaaagacctgatggctcccactttgatgttcggattcctcccttctccctggaaagcaataaagatgagaagacaccaccctcaggccttcactggtaggccagctgaggccccaagtgcccaggcttggtcaccgggaagaacaactctcatcccacaattgctgcagaactcttctctccccatcatgggccacagtgggtctcttaatttgattgtggggttctttttgtggggaggggtggtataacttttcttcagaagacccatgtgggacacctccaaggctggcctcctcataagccctgcctacaccatgttccagtaaacctctccaccaaggaactgtgttcagctgccacaggcctggaggagtttcctggcctgtcacgtgaggtttgatcagtaaaccagtgcacgcttggccacccttgccatttctgctcccagagtctcaggctccccttctgacccagtgtgcgcccttgactgctttctttgctgcccttccagggagctgcccccctggtagggcatgtgcctgtttccctctcagcctggaggctggctggacatctcctagggtcactgtgcctctcagctagttggcgggggtgctggactggactcttgttcactttaccttctgccaaatgcagagagggaggccagtgtcagggtcggagtggcctggctcttagcactgaccgaccattgccatttctggcctcgctaggcccaggagaggagggaggcaagccagtcgggtttcctggagcaatgggtgtgccagccctcagcatgactctgccaagcatccagaccacaaatgcaggaatttggctgaggagcagctttaggtatggattgatgactaagtcaagctacttcctgagcttctctcagatttccaagagccagagatgaattgtgctgcatcttgccccaattcttaggatttcttttcctccgccactgcagtgattgttagaggtagttttcttgaattaatattaaatcacagttccagcccttgtta

SEQ ID NO: 167458 - DNA, 1524 bp, Homo sapiens
  Payload ID: 12943
  Gene Symbol: POLDIP2
  Gene Name: polymerase (DNA-directed), delta interacting protein 2
  ENST ID: ENST00000618887
  CDS Start-End: 16-1068
gcgctcgggcgggacatggcagcctgtacagcccggcgggccctggccgtgggcagccgctggtggtcccggtcgctgactggggcccggtggccaaggccgctctgtgcggcggccggagctggagccttctcgccagcgtcgaccacgacgacgcggaggcacctctcgtcccgaaaccgaccagagggcaaagtgttggagacagttggtgtgtttgaggtgccaaaacagaatggaaaatatgagaccgggcaggccagactgtatgaccgggatgtggcttctgcagctccagaaaaagcagagaaccctgctggccatggctccaaggaggtgaaaggcaaaactcacacttactatcaggtgctgattgatgctcgtgactgcccacatatatctcagagatctcagacagaagctgtgaccttcttggctaaccatgatgacagtcgggccctctatgccatcccaggcttggactatgtcagccatgaagacatcctcccctacacctccactgatcaggttcccatccaacatgaactctttgaaagatttcttctgtatgaccagacaaaagcacctccttttgtggctcgggagacgctaagggcctggcaagagaagaatcacccctggctggagctctccgatgttcatcgggaaacaactgagaacatacgtgtcactgtcatccccttctacatgggcatgagggaagcccagaattcccacgtgtactggtggcgctactgtatccgtttggagaaccttgacagtgatgtggtacagctccgggagcggcactggaggatattcagtctctctggcaccttggagacagtgcgaggccgaggggtagtgggcagggaaccagtgttatccaaggagcagcctgcgttccagtatagcagccacgtctcgctgcaggcttccagtgggcacatgtggggcacgttccgctttgaaagacctgatggctcccactttgatgttcggattcctcccttctccctggaaagcaataaagatgagaagacaccaccctcaggccttcactggtaggccagctgaggccccaagtgcccaggcttggtcaccgggaagaacaactctcatcccacaattgctgcagaactcttctctccccatcatgggccacagtgggtctcttaatttgattgtggggttctttttgtggggaggggtggtataacttttcttcagaagacccatgtgggacacctccaaggctggcctcctcataagccctgcctacaccatgttccagtaaacctctccaccaaggaactgtgttcagctgccacaggcctggaggagtttcctggcctgtcacgtgaggtttgatcagtaaaccagtgcacgcttggccacccttgccatttctgctcccagagtctcaggctccccttctgacccagtgtgcgcccttgactgctttctttgctgcccttccagggagctgcccccctggtagggcatgtgcctgtttccctctca

SEQ ID NO: 167459 - DNA, 3441 bp, Homo sapiens
  Payload ID: 12944
  Gene Symbol: POLDIP3
  Gene Name: polymerase (DNA-directed), delta interacting protein 3
  Uniprot ID: Q9BY77
  ENST ID: ENST00000252115
  CDS Start-End: 106-1371
gcgagagttggtccgcggacgccggaagtagttcgtcgctccctagcggccgaaggggcgggctcgcggggtctcgactgctttcggcttgctcggcggagcaagatggcggacatctccctggacgaactcatcaggaagcgcggggcggcggcgaaaggacggcttaatgccagaccgggagttggaggtgtccgatctcgagttgggatccagcaaggccttctcagccagtcaacacgcacagccaccttccagcagagatttgatgcccggcagaagattggcctctcagatgcccggctcaaactgggagtcaaggatgcccgggagaagcttttgcagaaagatgcccgatttcgaatcaaagggaaagtgcaggatgccagagagatgttgaactctcgcaagcagcagaccacggtgccccagaagccccgccaggttgctgatgcccgggagaagatcagcttgaagaggagttcccctgctgccttcataaacccacccattgggacagtgacccctgctctgaagctcaccaaaaccatccaggttccacagcagaaagccatggcaccacttcatccccatcctgccggaatgagaatcaatgttgtcaataaccaccaggccaaacagaatttatatgacctggatgaagatgatgatggtatagcttccgttcctactaaacagatgaagtttgcagcctcaggcggctttctccaccacatggctgggctaagcagttccaagctttccatgtccaaggccctccctctcaccaaagtggttcagaatgatgcatacacagctcctgctctcccttcctctattcgaacaaaagccttgaccaacatgtcccggacactggtgaacaaggaagaaccccccaaagagctgccagctgctgagcctgttctcagcccattggaaggcaccaagatgactgtgaataatctgcaccctcgagtcactgaggaggacattgttgagcttttctgtgtgtgtggggccctcaagcgagctcgactggtccatcctggggtagcggaggtggtgtttgtgaaaaaggacgatgccatcaccgcatataagaagtacaacaaccggtgtctggacgggcagccgatgaagtgcaaccttcacatgaatgggaatgttatcacctcagaccagcccatcctgctgcggctgagtgacagcccatcaatgaaaaaggagagcgagctgcctcgcagggtgaactctgcctcctcctccaacccccctgccgaagtggaccctgacaccatcctgaaggcactcttcaagtcctcaggggcctctgtgaccacgcagcccacagaattcaaaatcaagctttgagcaggggagtgaggcagccagaagtgggggcagaggagggtggctctgtttccccaaggcaaagcttatgaccaatgggccatcggactggagacccctgattgtgggaagggttgccagggataaagagcttcctcactggatgggacccgcctttctgtgttgtgttctgccctgtgctcttctctctacgttaacgtttcctgtagtatgtttcttcatctcatcgccaaggtaggcttgtgtttttcagtgtgtgcctccccgagcctcagccccaagctgatttcttatctggaaatggtacactgaattctctgggtggctttcttgtggccccatgggatgcagcgtgggggctgtctgaaggaccctgctttttccaggggccgaggggctgcctttcctttgtgtgtattaagcttttcaaacaatggaggggatggagagccctggtgtcctgacgggagccaggtcggcctgagagctgtgccgctcctctgtcttgtcagtggaggtgcctgggtggggagcaggtctcaggcctcttgtcctctccccagtggctccaggcctcactagtggcaagggcaggatgaggctgcaccgctgggaagagtctatctaagctcttggcttggagtcccgtgtcgtctccacccagaggaagttctccagagttcacctttcccttttccttgagttgtgctgaatgccccaccccagctctctttcccttctgggtgtctttgctgggagggggctgtgttgtgagccctcccggttctcacctcgcctggcacttaaccacaccctggttttgtgtagccgccagctctcttctggttgggcctttgaaaggctcagcctcccattgtgcagtgcttgggtttggagcttatttgaatggaagaggtcagtttgttcctggctctccatttctggcctcagttgtctacaggacagtggtcagggatgcctggaggcatatatccagctgccaccaaggggcactgtttgttcccacttatgtgagtgaccccatccatccatgaccagaggattattttcctgccttggcagaggaggaggagtcaagggagcagggcagctctaccaggcaaggtgtttccccagcataggcgcagacagttgggacgaaacttcagagcccaggcagtccctgaatgaccaggccagtgttgtcactgagtggtcccctgctggttgggagtgaagagaatccaggctggcagagctggagccagttggggagcacggttctgggagctctgcaaaatcagtagcaagtgctggaaaaggcacatgccgaagatactcaagagctcccaagatttgcttgaggctagcccagtgaaaaaaaccagagactcatgtttccaggggtcagtctgtcaggcaggaaggacccaggatttgaacccagcttcagtgtgcaggctctgaggctgcccaggacgggaaagtccaaggaaggggcctggtggtgctccacttgcagttctttaaagaatgctgctttttattctcctaaccctttcaagtgggtgcagacttctcgttagcagctggaagacattcctcccacacttttcccttcctggcccaagagagcatccagaaggcagtaggacctggtttttcaggtactgggagccgggggctcactgcttgcactgtgcttagggtagggatggtaaatatcctccctgcatggctttatcctccctctcatcccaaagcaggtatcttctggttgtcacagagtttcattgagtccagctgcagccacgtggccatctggagctggtgctataggtgaccatctggtacattgaggggacctgtttgcctcctccactctataagcagtcatcttgggagaccgggaggagaaggtggtgggctagtcctgtgtcctcctccacttcccatgcctctatgttacccatctgtgtctcctgtgcagaaggagaggaaggggcattaagagatgaagggtgattatgtattacttatccatttctgaataaacatttgttattccta

SEQ ID NO: 167460 - DNA, 3323 bp, Homo sapiens
  Payload ID: 12944
  Gene Symbol: POLDIP3
  Gene Name: polymerase (DNA-directed), delta interacting protein 3
  Uniprot ID: Q9BY77
  ENST ID: ENST00000348657
  CDS Start-End: 75-1253
ttcgtcgctccctagcggccgaaggggcgggctcgcggggtctcgactgctttcggcttgctcggcggagcaagatggcggacatctccctggacgaactcatcaggaagcgcggggcggcggcgaaaggacggcttaatgccagaccgggagttggaggtgtccgatctcgagttgggatccagcaaggccttctcagccagtcaacacgcacagccaccttccagcagagatttgatgcccggcagaagattggcctctcagatgcccggctcaaactgggagtcaaggatgcccgggagaagcttttgcagaaagatgcccgatttcgaatcaaagggaaagtgcaggatgccagagagatgttgaactctcgcaagcagcagaccacggtgccccagaagccccgccaggttgctgatgcccgggagaagatcagcttgaagaggagttcccctgctgccttcataaacccacccattgggacagtgacccctgctctgaagctcaccaaaaccatccagaatttatatgacctggatgaagatgatgatggtatagcttccgttcctactaaacagatgaagtttgcagcctcaggcggctttctccaccacatggctgggctaagcagttccaagctttccatgtccaaggccctccctctcaccaaagtggttcagaatgatgcatacacagctcctgctctcccttcctctattcgaacaaaagccttgaccaacatgtcccggacactggtgaacaaggaagaaccccccaaagagctgccagctgctgagcctgttctcagcccattggaaggcaccaagatgactgtgaataatctgcaccctcgagtcactgaggaggacattgttgagcttttctgtgtgtgtggggccctcaagcgagctcgactggtccatcctggggtagcggaggtggtgtttgtgaaaaaggacgatgccatcaccgcatataagaagtacaacaaccggtgtctggacgggcagccgatgaagtgcaaccttcacatgaatgggaatgttatcacctcagaccagcccatcctgctgcggctgagtgacagcccatcaatgaaaaaggagagcgagctgcctcgcagggtgaactctgcctcctcctccaacccccctgccgaagtggaccctgacaccatcctgaaggcactcttcaagtcctcaggggcctctgtgaccacgcagcccacagaattcaaaatcaagctttgagcaggggagtgaggcagccagaagtgggggcagaggagggtggctctgtttccccaaggcaaagcttatgaccaatgggccatcggactggagacccctgattgtgggaagggttgccagggataaagagcttcctcactggatgggacccgcctttctgtgttgtgttctgccctgtgctcttctctctacgttaacgtttcctgtagtatgtttcttcatctcatcgccaaggtaggcttgtgtttttcagtgtgtgcctccccgagcctcagccccaagctgatttcttatctggaaatggtacactgaattctctgggtggctttcttgtggccccatgggatgcagcgtgggggctgtctgaaggaccctgctttttccaggggccgaggggctgcctttcctttgtgtgtattaagcttttcaaacaatggaggggatggagagccctggtgtcctgacgggagccaggtcggcctgagagctgtgccgctcctctgtcttgtcagtggaggtgcctgggtggggagcaggtctcaggcctcttgtcctctccccagtggctccaggcctcactagtggcaagggcaggatgaggctgcaccgctgggaagagtctatctaagctcttggcttggagtcccgtgtcgtctccacccagaggaagttctccagagttcacctttcccttttccttgagttgtgctgaatgccccaccccagctctctttcccttctgggtgtctttgctgggagggggctgtgttgtgagccctcccggttctcacctcgcctggcacttaaccacaccctggttttgtgtagccgccagctctcttctggttgggcctttgaaaggctcagcctcccattgtgcagtgcttgggtttggagcttatttgaatggaagaggtcagtttgttcctggctctccatttctggcctcagttgtctacaggacagtggtcagggatgcctggaggcatatatccagctgccaccaaggggcactgtttgttcccacttatgtgagtgaccccatccatccatgaccagaggattattttcctgccttggcagaggaggaggagtcaagggagcagggcagctctaccaggcaaggtgtttccccagcataggcgcagacagttgggacgaaacttcagagcccaggcagtccctgaatgaccaggccagtgttgtcactgagtggtcccctgctggttgggagtgaagagaatccaggctggcagagctggagccagttggggagcacggttctgggagctctgcaaaatcagtagcaagtgctggaaaaggcacatgccgaagatactcaagagctcccaagatttgcttgaggctagcccagtgaaaaaaaccagagactcatgtttccaggggtcagtctgtcaggcaggaaggacccaggatttgaacccagcttcagtgtgcaggctctgaggctgcccaggacgggaaagtccaaggaaggggcctggtggtgctccacttgcagttctttaaagaatgctgctttttattctcctaaccctttcaagtgggtgcagacttctcgttagcagctggaagacattcctcccacacttttcccttcctggcccaagagagcatccagaaggcagtaggacctggtttttcaggtactgggagccgggggctcactgcttgcactgtgcttagggtagggatggtaaatatcctccctgcatggctttatcctccctctcatcccaaagcaggtatcttctggttgtcacagagtttcattgagtccagctgcagccacgtggccatctggagctggtgctataggtgaccatctggtacattgaggggacctgtttgcctcctccactctataagcagtcatcttgggagaccgggaggagaaggtggtgggctagtcctgtgtcctcctccacttcccatgcctctatgttacccatctgtgtctcctgtgcagaaggagaggaaggggcattaagagatgaagggtgattatgtattacttatccatttctgaataaacatttgttattccta

SEQ ID NO: 167461 - DNA, 783 bp, Homo sapiens
  Payload ID: 12944
  Gene Symbol: POLDIP3
  Gene Name: polymerase (DNA-directed), delta interacting protein 3
  ENST ID: ENST00000339677
  CDS Start-End: 1-558
atggcggacatctccctggacgaactcatcaggaagcgcggggcggcggcgaaaggacggcttaatgccagaccgggagttggaggtgtccgatctcgagttgggatccagcaaggccttctcagccagtcaacacgcacagccaccttccagcagagatttgatgcccggcagaagattggcctctcagatgcccggctcaaactgggagtcaaggatgcccgggagaagcttttgcagaaagatgcccgatttcgaatcaaagggaaagtgcaggatgccagagagatgttgaactctcgcaagcagcagaccacggtgccccagaagccccgccaggttgctgatgcccgggagaagatcagcttgaagaggagttcccctgctgccttcataaacccacccattgggacagtgacccctgctctgaagctcaccaaaaccatccaggtcggcctgagagctgtgccgctcctctgtcttgtcagtggaggtgcctgggtggggagcaggtctcaggcctcttgtcctctccccagtggctccaggcctcactagtggcaagggcaggatgaggctgcaccgctgggaagagtctatctaagctcttggcttggagtcccgtgtcgtctccacccagaggaagttctccagagttcacctttcccttttccttgagttgtgctgaatgccccaccccagctctctttcccttctgggtgtctttgctgggagggggctgtgttgtgagccctcccggttctcacctcgcctggcacttaa

SEQ ID NO: 167462 - DNA, 3491 bp, Homo sapiens
  Payload ID: 12944
  Gene Symbol: POLDIP3
  Gene Name: polymerase (DNA-directed), delta interacting protein 3
  ENST ID: ENST00000451060
  CDS Start-End: 106-1422
gcgagagttggtccgcggacgccggaagtagttcgtcgctccctagcggccgaaggggcgggctcgcggggtctcgactgctttcggcttgctcggcggagcaagatggcggacatctccctggacgaactcatcaggaagcgcggggcggcggcgaaaggacggcttaatgccagaccgggagttggaggtgtccgatctcgagttgggatccagcaaggccttctcagccagtcaacacgcacagccaccttccagcagagatttgatgcccggcagaagattggcctctcagatgcccggctcaaactgggagtcaaggatgcccgggagaagcttttgcagaaagatgcccgatttcgaatcaaagggaaagtgcaggatgccagagagatgttgaactctcgcaagcagcagaccacggtgccccagaagccccgccaggttgctgatgcccgggagaagatcagcttgaagaggagttcccctgctgccttcataaacccacccattgggacagtgacccctgctctgaagctcaccaaaaccatccagagaatgcatgtggaccctgtggggtggattctgaccactgagtgtttccaggttccacagcagaaagccatggcaccacttcatccccatcctgccggaatgagaatcaatgttgtcaataaccaccaggccaaacagaatttatatgacctggatgaagatgatgatggtatagcttccgttcctactaaacagatgaagtttgcagcctcaggcggctttctccaccacatggctgggctaagcagttccaagctttccatgtccaaggccctccctctcaccaaagtggttcagaatgatgcatacacagctcctgctctcccttcctctattcgaacaaaagccttgaccaacatgtcccggacactggtgaacaaggaagaaccccccaaagagctgccagctgctgagcctgttctcagcccattggaaggcaccaagatgactgtgaataatctgcaccctcgagtcactgaggaggacattgttgagcttttctgtgtgtgtggggccctcaagcgagctcgactggtccatcctggggtagcggaggtggtgtttgtgaaaaaggacgatgccatcaccgcatataagaagtacaacaaccggtgtctggacgggcagccgatgaagtgcaaccttcacatgaatgggaatgttatcacctcagaccagcccatcctgctgcggctgagtgacagcccatcaatgaaaaaggagagcgagctgcctcgcagggtgaactctgcctcctcctccaacccccctgccgaagtggaccctgacaccatcctgaaggcactcttcaagtcctcaggggcctctgtgaccacgcagcccacagaattcaaaatcaagctttgagcaggggagtgaggcagccagaagtgggggcagaggagggtggctctgtttccccaaggcaaagcttatgaccaatgggccatcggactggagacccctgattgtgggaagggttgccagggataaagagcttcctcactggatgggacccgcctttctgtgttgtgttctgccctgtgctcttctctctacgttaacgtttcctgtagtatgtttcttcatctcatcgccaaggtaggcttgtgtttttcagtgtgtgcctccccgagcctcagccccaagctgatttcttatctggaaatggtacactgaattctctgggtggctttcttgtggccccatgggatgcagcgtgggggctgtctgaaggaccctgctttttccaggggccgaggggctgcctttcctttgtgtgtattaagcttttcaaacaatggaggggatggagagccctggtgtcctgacgggagccaggtcggcctgagagctgtgccgctcctctgtcttgtcagtggaggtgcctgggtggggagcaggtctcaggcctcttgtcctctccccagtggctccaggcctcactagtggcaagggcaggatgaggctgcaccgctgggaagagtctatctaagctcttggcttggagtcccgtgtcgtctccacccagaggaagttctccagagttcacctttcccttttccttgagttgtgctgaatgccccaccccagctctctttcccttctgggtgtctttgctgggagggggctgtgttgtgagccctcccggttctcacctcgcctggcacttaaccacaccctggttttgtgtagccgccagctctcttctggttgggcctttgaaaggctcagcctcccattgtgcagtgcttgggtttggagcttatttgaatggaagaggtcagtttgttcctggctctccatttctggcctcagttgtctacaggacagtggtcagggatgcctggaggcatatatccagctgccaccaaggggcactgtttgttcccacttatgtgagtgaccccatccatccatgaccagaggattattttcctgccttggcagaggaggaggagtcaagggagcagggcagctctaccaggcaaggtgtttccccagcataggcgcagacagttgggacgaaacttcagagcccaggcagtccctgaatgaccaggccagtgttgtcactgagtggtcccctgctggttgggagtgaagagaatccaggctggcagagctggagccagttggggagcacggttctgggagctctgcaaaatcagtagcaagtgctggaaaaggcacatgccgaagatactcaagagctcccaagatttgcttgaggctagcccagtgaaaaaaaccagagactcatgtttccaggggtcagtctgtcaggcaggaaggacccaggatttgaacccagcttcagtgtgcaggctctgaggctgcccaggacgggaaagtccaaggaaggggcctggtggtgctccacttgcagttctttaaagaatgctgctttttattctcctaaccctttcaagtgggtgcagacttctcgttagcagctggaagacattcctcccacacttttcccttcctggcccaagagagcatccagaaggcagtaggacctggtttttcaggtactgggagccgggggctcactgcttgcactgtgcttagggtagggatggtaaatatcctccctgcatggctttatcctccctctcatcccaaagcaggtatcttctggttgtcacagagtttcattgagtccagctgcagccacgtggccatctggagctggtgctataggtgaccatctggtacattgaggggacctgtttgcctcctccactctataagcagtcatcttgggagaccgggaggagaaggtggtgggctagtcctgtgtcctcctccacttcccatgcctctatgttacccatctgtgtctcctgtgcagaaggagaggaaggggcattaagagatgaagggtgattatgtattacttatccatttctgaataaacatttgttattcct

SEQ ID NO: 167463 - DNA, 579 bp, Homo sapiens
  Payload ID: 12944
  Gene Symbol: POLDIP3
  Gene Name: polymerase (DNA-directed), delta interacting protein 3
  ENST ID: ENST00000454057
  CDS Start-End: 4-573
aagatggcggacatctccctggacgaactcatcaggaagcgcggggcggcggcgaaaggacggcttaatgccagaccgggagttggaggtgtccgatctcgagttgggatccagcaaggccttctcagccagtcaacacgcacagccaccttccagcagagatttgatgcccggcagaagattggcctctcagatgcccggctcaaactgggagtcaaggatgcccgggagaagcttttgcagaaagatgcccgatttcgaatcaaagggaaagtgcaggatgccagagagatgttgaactctcgcaagcagcagaccacggtgccccagaagccccgccaggttgctgatgcccgggagaagatcagcttgaagaggagttcccctgctgccttcataaacccacccattgggacagtgacccctgctctgaagctcaccaaaaccatccagaatttatatgacctggatgaagatgatgatggtatagcttccgttcctactaaacagatgaagtttgcagcctcaggcggctttctccaccacatgggaccaggcctttccagtaattagactgct

SEQ ID NO: 167464 - DNA, 3337 bp, Homo sapiens
  Payload ID: 12944
  Gene Symbol: POLDIP3
  Gene Name: polymerase (DNA-directed), delta interacting protein 3
  ENST ID: ENST00000445215
  CDS Start-End: 13-858
cggcggagcaagatggcggacatctccctggacgaactcatcaggaagcgcggggcggcggcgaaaggacggcttaatgccagaccgggagttggaggtgtccgatctcgagttgggatccagcaaggccttctcagccagtcaacacgcacagccaccttccagcagagatttgatgcccggcagaagattggcctctcagatgcccggctcaaactgggagtcaaggatgcccgggagaagcttttgcagaaagatgcccgatttcgaatcaaagggaaagtgcaggatgccagagagatgttgaactctcgcaagcagcagaccacggtgccccagaagccccgccaggttgctgatgcccgggagaagatcagcttgaagaggagttcccctgctgccttcataaacccacccattgggacagtgacccctgctctgaagctcaccaaaaccatccaggttccacagcagaaagccatggcaccacttcatccccatcctgccggaatgagaatcaatgttgtcaataaccaccaggccaaacagaatttatatgacctggatgaagatgatgatggtatagcttccgttcctactaaacagatgaagtttgcagcctcaggcggctttctccaccacatggctgggctaagcagttccaagctttccatgtccaaggccctccctctcaccaaagtggttcagaatgatgcatacacagctcctgctctcccttcctctattcgaacaaaagccttgaccaacatgtcccggacactggtgaacaaggaagaaccccccaaagagctgccagctgctgagcccattggaaggcaccaagatgactgtgaataatctgcaccctcgagtcactgaggaggacattgttgagcttttctgtgtgtgtggggccctcaagcgagctcgactggtccatcctggggtagcggaggtggtgtttgtgaaaaaggacgatgccatcaccgcatataagaagtacaacaaccggtgtctggacgggcagccgatgaagtgcaaccttcacatgaatgggaatgttatcacctcagaccagcccatcctgctgcggctgagtgacagcccatcaatgaaaaaggagagcgagctgcctcgcagggtgaactctgcctcctcctccaacccccctgccgaagtggaccctgacaccatcctgaaggcactcttcaagtcctcaggggcctctgtgaccacgcagcccacagaattcaaaatcaagctttgagcaggggagtgaggcagccagaagtgggggcagaggagggtggctctgtttccccaaggcaaagcttatgaccaatgggccatcggactggagacccctgattgtgggaagggttgccagggataaagagcttcctcactggatgggacccgcctttctgtgttgtgttctgccctgtgctcttctctctacgttaacgtttcctgtagtatgtttcttcatctcatcgccaaggtaggcttgtgtttttcagtgtgtgcctccccgagcctcagccccaagctgatttcttatctggaaatggtacactgaattctctgggtggctttcttgtggccccatgggatgcagcgtgggggctgtctgaaggaccctgctttttccaggggccgaggggctgcctttcctttgtgtgtattaagcttttcaaacaatggaggggatggagagccctggtgtcctgacgggagccaggtcggcctgagagctgtgccgctcctctgtcttgtcagtggaggtgcctgggtggggagcaggtctcaggcctcttgtcctctccccagtggctccaggcctcactagtggcaagggcaggatgaggctgcaccgctgggaagagtctatctaagctcttggcttggagtcccgtgtcgtctccacccagaggaagttctccagagttcacctttcccttttccttgagttgtgctgaatgccccaccccagctctctttcccttctgggtgtctttgctgggagggggctgtgttgtgagccctcccggttctcacctcgcctggcacttaaccacaccctggttttgtgtagccgccagctctcttctggttgggcctttgaaaggctcagcctcccattgtgcagtgcttgggtttggagcttatttgaatggaagaggtcagtttgttcctggctctccatttctggcctcagttgtctacaggacagtggtcagggatgcctggaggcatatatccagctgccaccaaggggcactgtttgttcccacttatgtgagtgaccccatccatccatgaccagaggattattttcctgccttggcagaggaggaggagtcaagggagcagggcagctctaccaggcaaggtgtttccccagcataggcgcagacagttgggacgaaacttcagagcccaggcagtccctgaatgaccaggccagtgttgtcactgagtggtcccctgctggttgggagtgaagagaatccaggctggcagagctggagccagttggggagcacggttctgggagctctgcaaaatcagtagcaagtgctggaaaaggcacatgccgaagatactcaagagctcccaagatttgcttgaggctagcccagtgaaaaaaaccagagactcatgtttccaggggtcagtctgtcaggcaggaaggacccaggatttgaacccagcttcagtgtgcaggctctgaggctgcccaggacgggaaagtccaaggaaggggcctggtggtgctccacttgcagttctttaaagaatgctgctttttattctcctaaccctttcaagtgggtgcagacttctcgttagcagctggaagacattcctcccacacttttcccttcctggcccaagagagcatccagaaggcagtaggacctggtttttcaggtactgggagccgggggctcactgcttgcactgtgcttagggtagggatggtaaatatcctccctgcatggctttatcctccctctcatcccaaagcaggtatcttctggttgtcacagagtttcattgagtccagctgcagccacgtggccatctggagctggtgctataggtgaccatctggtacattgaggggacctgtttgcctcctccactctataagcagtcatcttgggagaccgggaggagaaggtggtgggctagtcctgtgtcctcctccacttcccatgcctctatgttacccatctgtgtctcctgtgcagaaggagaggaaggggcattaagagatgaagggtgattatgtattacttatccatttctgaataaacatttgttattccta

SEQ ID NO: 167465 - DNA, 2006 bp, Homo sapiens
  Payload ID: 12944
  Gene Symbol: POLDIP3
  Gene Name: polymerase (DNA-directed), delta interacting protein 3
  ENST ID: ENST00000617178
  CDS Start-End: 55-744
gaaggggcgggctcgcggggtctcgactgctttcggcttgctcggcggagcaagatggcggacatctccctggacgaactcatcaggaagcgcggggcggcggcgaaaggacggcttaatgccagaccgggagttggaggtgtccgatctcgagttgggatccagcaaggccttctcagccagtcaacacgcacagccaccttccagcagagatttgatgcccggcagaagattggcctctcagatgcccggctcaaactgggagtcaaggatgcccgggagaagcttttgcagaaagatgcccgatttcgaatcaaagggaaagtgcaggatgccagagagatgttgaactctcgcaagcagcagaccacggtgccccagaagccccgccaggttgctgatgcccgggagaagatcagcttgaagaggagttcccctgctgccttcataaacccacccattgggacagtgacccctgctctgaagctcaccaaaaccatccagaatttatatgacctggatgaagatgatgatggtatagcttccgttcctactaaacagatgaagtttgcagcctcaggcggctttctccaccacatggctgggctaagcagttccaagctttccatgtccaaggccctccctctcaccaaagtggttcagaatgatgcatacacagctcctgctctcccttcctctattcgaacaaaagccctcccggttctcacctcgcctggcacttaaccacaccctggttttgtgtagccgccagctctcttctggttgggcctttgaaaggctcagcctcccattgtgcagtgcttgggtttggagcttatttgaatggaagaggtcagtttgttcctggctctccatttctggcctcagttgtctacaggacagtggtcagggatgcctggaggcatatatccagctgccaccaaggggcactgtttgttcccacttatgtgagtgaccccatccatccatgaccagaggattattttcctgccttggcagaggaggaggagtcaagggagcagggcagctctaccaggcaaggtgtttccccagcataggcgcagacagttgggacgaaacttcagagcccaggcagtccctgaatgaccaggccagtgttgtcactgagtggtcccctgctggttgggagtgaagagaatccaggctggcagagctggagccagttggggagcacggttctgggagctctgcaaaatcagtagcaagtgctggaaaaggcacatgccgaagatactcaagagctcccaagatttgcttgaggctagcccagtgaaaaaaaccagagactcatgtttccaggggtcagtctgtcaggcaggaaggacccaggatttgaacccagcttcagtgtgcaggctctgaggctgcccaggacgggaaagtccaaggaaggggcctggtggtgctccacttgcagttctttaaagaatgctgctttttattctcctaaccctttcaagtgggtgcagacttctcgttagcagctggaagacattcctcccacacttttcccttcctggcccaagagagcatccagaaggcagtaggacctggtttttcaggtactgggagccgggggctcactgcttgcactgtgcttagggtagggatggtaaatatcctccctgcatggctttatcctccctctcatcccaaagcaggtatcttctggttgtcacagagtttcattgagtccagctgcagccacgtggccatctggagctggtgctataggtgaccatctggtacattgaggggacctgtttgcctcctccactctataagcagtcatcttgggagaccgggaggagaaggtggtgggctagtcctgtgtcctcctccacttcccatgcctctatgttacccatctgtgtctcctgtgcagaaggagaggaaggggcattaagagatgaagggtgattatgtattacttatccatttctgaataaacatttgttattcct

SEQ ID NO: 167466 - DNA, 1248 bp, Homo sapiens
  Payload ID: 12945
  Gene Symbol: POLE4
  Gene Name: polymerase (DNA-directed), epsilon 4, accessory subunit
  Uniprot ID: Q9NR33
  ENST ID: ENST00000483063
  CDS Start-End: 189-542
cgggtggctaggcgcgtgggaagagccggagcccgacccccgcccacccggtttcctggcagcgcactgccgcgtaggggcggagccgcgcgcctacacagggtgtggcctccagcccgcgcgggaaagggcctgcgccgcatgcgcgcgcacagtcggcggccgcgcgcagcacgctcaaggccgggatggcggcggcggcggcggcaggaagcgggacgccccgagaggaggagggacctgctggggaggcagcggcctcgcagccccaggccccaacgagtgtgcctggggctcgtctctcgaggttgcctctggcgcgagtgaaggccttggtgaaggcagatcccgacgtgacgctagcgggacaggaagccatcttcattctggcacgagccgcggaactgtttgtggagaccattgcaaaagatgcctactgttgcgctcagcagggaaaaaggaaaacccttcagaggagagacttggataatgcaatagaagctgtggatgaatttgcttttctggaaggtactttagattgattgccgagcggggcagttttgtgagccttcatctgaagccttcagttcacccctctgcacaggcctcagctttgaagaacggagtctttgcacttacacacactcttcctgttctgccttcacctatgccgggataagcagagatctcatcaattagctcttctctgcaaggtcttccactatttctgtctgtcttccatatcaagcctggatgcagctgctgctgcttagagcagagatgaagaaagtgttctgcataagtggcttcctgaatgatgaggaccagaataaaggtttttgatcaacctcagtccagtgtgttttataatctcgcctttgttcctaccctgtgactggagagtcaccatacctggtcacagaccttcctgatcttccctgccagccattctaacatacagtcctttcattaattttgttcttttatttttccagcacatcaccagaaagtggttccagaatttatggaacaccacttgccctcaggagttcaaataaatatggtcctagattgaaagccagttaaattttttttaagttttatttattgacatatccacatactctatatttcaccaatttaaagtgtacaattcagtggtatttagtatattcacaaatatgtacaccagtcatcacagtcgattttagaacattttatttatttatttattattattatacttta

SEQ ID NO: 167467 - DNA, 12749 bp, Homo sapiens
  Payload ID: 12946
  Gene Symbol: POLR1A
  Gene Name: polymerase (RNA) I polypeptide A, 194kDa
  Uniprot ID: O95602
  ENST ID: ENST00000263857
  CDS Start-End: 380-5542
attggctgaagcggaagaagacgaaagcaatcataaaatgggaggttgcaagctcatggtttgaaagacttcgtcacggaagctaaaagctctatacacccgatttgcctcggaggaattttcctaaatgattattttgatgtcttatatatctttgattgttttcaaaacaaaagagcgagcagagagtcgtacaactatttgttccccccccatgtagaagtgatctcatccacgtaaatgtcgttcctgcgaccgcttccgcgcgcaagcgcacgttgaatcgcgtggtgactccgggcttgaggttgaattaagaatagtcaggtggtgagtggaacgtctcttggggtgtcggaattcaaaacggacctggaggatgttgatctccaagaacatgccctggcggcggctgcagggcatttccttcgggatgtattcggctgaagagctcaagaaattaagtgttaaatccattacgaaccctcgatacctggacagcctggggaacccatcggcaaacggcctgtacgatttagctttgggccctgcagattccaaagaggtgtgctccacctgcgtgcaggacttcagcaactgttctgggcacctgggccacattgagctcccactcacagtgtataaccctctcctcttcgataagctgtacctgctgcttcggggctcttgtttaaactgccacatgctgacttgtccccgggccgtgattcacctcttactctgccagctgagggttctggaagtcggggccctacaagcagtctacgagcttgagagaattctgaacaggtttctggaagaaaatcccgatccctctgcctctgaaattcgggaggaattagaacaatacacaactgaaattgtgcagaacaacctcctggggtcccagggcgcacatgtaaagaacgtgtgtgagagcaagagcaagctcattgctctcttctggaaggcacatatgaatgctaagcgctgtccccactgcaagaccgggcgatccgttgtccgaaaggaacacaacagcaagttgactatcacgtttccagccatggtgcacaggacagctggccagaaggactctgagcccctgggaattgaggaagctcagataggaaaacgaggatacttaacacccaccagtgcccgcgaacacctttctgccctgtggaagaatgaaggattctttctgaactaccttttttcgggaatggatgatgatggtatggaatccagattcaatcccagtgtgttctttctagatttcttggtggtgccgccctcaaggtatcgcccagtcagtcgcctaggagaccagatgtttactaatggccagacggtgaacttgcaggctgtcatgaaggatgtagttctgattcgaaaacttctggcattgatggcccaagaacagaagttgccagaggaagtggccacacccactacagatgaggaaaaagactctttgattgctattgaccgatcctttttgagtacacttccaggccagtccctcatagacaaactttacaacatttggattcgccttcagagccacgtcaatattgtgtttgatagcgagatggacaaactaatgatggacaagtacccaggcattaggcagatcctggagaagaaagaaggcctgttccgaaaacacatgatgggaaagcgagtggactacgctgcgcgctcagtcatctgcccagacatgtacatcaacaccaacgaaattggaattcccatggtgtttgccacaaaactgacctacccacagccagttaccccatggaatgttcaggaacttaggcaagcggtcatcaacggccctaatgtgcacccaggagcctccatggtcatcaatgaggacggcagccgcacagccctgagcgctgtggacatgacccagcgagaggccgtggccaagcagcttctgaccccagccacgggggcacctaagccccaggggacaaaaattgtgtgccggcatgtgaagaatggggacattctgctactgaaccgacagcccacactgcacagaccctccatccaggcccaccgtgcccgcatcctgcctgaagagaaagtgctgcggctccactatgccaactgcaaggcctataatgccgactttgatggagacgagatgaatgcccatttcccccagagtgagctgggccgggccgaggcctacgtcctggcctgcactgatcagcagtaccttgttcccaaggatggccaaccattggcgggactgatccaggatcacatggtttcaggggcaagcatgactactcggggttgctttttcacccgggagcactatatggagctggtgtaccgaggactcacggacaaagtggggcgcgtgaagctcctttctccttccatcctgaagccctttccgctgtggacaggaaaacaggttgtgtcaacgctgctcataaatataatcccagaggaccacatcccactgaacttatctggaaaggcgaaaatcactgggaaagcctgggtgaaggaaactcctcgatccgttcctggctttaaccctgactcgatgtgcgagtcccaggtgatcatcagggaaggggagctgctctgcggagtgctggacaaggcgcactatgggagctccgcctacggcctggtccactgctgctatgagatctatggaggcgagaccagcggcaaggttctaacctgcctggcccgcctcttcaccgcctacctgcagctctacagaggcttcaccttgggcgtggaagacattttggtgaagccaaaggcagatgtcaagaggcaacgtatcattgaagaatccacccactgcgggccccaggctgtcagggctgcattaaacctgccagaagccgcatcatatgatgaggtccgaggaaaatggcaggatgcccatctgggcaaggaccagagggattttaacatgattgatctgaagttcaaggaggaagtgaaccattacagcaatgagattaacaaggcatgcatgccttttggcctacacagacagttcccagagaacagcctgcagatgatggtgcagtcgggagccaaaggttcaactgtgaacacgatgcagatctcgtgcctgctgggccagattgaactggaaggtcggagacccccgctgatggcgtctggcaagtcactgccctgctttgagccttatgagttcacccccagggctggtggctttgtcactggcaggttcctcaccggcatcaaacctcctgagttcttcttccactgcatggcaggacgagagggcctggtggacactgctgtgaaaaccagccgctcaggctatctccaaaggtgcatcatcaagcacctagaggggctggtcgtgcagtatgatctcacggtccgtgacagtgacggcagtgtggtgcagttcctgtatggggaggatggcctggacatccccaagacacagttcctgcagcccaagcagttccccttcctggccagcaactacgaggtgataatgaaatcacagcatctccatgaagttttatccagagcagatcccaaaaaagctctccaccacttcagagctatcaaaaaatggcaaagcaagcaccccaacaccctgctgagaagaggcgccttcttgagttattcccagaaaattcaggaagctgtgaaagccctgaaacttgagagtgaaaaccgcaatggccgcagccctgggactcaggagatgctgaggatgtggtatgagttggatgaggaaagccgaaggaaataccagaagaaggcggccgcttgtcctgaccccagtctgtctgtctggcgtcctgacatctactttgcatcagtgtcagaaacatttgaaacaaaggttgatgactacagtcaagagtgggcagctcaaacagagaagagttatgagaaatcagagctttctctcgacaggttgaggaccttgctgcagctgaagtggcagcgctcactgtgtgagccgggcgaggctgtgggcctgctggctgcccagagcatcggagagccctccacccagatgaccctcaacaccttccactttgcaggcagaggcgagatgaacgtcaccctgggcattccaaggttgcgggagattctcatggtggccagcgccaacatcaagacacccatgatgagcgtgcccgtgctcaacaccaagaaagccctgaagagagtgaaaagcctgaagaagcaactcaccagggtgtgcttgggggaggtgttgcagaaaattgacgtccaggagtccttctgtatggaagaaaaacagaacaaattccaggtgtaccagctgcggtttcagttcctgccacatgcatattaccagcaggagaagtgcctgagacccgaggacatcctgcgcttcatggaaacaagattctttaaacttctgatggaatccatcaaaaagaagaataataaagcatcagctttcaggaacgtaaacactcgaagagctacacagcgggatctggacaacgctggggagttggggaggagtcggggagagcaggagggtgatgaggaagaggaggggcacattgtggatgctgaagctgaggagggggacgccgatgcctctgatgccaaacgcaaggagaagcaggaggaggaggttgattatgagagtgaggaagaggaggagagggagggcgaggagaacgacgatgaagacatgcaggaggaacgaaatccccacagggaaggtgctcgaaagacccaagagcaagatgaagaggtgggcttaggcactgaggaggacccgtcccttcccgccctcctgacgcagccccggaaacccacccacagccaggagccccaggggcccgaggccatggagcgccgggtccaggctgtgcgtgagatccacccgttcatagatgactaccagtacgacaccgaggagagcctgtggtgccaggtgacagtgaagctccctctgatgaagatcaactttgacatgagctccctggtagtatctttggcccatggtgccgtcatctatgcgaccaagggcatcactcggtgcctcctgaatgaaacaaccaacaataagaacgagaaggagcttgtgctaaacacagaaggaatcaacctcccagagctattcaagtatgcagaggtcctggatctgcgccgcctctactccaacgacatccacgccatagccaacacgtatggcattgaggccgcgctgcgggtgatcgagaaggagatcaaggatgtgtttgccgtgtatggcatcgcggtcgaccctcgccatctctccctggttgctgattatatgtgcttcgagggtgtttacaagccactgaatcgctttgggatccggtcaaactcttccccgctacagcagatgacatttgaaaccagcttccagtttctgaagcaagccaccatgctgggatcccacgatgagctgaggtctccttctgcctgccttgtggtcgggaaggtcgtcaggggcgggacaggcctgttcgagctcaagcagcctctgagatagcagctaccccggcaccatctgcccagctccaaggacccttggtgagggcgtggcccagcctgccttctgcatgagaggaccaggagactggaatccagggcagttccaagtgacagtacagagcacagcagcgaccttgggcctgaaagcagtgggcctctgagctgggccagcttcacctggaaagtgacagagttgctcatccttgcccctccctgtctctggatttttatcaaggtttaccaagtcttctgagtccccctgagatggctggggcctcacctgtgctgcaggaggcctctgtggcataacccctaaggagaagtcctgattcacgattcactgagaagaccaaggggaagccatgctttgctgctggggaccccaggcacctccagagtagggaagcggggttcttttgctgtgagtggccagggacaacagacaagattcctgggggctcccgatgagcaggaacgtggagcctgctgcccaaggcctgctccttccggctgctccagcccctgggggcagagtccacaaagagtccccatcaagacttcttccctgagtcaagtacagcgtagcatagtcctccacccacccaacctctctgcctggccagggtcctggccctgccactgtgtggcgaggtgtccttctagaccacatcagccccaaggctgggagcagtcgctccagggccgcagcagttcactcccacacatagaacccaggtcactgctggggcgattgaacaggttgcctggcttttctctgctgtcagtttggtgtggaggcctatgttctgccccatacaccccacaggccctgcttatgggaaggaacacaggcctccagcccagaggactgtgccgccctgttcttggccgtccacgtttcctctccctctagcaccagcaatacatttccctggcatggacagaaaagacagagaggacttatacaaaggctttgtaaaaccagaggctagcttctatctttgtctactgttatttcagctcagggcgggtaattaacatcattggaactagctattaggaaagaaaaaaaacttggttttttttacaacaattttttcccttggtttgcagtttctgcatttggatttgagaacccagggcggggattttcttggcacagtcaggtcttgggtccctcttcctgtgctttcttgtctgaggccttagggggaagagctcagcctctgcagcctcctccacctctgcccctggcctgcctctgctgtgacctccttccagagctagctgctggccctgtggccaggagaagcagaggggagaagcctttatgcagaagctgtgctagccttggtctggggtggggaggctgctgctgtgaccttaggggtagggttggggatcaagggaggctttgtcaagggagagtgaccatgttgctccctacatccatgcaataggacccagcctgcacctcctaggcctacactggggaaagcctgacagaaatcagtacctcctaacggggtctgccaggttcaccaaggcatgggcacagaggaatatgacagttttgaggcaggcaggaagggcccagcctgcagggtaagacattcattctttgagttaaaggccatattcacttgatgatttctacacacactagaattgtgagagtgtccttgaaggagatcacaaagtaacctggtgactgtggcacagggtccgtggattccatctctcccaggcactgagggcgcagaggcgaaggagcaagccctgcatattggcagggctgtgaccatcgcacttagatcagacccccgacctgtgttgggatgtgagggatgccctcctgccccacccatccacatggttcctgggcagctctgttttattcctgtgtctttcctgatggatgagtattaagacagcatgtctggtttttaaacagacatttgggagcttgcacatcctgatgagcagggactcactgtggtggccttagggaattacacgctcactttggtggttctctatgctcggaagcctctgagagtggccttggcagcttaagatggcagaggctttggagtcttcttaggactgtaagtgcccattgaggatgcatttgagttttggaaagtaggcccaagtcaaatctgatggatggattcaagaacatggactaatctgcgttgtcatttttaatcaaaatgtaatggagattgatcatctggtggggttcacaaacttttcatgagagctgtgagttctttttttgagatgcacttttgcacttgttacccaggctgagtgcaatggcgcaatctcggctccactgcaacctccatctcccgagttcaagcgattctcctgcctcagcctcccgagtagctgagattacaggcatgcgccaccacgcctggctaatttttgtatttttagtagagatggggtttcaccatgttggccaggctagtctcgaactcctaatctcaggtgatccgcctgcctcagcctcccaaagtgctgggtttacaggcgtgagctactgtgccggccagagctatgagttctttcagaatcctcagatgccattagctagccactgtttggacatccttctcaccttgccctttggggtgatatccatacctacttgcttgcttctaacagtttttttatttgttttgtagagacgggttttggtttattgctcaggctggtttcaaactcctaggctcaagcggtcctcccactgtggcctcccaaagtgctgggtggtgtgagccaccgtgcctggccagttaattttttttagtgtctcttttttgggttctcaccagaaacactatcagcattcccacagatattcctgtgagtctttgaaacattttctatcctgcattgagtaagaataaaaccgaggaaggggtgaagcaccttgtctcatccccagtctggaacttgaaccttcttttctcttcactttgccctacccccaaataatatgtacaaatgtctgtatccattgagcactaactccctattccttccacctccccagcccctggcaaccactgttctacgttctgtctctacgaatttgacttctctaggtccctcatacaagtggaaaagtacagcatgtctttttgtgaccggcttatttcacttagcataatgtcctcaaggttcatccatgctgtagcatgtgtcagaattgccttcttgcttgaggctgctgatacctcctcatgtgtatataccgtattttgtttaatcactcatctgttggtggacacttgggttgcctccacctcttggctgttgcaaataacgctgtgaacatggatatacagatatctgaggccaggccaggcgttcacacctgtaatcccaatacgttgggaggccgaggcgggcagatcatctgaggtcaggattcgagaccaccctggccaacatggcaaaaccccatctctactaaaaatacaaaaattagctgggtgtggtggtgcgcgcctataatcccagctactcgggaggctgaggcaggagaatcttgaactcaggaggtggaggttgcagtgagccgagattgcgccactgcactccagcctgggtgacagagtgagattccgtctcaaaaaaaaaaaaaaacaaaaactcagaccctgctttcctttgaatatatactagaagtggaattgctggatcatatggtaattctttaatttttctgggggaactgctgtcccattttccacagcagctacaccattttatgttcccaccaacggtgtacaacaatttcaatttctccacatccttgttcttgttaatagtagccaccctaatgtgtatgaggtgccatctcgtggtttggtgtgggctgtgtttcaatcagatgttgggacccttaagtgttctgcacctggggagagttaggaaccacttaaggagtgtctgttgcttgccaatcttaaaatttttagtttgcacctgaatcaggggctgtcagagtccagactgctcttgaaatagaaaagactggtcgttaaaggctggttcgttgagtctttcatcgttgagtgataccacctctgcagatggctcagtggggcagccccgtaccacagcctgcccttgaggttgtgtagtttagataggtcacagagttgctgggcctaccgcaggtctcctgaccctggtgcagttttacttcaattacaaccaccaaaatagctacagtcaaaaattccaaagttcctacaccatcaacctccaccccacttccgtccaaagtccacttagaggctctcagttttggaccttagaaacacttagggagctttttaaaaagatcgattctgtatttttagtagagatggggtttcacccagctactcaggaggctgaggcaggagaatcacttgaaccggggagttggaggttgcagtgagccgagattatgtcactccagcctgggcaacagagtgagactccgtcttaggaaaaaaaaaaagattgattctggccgggcacagtggctcacgcttacagtcccagcactttaagagactcaggcaggaggatcacttgagcttaggagtttgagactagcctgggcaacccagtgagaccccgtatctacaaaaattagccaggtgttgtgacatgtgcctgtggtcccagctactcaagaggctgaggtgagaggagcaagtgagcccaggagttcaaggctgcaatgagctgtgatcgcaccactgcactccagctcgggtgacaagagtgagaccccgtctgaaaaaaagattgatcccaaggccttgcccagattctgattttattggcctggagtgtggcctaggcattagaaaatcttcaagagagtctaaggtgcagcggaattgagagccacggacagaaaaagccctaaattgtggaaatgcacagccaccgtcaccacctatcggtacgatgacatctcaaggagtcactggccctaggtttctgcagtaggatcttaagatctgatctctgccctcaagtgagtgcacgtgcagtaaagctgtcatcgtgccatgacagatgtctgcaaggactttacagtggggtccaaaggatgccaccatcagctccacctggggctcaacaaagcctgaaagaagaaagggatgatgcttccagcagaaacctggaggcctgcagctctgccagcccagcacagcaagcgaggccatttgtccagcaggggcagaaggagggaactcagccagccagcgtttcctacaagcagctccatgagaggtttccacttaaaatgctaaatcataattatttaatcagattcgttccttaagttctttaagcagcatcgctgtcctaccacgagtggtcatcaaggagcagggtttaactcaactctgagttacccggcagggtacctgggtaactgcctgggttgaggtacccagcaggcttcatgtgcatgtgcacactgccccctgataggacctggtttattcacaggctcaggtgtcactgcagctccccagtgactatcttcgcgcaagttggactcaatggcctgggaggtttgtcccagccgacagatacctgaccatgcccatcctcaccattccctcccccatgctgcatccatccaaccttgatctccactgtgtcccaggcaccctaagatgcacaagctatgtgggccctgccctcacagaacttgtagtcttctgccccaaacaagccagttcaccgtcttcatgatcaggccaaaggttgaggtacccagcaggcttcatatgcacatgcacactgtcccctataggaccatgccttgcccagctggctgcactctagagggtgctttgtaggaaggacagagtggagaggacagtggggaggtacttgggtgttcaacagccagaagggagggaaactgaaaaagaatcaggagtccagccatcccctccccacctcctgcccccacttccaccctggctgctggccctttgcccttgaatatgggtgatataggtgtggctattcagttccagtcacagtgctgcctctatgtcttttgcaagctggggtcttccttactcagaaggcctggaggccctgccagatgctgccttccggactggctgcccgctgcagtgttttcacgggagccaagccagccccgggcctgtagcctcccatgtgacaaagtttcagacaccacagtcctcagctggaccacagtaaacacttgccttccccaacccatgattcttgcttggaaacatgaacctgatgttccacgtgcgttcagccaatcaaacctcaagaatgtgattgagcagtgaggctgcgttttgggcaagacactgagctctgaaataagacttttcttggaatctcaagccctcaacttacagtgggaccctaagaaatgcacttcagtttccttttatgtaaaatggtggtaaaattaattgtgttcattaaattgcacacaactatacatgtttacctatacactaagtggttctcaacttggggcaatttgccccccaggggacattcagcagtgtctgcggacattttttgttgctactggagggaggtgctactggcatctagggagtggaggctagagatgctgctaaactacagtccacaggacagtctccacagcaaagaattgtccagccccaaatatcaataatgccgaggttgaggaaaccctgccacatacacatagatgcgggttaacattgtttattttacaaagtggaatcatttacattttagccattctgatagatgaagcagtggcatctttttttttttttttttttttttgagacggggtctcactctgttgcccaggctggagtgcagggttgcaatcacggctcacagcagcctcgaagtcccaggaccaagcaaccctcccaccgcagccttccaagtaactgggactacaggcacacaacaccatgcccagctaattttttaatttttttgtagagacggggtttcaccatgttgcccaggctcaaactcctgagctcacacgatctgctgccttcaccttccaaagtgctgggattacaggtgtaagccactatgcccagcctcatttgtacttcagtttgcaattctctattaataaatctaagcatcttttcaca

SEQ ID NO: 167468 - DNA, 6454 bp, Homo sapiens
  Payload ID: 12946
  Gene Symbol: POLR1A
  Gene Name: polymerase (RNA) I polypeptide A, 194kDa
  ENST ID: ENST00000409681
  CDS Start-End: 380-5359
attggctgaagcggaagaagacgaaagcaatcataaaatgggaggttgcaagctcatggtttgaaagacttcgtcacggaagctaaaagctctatacacccgatttgcctcggaggaattttcctaaatgattattttgatgtcttatatatctttgattgttttcaaaacaaaagagcgagcagagagtcgtacaactatttgttccccccccatgtagaagtgatctcatccacgtaaatgtcgttcctgcgaccgcttccgcgcgcaagcgcacgttgaatcgcgtggtgactccgggcttgaggttgaattaagaatagtcaggtggtgagtggaacgtctcttggggtgtcggaattcaaaacggacctggaggatgttgatctccaagaacatgccctggcggcggctgcagggcatttccttcgggatgtattcggctgaagagctcaagaaattaagtgttaaatccattacgaaccctcgatacctggacagcctggggaacccatcggcaaacggcctgtacgatttagctttgggccctgcagattccaaagaggtgtgctccacctgcgtgcaggacttcagcaactgttctgggcacctgggccacattgagctcccactcacagtgtataaccctctcctcttcgataagctgtacctgctgcttcggggctcttgtttaaactgccacatgctgacttgtccccgggccgtgattcacctcttactctgccagctgagggttctggaagtcggggccctacaagcagtctacgagcttgagagaattctgaacaggtttctggaagaaaatcccgatccctctgcctctgaaattcgggaggaattagaacaatacacaactgaaattgtgcagaacaacctcctggggtcccagggcgcacatgtaaagaacgtgtgtgagagcaagagcaagctcattgctctcttctggaaggcacatatgaatgctaagcgctgtccccactgcaagaccgggcgatccgttgtccgaaaggaacacaacagcaagttgactatcacgtttccagccatggtgcacaggacagctggccagaaggactctgagcccctgggaattgaggaagctcagataggaaaacgaggatacttaacacccaccagtgcccgcgaacacctttctgccctgtggaagaatgaaggattctttctgaactaccttttttcgggaatggatgatgatggtatggaatccagattcaatcccagtgtgttctttctagatttcttggtggtgccgccctcaaggtatcgcccagtcagtcgcctaggagaccagatgtttactaatggccagacggtgaacttgcaggctgtcatgaaggatgtagttctgattcgaaaacttctggcattgatggcccaagaacagaagttgccagaggaagtggccacacccactacagatgaggaaaaagactctttgattgctattgaccgatcctttttgagtacacttccaggccagtccctcatagacaaactttacaacatttggattcgccttcagagccacgtcaatattgtgtttgatagcgagatggacaaactaatgatggacaagtacccaggcattaggcagatcctggagaagaaagaaggcctgttccgaaaacacatgatgggaaagcgagtggactacgctgcgcgctcagtcatctgcccagacatgtacatcaacaccaacgaaattggaattcccatggtgtttgccacaaaactgacctacccacagccagttaccccatggaatgttcaggaacttaggcaagcggtcatcaacggccctaatgtgcacccaggagcctccatggtcatcaatgaggacggcagccgcacagccctgagcgctgtggacatgacccagcgagaggccgtggccaagcagcttctgaccccagccacgggggcacctaagccccaggggacaaaaattgtgtgccggcatgtgaagaatggggacattctgctactgaaccgacagcccacactgcacagaccctccatccaggcccaccgtgcccgcatcctgcctgaagagaaagtgctgcggctccactatgccaactgcaaggcctataatgccgactttgatggagacgagatgaatgcccatttcccccagagtgagctgggccgggccgaggcctacgtcctggcctgcactgatcagcagtaccttgttcccaaggatggccaaccattggcgggactgatccaggatcacatggtttcaggggcaagcatgactactcggggttgctttttcacccgggagcactatatggagctggtgtaccgaggactcacggacaaagtggggcgcgtgaagctcctttctccttccatcctgaagccctttccgctgtggacaggaaaacaggttgtgtcaacgctgctcataaatataatcccagaggaccacatcccactgaacttatctggaaaggcgaaaatcactgggaaagcctgggtgaaggaaactcctcgatccgttcctggctttaaccctgactcgatgtgcgagtcccaggtgatcatcagggaaggggagctgctctgcggagtgctggacaaggcgcactatgggagctccgcctacggcctggtccactgctgctatgagatctatggaggcgagaccagcggcaaggttctaacctgcctggcccgcctcttcaccgcctacctgcagctctacagaggcttcaccttgggcgtggaagacattttggtgaagccaaaggcagatgtcaagaggcaacgtatcattgaagaatccacccactgcgggccccaggctgtcagggctgcattaaacctgccagaagccgcatcatatgatgaggtccgaggaaaatggcaggatgcccatctgggcaaggaccagagggattttaacatgattgatctgaagttcaaggaggaagtgaaccattacagcaatgagattaacaaggcatgcatgccttttggcctacacagacagttcccagagaacagcctgcagatgatggtgcagtcgggagccaaaggttcaactgtgaacacgatgcagatctcgtgcctgctgggccagattgaactggaaggtcggagacccccgctgatggcgtctggcaagtcactgccctgctttgagccttatgagttcacccccagggctggtggctttgtcactggcaggttcctcaccggcatcaaacctcctgagttcttcttccactgcatggcaggacgagagggcctggtggacactgctgtgaaaaccagccgctcaggctatctccaaaggtgcatcatcaagcacctagaggggctggtcgtgcagtatgatctcacggtccgtgacagtgacggcagtgtggtgcagttcctgtatggggaggatggcctggacatccccaagacacagttcctgcagcccaagcagttccccttcctggccagcaactacgaggtgataatgaaatcacagcatctccatgaagttttatccagagcagatcccaaaaaagctctccaccacttcagagctatcaaaaaatggcaaagcaagcaccccaacaccctgctgagaagaggcgccttcttgagttattcccagaaaattcaggaagctgtgaaagccctgaaacttgagagtgaaaaccgcaatggccgcagccctgggactcaggagatgctgaggatgtggtatgagttggatgaggaaagccgaaggaaataccagaagaaggcggccgcttgtcctgaccccagtctgtctgtctggcgtcctgacatctactttgcatcagtgtcagaaacatttgaaacaaaggttgatgactacagtcaagagtgggcagctcaaacagagaagagttatgagaaatcagagctttctctcgacaggttgaggaccttgctgcagctgaagtggcagcgctcactgtgtgagccgggcgaggctgtgggcctgctggctgcccagagcatcggagagccctccacccagatgaccctcaacaccttccactttgcaggcagaggcgagatgaacgtcaccctgggcattccaaggttgcgggagattctcatggtggccagcgccaacatcaagacacccatgatgagcgtgcccgtgctcaacaccaagaaagccctgaagagagtgaaaagcctgaagaagcaactcaccagggtgtgcttgggggaggtgttgcagaaaattgacgtccaggagtccttctgtatggaagaaaaacagaacaaattccaggtgtaccagctgcggtttcagttcctgccacatgcatattaccagcaggagaagtgcctgagacccgaggacatcctgcgcttcatggaaacaagattctttaaacttctgatggaatccatcaaaaagaagaataataaagcatcagctttcaggaacgtaaacactcgaagagctacacagcgggatctggacaacgctggggagttggggaggagtcggggagagcaggagggtgatgaggaagaggaggggcacattgtggatgctgaagctgaggagggggacgccgatgcctctgatgccaaacgcaaggagaagcaggaggaggaggttgattatgagagtgaggaagaggaggagagggagggcgaggagaacgacgatgaagacatgcaggaggaacgaaatccccacagggaaggtgctcgaaagacccaagagcaagatgaagaggtgacagtgaagctccctctgatgaagatcaactttgacatgagctccctggtagtatctttggcccatggtgccgtcatctatgcgaccaagggcatcactcggtgcctcctgaatgaaacaaccaacaataagaacgagaaggagcttgtgctaaacacagaaggaatcaacctcccagagctattcaagtatgcagaggtcctggatctgcgccgcctctactccaacgacatccacgccatagccaacacgtatggcattgaggccgcgctgcgggtgatcgagaaggagatcaaggatgtgtttgccgtgtatggcatcgcggtcgaccctcgccatctctccctggttgctgattatatgtgcttcgagggtgtttacaagccactgaatcgctttgggatccggtcaaactcttccccgctacagcagatgacatttgaaaccagcttccagtttctgaagcaagccaccatgctgggatcccacgatgagctgaggtctccttctgcctgccttgtggtcgggaaggtcgtcaggggcgggacaggcctgttcgagctcaagcagcctctgagatagcagctaccccggcaccatctgcccagctccaaggacccttggtgagggcgtggcccagcctgccttctgcatgagaggaccaggagactggaatccagggcagttccaagtgacagtacagagcacagcagcgaccttgggcctgaaagcagtgggcctctgagctgggccagcttcacctggaaagtgacagagttgctcatccttgcccctccctgtctctggatttttatcaaggtttaccaagtcttctgagtccccctgagatggctggggcctcacctgtgctgcaggaggcctctgtggcataacccctaaggagaagtcctgattcacgattcactgagaagaccaaggggaagccatgctttgctgctggggaccccaggcacctccagagtagggaagcggggttcttttgctgtgagtggccagggacaacagacaagattcctgggggctcccgatgagcaggaacgtggagcctgctgcccaaggcctgctccttccggctgctccagcccctgggggcagagtccacaaagagtccccatcaagacttcttccctgagtcaagtacagcgtagcatagtcctccacccacccaacctctctgcctggccagggtcctggccctgccactgtgtggcgaggtgtccttctagaccacatcagccccaaggctgggagcagtcgctccagggccgcagcagttcactcccacacatagaacccaggtcactgctggggcgattgaacaggttgcctggcttttctctgctgtcagtttggtgtggaggcctatgttctgccccatacaccccacaggccctgcttatgggaaggaacacaggcctccagcccagaggactgtgccgccctgttcttggccgtccacgtttcctctccctctagcaccagcaatacatttccctggcatggacagaaaagacagagaggacttatacaaaggctttgtaaaaccagaggctagcttctatctttgtctactgttatttcagctcagggcgggtaattaacatcattggaactagctattaggaaagaaaaaaaacttggttttttttacaacaa

SEQ ID NO: 167469 - DNA, 560 bp, Homo sapiens
  Payload ID: 12946
  Gene Symbol: POLR1A
  Gene Name: polymerase (RNA) I polypeptide A, 194kDa
  ENST ID: ENST00000409024
  CDS Start-End: 99-227
aatcgcgtggtgactccgggcttgaggttgaattaagaatagtcaggtggtgagtggaacgtctcttggggtgtcggaattcaaaacggacctggaggatgttgatctccaagaacatgccctggcggcggctgcagggcatttccttcgggatgtattcggctgaagagctcaatttctggaagaaaatcccgatccctctgcctctgaaattcgggaggaattagaacaatacacaactgaaattgtgcagaacaacctcctggggtcccagggcgcacatgtaaagaacgtgtgtgagagcaagagcaagctcattgctctcttctggaaggcacatatgaatgctaagcgctgtccccactgcaagaccgggcgatccgttgtccgaaaggaacacaacagcaagttgactatcacgtttccagccatggtgcacaggacagctggccagaaggactctgagcccctgggaattgaggaagctcagataggaaaacgaggatacttaacacccaccagtgcccgcgaacacctttctgccctgtggaagaatgaag

SEQ ID NO: 167470 - DNA, 576 bp, Homo sapiens
  Payload ID: 12946
  Gene Symbol: POLR1A
  Gene Name: polymerase (RNA) I polypeptide A, 194kDa
  ENST ID: ENST00000424089
  CDS Start-End: 111-239
aagcgcacgttgaatcgcgtggtgactccgggcttgaggttgaattaagaatagtcaggtggtgagtggaacgtctcttggggtgtcggaattcaaaacggacctggaggatgttgatctccaagaacatgccctggcggcggctgcagggcatttccttcgggatgtattcggctgaagagctcaatttctggaagaaaatcccgatccctctgcctctgaaattcgggaggaattagaacaatacacaactgaaattgtgcagaacaacctcctggggtcccagggcgcacatgaccgggcgatccgttgtccgaaaggaacacaacagcaagttgactatcacgtttccagccatggtgcacaggacagctggccagaaggactctgagcccctgggaattgaggaagctcagataggaaaacgaggatacttaacacccaccagtgcccgcgaacacctttctgccctgtggaagaatgaaggattctttctgaactaccttttttcgggaatggatgatgatggtatggaatccagattcaatcccagtgtgttctttctagatttcttgg

SEQ ID NO: 167471 - DNA, 4558 bp, Homo sapiens
  Payload ID: 12947
  Gene Symbol: POLR1B
  Gene Name: polymerase (RNA) I polypeptide B, 128kDa
  Uniprot ID: Q9H9Y6
  ENST ID: ENST00000263331
  CDS Start-End: 581-3988
agatgcgacgaggttagcggggcccgaccactccttggcttcccaggggtgagcctcgcgagttaggagttgggtagagagtcagcccggggcccggcatccgctttttcgttgaagcaacgactttggccggatgactccccagggtcggcatcagcgtgggactgggaacaggtgaagggaaacagaagagagcctgagaagaccgctctcctccgatcctaattgactgagccaatgagagccaaagaggtcacatgctcaactgggcggggagcgggtttccacctgcggcatctttcgcgagcggggagatgagtggggcggaatatgggagaaagggagggcccgccacgctctggctggacacggccttaatcggcccgttcactcgacgtttttggttctacgttgaccccgagaaaccgaaaccgcagggcctagggcgggtggaacgagagggaactacatttcccagcaggctgcggaaacgggactgcggccactacttccggcgtgtaccgagagactggcgtccggcgtgtaccgagagactggcgtccggtgtgcaggtggccacatggatcctggcagccggtggcggaacctgcccagcgggcctagcctaaagcacttgactgacccctcttatggaatcccgcgggaacagcaaaaggcagcgttgcaggagctgacgcgggcgcacgtggagtccttcaactacgctgtgcacgagggtctcggcctcgcggtgcaggctatacctccctttgaatttgctttcaaagatgagcgtatctcttttactattctggatgctgttatcagtccacctacagttccaaaagggaccatctgcaaagaggccaatgtttatccagcagaatgccggggccgaaggagtacctaccgtgggaagttgacagctgatatcaactgggcagtgaatggaatctcaaaaggaatcattaagcagtttcttggctatgttcccatcatggtgaaatccaagctttgcaacttacgtaaccttcccccacaagccctcattgagcaccatgaggaggcagaggaaatggggggctattttataatcaatggcattgaaaaagtcatccgaatgttgattatgcctcggagaaattttcccattgcaatgataagaccaaaatggaaaaccagagggcctggttatactcagtatggagtttcaatgcactgtgtgagggaagaacattccgctgtcaatatgaacctccactacttggaaaatggcactgttatgttgaactttatttaccgaaaagaactgttctttcttcctttgggatttgcacttaaggcacttgtcagcttttctgattatcagatctttcaggagctcatcaaaggaaaagaggatgattctttccttaggaactctgtttctcagatgttaaggattgtaatggaagagggttgttcgacacaaaaacaggtccttaactacctaggtgaatgcttcagagtaaaactcaatgttcctgactggtacccaaatgagcaagctgcggagttcctgtttaaccagtgcatctgtatccacttgaaatccaatactgaaaagttttatatgctttgtctcatgacgcgaaagctctttgctttagccaaaggagagtgcatggaggacaatcctgatagtttggtgaaccaggaagtcctcacaccgggtcagctcttccttatgttcctgaaggaaaaactggaaggttggttagtgtctattaaaatagcttttgataagaaggctcagaagaccagtgtttccatgaacactgacaatttgatgaggatttttacaatgggcatagaccttacaaaaccatttgaatacctttttgctactgggaatctgcgttctaaaacaggtcttggcctcctacaagattctggactttgtgttgtggctgacaagctgaacttcatacgctacctctcccatttccgctgcgtgcacagaggggctgattttgccaagatgaggaccaccacagtacgcaggctgctgccagagtcctggggcttcctttgtcccgtgcataccccagacggggagccctgtggcctgatgaaccacctaactgccgtatgtgaggttgtcacacagtttgtgtatacggcatctattccagctttactgtgcaacttgggggtcactcccattgatggagctccccaccgatcatacagtgagtgctaccctgtcctgctggacggtgtcatggttggctgggtggataaggatcttgctccaggcatcgcagattctcttcgtcattttaaggtgttgagagagaaaagaattcctccctggatggaagtggtccttatacccatgacaggaaaaccaagtctgtacccaggattgttcctttttaccactccttgtagactggtacggcctgtgcagaacttagcattgggcaaagaagagctaattggaactatggaacagatcttcatgaatgtcgctatctttgaggatgaagtttttgctggagttaccacacaccaggaactctttccacacagcctgctgagtgtgattgccaacttcatccctttctctgatcacaaccagagtccacggaacatgtaccaatgccagatgggtaagcaaactatgggctttccacttctcacttatcaagaccgatcggataacaaactgtatcgtcttcagactcctcagagtcccttggtgagaccctccatgtatgattattatgacatggataactatccaattgggaccaatgccatcgttgctgtgatttcttacactggctatgatatggaagatgccatgattgtgaataaggcctcttgggaacgaggctttgcccatggaagtgtctacaagtctgagttcatagacctctctgaaaaaattaaacaaggagatagtagcctggtgtttggcatcaaacctggtgacccacgcgttctgcagaagttagatgacgatggattgccgtttataggagcaaaactgcagtacggagatccgtattacagctacctcaacctcaacaccggggaaagttttgtgatgtactataagagtaaagaaaattgtgttgtggataacatcaaagtgtgcagtaatgacactgggagtggaaaattcaagtgtgtttgcatcactatgagagtgcctcggaacccaactatcggagataaatttgccagtcgccatgggcagaagggcattttaagcagattgtggccggctgaggacatgccttttactgagagtgggatggtcccagacattctgttcaatccccatggttttccatcccgcatgaccattgggatgttaattgagagtatggccgggaagtctgcagctttgcatggtctctgccatgatgctacacccttcatcttctcagaggagaactcggccttagaatactttggtgagatgttaaaggctgctggctacaatttctatggcaccgagaggttatatagtggcatcagtgggctagaactggaagcagacatcttcataggagtggtttattatcagcgcttacgccatatggtctcagacaaatttcaagtaaggacaactggagcccgagacagagtcaccaaccagcctattgggggaagaaatgtccagggtggaatccgttttggggagatggaacgggatgcgcttttagctcatggtacatcttttctccttcatgaccgcctcttcaactgctcagatcggtcggtagcccatgtgtgtgtgaagtgtggcagtttactctctccactgttggagaagccacccccttcttggtctgccatgcgcaacagaaaatacaactgtactctgtgtagtcgcagtgacactatcgatactgtttctgtgccttatgtttttcggtattttgtagctgaactggcagctatgaacatcaaagtgaaactggatgttgtttaacttgatgttgaccttttggattaagaggactatcagattaaagcaaaatgtaattttaattcaatgaagatatcattaccaggttactcttgagatttttcaacggtgttagaactctcaaccaagacctgaaaaccaagtatgcaaggtttctgaatctctctggtagattaactattgacaatgattttctgttatctttgttcaaaaagttcatgtcttctcaaaatatgaaatattgataaatggaagagcatacggtgacaagtctcctttccaaccccaggttccctacaccctgctctcagcaggcagtgagtgtcacacacctgttaatccatcttgagcaggacagtactatacaaatagaatgcaagctgtaatgtaattttatattttcttatagccacgttgaagtaaaaacaaacaggtacagtgttttttaccagctttatagaagtacagttgttacatatttaatgaatacaatttgatgggtctgactatatgcacacacctttgataccatcaccacaatcagggtaataaacatacctgtcatctccacaa

SEQ ID NO: 167472 - DNA, 4376 bp, Homo sapiens
  Payload ID: 12947
  Gene Symbol: POLR1B
  Gene Name: polymerase (RNA) I polypeptide B, 128kDa
  ENST ID: ENST00000333990
  CDS Start-End: 307-528
gagcgggtttccacctgcggcatctttcgcgagcggggagatgagtggggcggaatatgggagaaagggagggcccgccacgctctggctggacacggccttaatcggcccgttcactcgacgtttttggttctacgttgaccccgagaaaccgaaaccgcagggcctagggcgggtggaacgagagggaactacatttcccagcaggctgcggaaacgggactgcggccactacttccggcgtgtaccgagagactggcgtccggcgtgtaccgagagactggcgtccggtgtgcaggtggccacatggatcctggcagccggtggcggaacctgcccagcgggcctagcctaaagcacttgactgacccctcttatggaatcccgcgggaacagcaaaaggcagcgttgcaggagctgacgcgggcgcacgtggagtccttcaactacgctgtgcacgagggtctcggcctcgcggtgcagagacggggtctccctatgtggcccagcctggtctcaaactcctgagctcaagtagtcctcctctctcggtctcccaaatattgggattacaggctatacctccctttgaatttgctttcaaagatgagcgtatctcttttactattctggatgctgttatcagtccacctacagttccaaaagggaccatctgcaaagaggccaatgtttatccagcagaatgccggggccgaaggagtacctaccgtgggaagttgacagctgatatcaactgggcagtgaatggaatctcaaaaggaatcattaagcagtttcttggctatgttcccatcatggtgaaatccaagctttgcaacttacgtaaccttcccccacaagccctcattgagcaccatgaggaggcagaggaaatggggggctattttataatcaatggcattgaaaaagtcatccgaatgttgattatgcctcggagaaattttcccattgcaatgataagaccaaaatggaaaaccagagggcctggttatactcagtatggagtttcaatgcactgtgtgagggaagaacattccgctgtcaatatgaacctccactacttggaaaatggcactgttatgttgaactttatttaccgaaaagaactgttctttcttcctttgggatttgcacttaaggcacttgtcagcttttctgattatcagatctttcaggagctcatcaaaggaaaagaggatgattctttccttaggaactctgtttctcagatgttaaggattgtaatggaagagggttgttcgacacaaaaacaggtccttaactacctaggtgaatgcttcagagtaaaactcaatgttcctgactggtacccaaatgagcaagctgcggagttcctgtttaaccagtgcatctgtatccacttgaaatccaatactgaaaagttttatatgctttgtctcatgacgcgaaagctctttgctttagccaaaggagagtgcatggaggacaatcctgatagtttggtgaaccaggaagtcctcacaccgggtcagctcttccttatgttcctgaaggaaaaactggaaggttggttagtgtctattaaaatagcttttgataagaaggctcagaagaccagtgtttccatgaacactgacaatttgatgaggatttttacaatgggcatagaccttacaaaaccatttgaatacctttttgctactgggaatctgcgttctaaaacaggtcttggcctcctacaagattctggactttgtgttgtggctgacaagctgaacttcatacgctacctctcccatttccgctgcgtgcacagaggggctgattttgccaagatgaggaccaccacagtacgcaggctgctgccagagtcctggggcttcctttgtcccgtgcataccccagacggggagccctgtggcctgatgaaccacctaactgccgtatgtgaggttgtcacacagtttgtgtatacggcatctattccagctttactgtgcaacttgggggtcactcccattgatggagctccccaccgatcatacagtgagtgctaccctgtcctgctggacggtgtcatggttggctgggtggataaggatcttgctccaggcatcgcagattctcttcgtcattttaaggtgttgagagagaaaagaattcctccctggatggaagtggtccttatacccatgacaggaaaaccaagtctgtacccaggattgttcctttttaccactccttgtagactggtacggcctgtgcagaacttagcattgggcaaagaagagctaattggaactatggaacagatcttcatgaatgtcgctatctttgaggatgaagtttttgctggagttaccacacaccaggaactctttccacacagcctgctgagtgtgattgccaacttcatccctttctctgatcacaaccagagtccacggaacatgtaccaatgccagatgggtaagcaaactatgggctttccacttctcacttatcaagaccgatcggataacaaactgtatcgtcttcagactcctcagagtcccttggtgagaccctccatgtatgattattatgacatggataactatccaattgggaccaatgccatcgttgctgtgatttcttacactggctatgatatggaagatgccatgattgtgaataaggcctcttgggaacgaggctttgcccatggaagtgtctacaagtctgagttcatagacctctctgaaaaaattaaacaaggagatagtagcctggtgtttggcatcaaacctggtgacccacgcgttctgcagaagttagatgacgatggattgccgtttataggagcaaaactgcagtacggagatccgtattacagctacctcaacctcaacaccggggaaagttttgtgatgtactataagagtaaagaaaattgtgttgtggataacatcaaagtgtgcagtaatgacactgggagtggaaaattcaagtgtgtttgcatcactatgagagtgcctcggaacccaactatcggagataaatttgccagtcgccatgggcagaagggcattttaagcagattgtggccggctgaggacatgccttttactgagagtgggatggtcccagacattctgttcaatccccatggttttccatcccgcatgaccattgggatgttaattgagagtatggccgggaagtctgcagctttgcatggtctctgccatgatgctacacccttcatcttctcagaggagaactcggccttagaatactttggtgagatgttaaaggctgctggctacaatttctatggcaccgagaggttatatagtggcatcagtgggctagaactggaagcagacatcttcataggagtggtttattatcagcgcttacgccatatggtctcagacaaatttcaagtaaggacaactggagcccgagacagagtcaccaaccagcctattgggggaagaaatgtccagggtggaatccgttttggggagatggaacgggatgcgcttttagctcatggtacatcttttctccttcatgaccgcctcttcaactgctcagatcggtcggtagcccatgtgtgtgtgaagtgtggcagtttactctctccactgttggagaagccacccccttcttggtctgccatgcgcaacagaaaatacaactgtactctgtgtagtcgcagtgacactatcgatactgtttctgtgccttatgtttttcggtattttgtagctgaactggcagctatgaacatcaaagtgaaactggatgttgtttaacttgatgttgaccttttggattaagaggactatcagattaaagcaaaatgtaattttaattcaatgaagatatcattaccaggttactcttgagatttttcaacggtgttagaactctcaaccaagacctgaaaaccaagtatgcaaggtttctgaatctctctggtagattaactattgacaatgattttctgttatctttgttcaaaaagttcatgtcttctcaaaatatgaaatattgataaatggaagagcatacggtgacaagtctcctttccaaccccaggttccctacaccctgctctcagcaggcagtgagtgtcacacacctgttaatccatcttgagcaggacagtactatacaaatagaatgcaagctgtaatgtaattttatattttcttatagccacgttgaagtaaaaacaaacaggtacagtgttttttaccagctttatagaagtacagttgttacatatttaatgaatacaatttgatgggtctgactatatgcacacacctttgataccatcaccacaatcagggtaataaacatacctgtcatctccacaa

SEQ ID NO: 167473 - DNA, 4457 bp, Homo sapiens
  Payload ID: 12947
  Gene Symbol: POLR1B
  Gene Name: polymerase (RNA) I polypeptide B, 128kDa
  Uniprot ID: Q9H9Y6
  ENST ID: ENST00000409894
  CDS Start-End: 270-3128
gagatgagtggggcggaatatgggagaaagggagggcccgccacgctctggctggacacggccttaatcggcccgttcactcgacgtttttggttctacgttgaccccgagaaaccgaaaccgcagggcctagggcgggtggaacgagagggaactacatttcccagcaggctgcggaaacgggactgcggccactacttccggcgtgtaccgagagactggcgtccggcgtgtaccgagagactggcgtccggtgtgcaggtggccacatggatcctggcagccggtggcggaacctgcccagcgggcctagcctaaagcacttgactgacccctcttatggaatcccgcgggaacagcaaaaggcagcgttgcaggagctgacgcgggcgcacgtggagtccttcaactacgctgtgcacgagggtctcggcctcgcggtgcaggctatacctccctttgaatttgctttcaaagatgagcgtatctcttttactattctggatgctgttatcagtccacctacagttccaaaagggaccatctgcaaagaggccaatgtttatccagcagaatgccggggccgaaggagtacctaccgtgggaagttgacagctgatatcaactgggcagtgaatggaatctcaaaaggaatcattaagcagtttcttggctatgttcccatcatggtgaaatccaagctttgcaacttacgtaaccttcccccacaagccctcattgagcaccatgaggaggcagaggaaatggggggctattttataatcaatggcattgaaaaagtcatccgaatgttgattatgcctcggagaaattttcccattgcaatgataagaccaaaatggaaaaccagagggcctggttatactcagtatggagtttcaatgcactgtgtgagggaagaacattccgctgtcaatatgaacctccactacttggaaaatggcactgttatgttgaactttatttaccgaaaagaactgttctttcttcctttgggatttgcacttaaggcacttgtcagcttttctgattatcagatctttcaggagctcatcaaaggaaaagaggatgattctttccttaggaactctgtttctcagatgttaaggattgtaatggaagagggttgttcgacacaaaaacaggtccttaactacctaggtgaatgcttcagagtaaaactcaatgttcctgactggtacccaaatgagcaagctgcggagttcctgtttaaccagtgcatctgtatccacttgaaatccaatactgaaaagttttatatgctttgtctcatgacgcgaaagctctttgctttagccaaaggagagtgcatggaggacaatcctgatagtttggtgaaccaggaagtcctcacaccgggtcagctcttccttatgttcctgaaggggtcactcccattgatggagctccccaccgatcatacagtgttgagagagaaaagaattcctccctggatggaagtggtccttatacccatgacaggaaaaccaagtctgtacccaggattgttcctttttaccactccttgtagactggtacggcctgtgcagaacttagcattgggcaaagaagagctaattggaactatggaacagatcttcatgaatgtcgctatctttgaggatgaagtttttgctggagttaccacacaccaggaactctttccacacagcctgctgagtgtgattgccaacttcatccctttctctgatcacaaccagagtccacggaacatgtaccaatgccagatgggtaagcaaactatgggctttccacttctcacttatcaagaccgatcggataacaaactgtatcgtcttcagactcctcagagtcccttggtgagaccctccatgtatgattattatgacatggataactatccaattgggaccaatgccatcgttgctgtgatttcttacactggctatgatatggaagatgccatgattgtgaataaggcctcttgggaacgaggctttgcccatggaagtgtctacaagtctgagttcatagacctctctgaaaaaattaaacaaggagatagtagcctggtgtttggcatcaaacctggtgacccacgcgttctgcagaagttagatgacgatggattgccgtttataggagcaaaactgcagtacggagatccgtattacagctacctcaacctcaacaccggggaaagttttgtgatgtactataagagtaaagaaaattgtgttgtggataacatcaaagtgtgcagtaatgacactgggagtggaaaattcaagtgtgtttgcatcactatgagagtgcctcggaacccaactatcggagataaatttgccagtcgccatgggcagaagggcattttaagcagattgtggccggctgaggacatgccttttactgagagtgggatggtcccagacattctgttcaatccccatggttttccatcccgcatgaccattgggatgttaattgagagtatggccgggaagtctgcagctttgcatggtctctgccatgatgctacacccttcatcttctcagaggagaactcggccttagaatactttggtgagatgttaaaggctgctggctacaatttctatggcaccgagaggttatatagtggcatcagtgggctagaactggaagcagacatcttcataggagtggtttattatcagcgcttacgccatatggtctcagacaaatttcaagtaaggacaactggagcccgagacagagtcaccaaccagcctattgggggaagaaatgtccagggtggaatccgttttggggagatggaacgggatgcgcttttagctcatggtacatcttttctccttcatgaccgcctcttcaactgctcagatcggtcggtagcccatgtgtgtgtgaagtgtggcagtttactctctccactgttggagaagccacccccttcttggtctgccatgcgcaacagaaaatacaactgtactctgtgtagtcgcagtgacactatcgatactgtttctgtgccttatgtttttcggtattttgtagctgaactggcagctatgaacatcaaagtgaaactggatgttgtttaacttgatgttgaccttttggattaagaggactatcagattaaagcaaaatgtaattttaattcaatgaagatatcattaccaggttactcttgagatttttcaacggtgttagaactctcaaccaagacctgaaaaccaagtatgcaaggtttctgaatctctctggtagattaactattgacaatgattttctgttatctttgttcaaaaagttcatgtcttctcaaaatatgaaatattgataaatggaagagcatacggtgacaagtctcctttccaaccccaggttccctacaccctgctctcagcaggcagtgagtgtcacacacctgttaatccatcttgagcaggacagtactatacaaatagaatgcaagctgtaatgtaattttatattttcttatagccacgttgaagtaaaaacaaacaggtacagtgttttttaccagctttatagaagtacagttgttacatatttaatgaatacaatttgatgggtctgactatatgcacacacctttgataccatcaccacaatcagggtaataaacatacctgtcatctccacaagtttcctcctgcccctttgttttttgctttttggttgctgttgagtttttgttttgtcttctgtggtaagaacacttaactcaagacctaccctcttaacaaatctttaagtgcacgatatagtattgttaattccaggcaccatgttgtacaacagatctttagaccttacttgtcttgcataactgaagctttatacctgttgaacaactctccatttccctggcccctagcaaccacccttctaccctgtttctatgagtttgactattacagatatctcatatagtgggatcatgcaatatttgtcctgtgactggcttatttcacttagcatagtgaaataagattcatccattttggaagccaggcatggtgctgtgcatctatagtccctgctatttgagaggctgaggtgggaggatcatttgagtgcaggagttcaaggacagcctgggtaatataggaagaccctgtcttgaagaccctgacctcaagtgatccacccacctcggcctccgaaagtgctaggattacaggtgtgagccactgtgcctggcctccggtgagtattttatatttagtctacacttccatacttggcttttttctgcttttatattgatctgctttcatagcagtgtgtagagtgccacttatgttttctttcttgtgtacagtattttattgtatggatttaccatcccctgtgtatttaagttgttccattctttggccattataacttttttctgcaaa

SEQ ID NO: 167474 - DNA, 555 bp, Homo sapiens
  Payload ID: 12947
  Gene Symbol: POLR1B
  Gene Name: polymerase (RNA) I polypeptide B, 128kDa
  ENST ID: ENST00000438748
  CDS Start-End: 170-555
tttttcgttgaagcaacgactttggccggatgactccccagggtcggcatcagcgtgggactgggaacaggctgcggaaacgggactgcggccactacttccggcgtgtaccgagagactggcgtccggcgtgtaccgagagactggcgtccggtgtgcaggtggccacatggatcctggcagccggtggcggaacctgcccagcgggcctagcctaaagcacttgactgacccctcttatggaatcccgcgggaacagcaaaaggcagcgttgcaggagctgacgcgggcgcacgtggagtccttcaactacgctgtgcacgagggtctcggcctcgcggtgcaggctatacctccctttgaatttgctttcaaagatgagcgtatctcttttactattctggatgctgttatcagtccacctacagttccaaaagggaccatctgcaaagaggccaatgtttatccagcagaatgccggggccgaaggagtacctaccgtgggaagttgacagctgatatcaactgggcagtgaatggaatctcaaaaggaat

SEQ ID NO: 167475 - DNA, 2494 bp, Homo sapiens
  Payload ID: 12947
  Gene Symbol: POLR1B
  Gene Name: polymerase (RNA) I polypeptide B, 128kDa
  ENST ID: ENST00000448770
  CDS Start-End: 222-539
tggctggacacggccttaatcggcccgttcactcgacgtttttggttctacgttgaccccgagaaaccgaaaccgcagggcctagggcgggtggaacgagagggaactacatttcccagcaggctgcggaaacgggactgcggccactacttccggcgtgtaccgagagactggcgtccggcgtgtaccgagagactggcgtccggtgtgcaggtggccacatggatcctggcagccggtggcggaacctgcccagcgggcctagcctaaagcacttgactgacccctcttatggaatcccgcgggaacagcaaaaggcagcgttgcaggagctgacgcgggcgcacgtggagtccttcaactacgctgtgcacgagggtctcggcctcgcggtgcaggggtcactcccattgatggagctccccaccgatcatacagtgagtgctaccctgtcctgctggacggtgtcatggttggctgggtggataaggatcttgctccaggcatcgcagattctcttcgtcattttaaggtgttgagagagaaaagaattcctccctggatggaagtggtccttatacccatgacaggaaaaccaagtctgtacccaggattgttcctttttaccactccttgtagactggtacggcctgtgcagaacttagcattgggcaaagaagagctaattggaactatggaacagatcttcatgaatgtcgctatctttgaggatgaagtttttgctggagttaccacacaccaggaactctttccacacagcctgctgagtgtgattgccaacttcatccctttctctgatcacaaccagagtccacggaacatgtaccaatgccagatgggtaagcaaactatgggctttccacttctcacttatcaagaccgatcggataacaaactgtatcgtcttcagactcctcagagtcccttggtgagaccctccatgtatgattattatgacatggataactatccaattgggaccaatgccatcgttgctgtgatttcttacactggctatgatatggaagatgccatgattgtgaataaggcctcttgggaacgaggctttgcccatggaagtgtctacaagtctgagttcatagacctctctgaaaaaattaaacaaggagatagtagcctggtgtttggcatcaaacctggtgacccacgcgttctgcagaagttagatgacgatggattgccgtttataggagcaaaactgcagtacggagatccgtattacagctacctcaacctcaacaccggggaaagttttgtgatgtactataagagtaaagaaaattgtgttgtggataacatcaaagtgtgcagtaatgacactgggagtggaaaattcaagtgtgtttgcatcactatgagagtgcctcggaacccaactatcggagataaatttgccagtcgccatgggcagaagggcattttaagcagattgtggccggctgaggacatgccttttactgagagtgggatggtcccagacattctgttcaatccccatggttttccatcccgcatgaccattgggatgttaattgagagtatggccgggaagtctgcagctttgcatggtctctgccatgatgctacacccttcatcttctcagaggagaactcggccttagaatactttggtgagatgttaaaggctgctggctacaatttctatggcaccgagaggttatatagtggcatcagtgggctagaactggaagcagacatcttcataggagtggtttattatcagcgcttacgccatatggtctcagacaaatttcaagtaaggacaactggagcccgagacagagtcaccaaccagcctattgggggaagaaatgtccagggtggaatccgttttggggagatggaacgggatgcgcttttagctcatggtacatcttttctccttcatgaccgcctcttcaactgctcagatcggtcggtagcccatgtgtgtgtgaagtgtggcagtttactctctccactgttggagaagccacccccttcttggtctgccatgcgcaacagaaaatacaactgtactctgtgtagtcgcagtgacactatcgatactgtttctgtgccttatgtttttcggtattttgtagctgaactggcagctatgaacatcaaagtgaaactggatgttgtttaacttgatgttgaccttttggattaagaggactatcagattaaagcaaaatgtaattttaattcaatgaagatatcattaccaggttactcttgagatttttcaacggtgttagaactctcaaccaagacctgaaaaccaagtatgcaaggtttctgaatctctctggtagattaactattgacaatgattttctgttatctttgttcaaaaagttcatgtcttctcaaaatatgaaatattgataaatggaagagcatacggtgacaagtctcctttccaaccccaggttccctacaccct

SEQ ID NO: 167476 - DNA, 558 bp, Homo sapiens
  Payload ID: 12947
  Gene Symbol: POLR1B
  Gene Name: polymerase (RNA) I polypeptide B, 128kDa
  ENST ID: ENST00000424062
  CDS Start-End: 46-324
tccggcgtgtaccgagagactggcgtccggtgtgcaggtggccacatggatcctggcagccggtggcggaacctgcccagcgggcctagcctaaagcacttgactgacccctcttatggaatcccgcgggaacagcaaaaggcagcgttgcaggagctgacgcgggcgcacgtggagtccttcaactacgctgtgcacgagggtctcggcctcgcggtgcagtccacctacagttccaaaagggaccatctgcaaagaggccaatgtttatccagcagaatgccggggccgaaggagtacctaccgtgggaagttgacagctgatatcaactgggcagtgaatggaatctcaaaaggaatcattaagcagtttcttggctatgttcccatcatggtgaaatccaagctttgcaacttacgtaaccttcccccacaagccctcattgagcaccatgaggaggcagaggaaatggggggctattttataatcaatggcattgaaaaagtcatccgaatgttgattatgcctcggagaaattttcccattgcaatgataag

SEQ ID NO: 167477 - DNA, 923 bp, Homo sapiens
  Payload ID: 12947
  Gene Symbol: POLR1B
  Gene Name: polymerase (RNA) I polypeptide B, 128kDa
  ENST ID: ENST00000458012
  CDS Start-End: 1-923
ccaggggtcactcccattgatggagctccccaccgatcatacagtgagtgctaccctgtcctgctggacggtgtcatggttggctgggtggataaggatcttgctccaggcatcgcagattctcttcgtcattttaaggtgttgagagagaaaagaattcctccctggatggaagtggtccttatacccatgacaggaaaaccaagtctgtacccaggattgttcctttttaccactccttgtagactggtacggcctgtgcagaacttagcattgggcaaagaagagctaattggaactatggaacagagtcccttggtgagaccctccatgtatgattattatgacatggataactatccaattgggaccaatgccatcgttgctgtgatttcttacactggctatgatatggaagatgccatgattgtgaataaggcctcttgggaacgaggctttgcccatggaagtgtctacaagtctgagttcatagacctctctgaaaaaattaaacaaggagatagtagcctggtgtttggcatcaaacctggtgacccacgcgttctgcagaagttagatgacgatggattgccgtttataggagcaaaactgcagtacggagatccgtattacagctacctcaacctcaacaccggggaaagttttgtgatgtactataagagtaaagaaaattgtgttgtggataacatcaaagtgtgcagtaatgacactgggagtggaaaattcaagtgtgtttgcatcactatgagagtgcctcggaacccaactatcggagataaatttgccagtcgccatgggcagaagggcattttaagcagattgtggccggctgaggacatgccttttactgagagtgggatggtcccagacattctgttcaatccccatggttttccatcccg

SEQ ID NO: 167478 - DNA, 595 bp, Homo sapiens
  Payload ID: 12947
  Gene Symbol: POLR1B
  Gene Name: polymerase (RNA) I polypeptide B, 128kDa
  ENST ID: ENST00000430293
  CDS Start-End: 77-274
actacttccggcgtgtaccgagagactggcgtccggcgtgtaccgagagactggcgtccggtgtgcaggtggccacatggatcctggcagccggtggcggaacctgcccagcgggcctagcctaaagcacttgactgacccctcttatggaatcccgcgggaacagcaaaaggcagcgttgcaggagctgacgcgggcgcacgtggagtccttcaactacgctgtgcacgagggtctcggcctcgcggtgcaggagtttcaatgcactgtgtgagggaagaacattccgctgtcaatatgaacctccactacttggaaaatggcactgttatgttgaactttatttaccgaaaagaactgttctttcttcctttgggatttgcacttaaggcacttgtcagcttttctgattatcagatctttcaggagctcatcaaaggaaaagaggatgattctttccttaggaactctgtttctcagatgttaaggattgtaatggaagagggttgttcgacacaaaaacaggtccttaactacctaggtgaatgcttcagagtaaaactcaatgttcctgactggtacccaaatgagcaag

SEQ ID NO: 167479 - DNA, 3836 bp, Homo sapiens
  Payload ID: 12947
  Gene Symbol: POLR1B
  Gene Name: polymerase (RNA) I polypeptide B, 128kDa
  Uniprot ID: Q9H9Y6
  ENST ID: ENST00000417433
  CDS Start-End: 31-3270
gagactggcgtccggtgtgcaggtggccacatggatcctggcagccggtggcggaacctgcccagcgggcctagcctaaagcacttgactgacccctcttatggaatcccgcgggaacagcaaaaggcagcgttgcaggagctgacgcgggcgcacgtggagtccttcaactacgctgtgcacgagggtctcggcctcgcggtgcaggctgatatcaactgggcagtgaatggaatctcaaaaggaatcattaagcagtttcttggctatgttcccatcatggtgaaatccaagctttgcaacttacgtaaccttcccccacaagccctcattgagcaccatgaggaggcagaggaaatggggggctattttataatcaatggcattgaaaaagtcatccgaatgttgattatgcctcggagaaattttcccattgcaatgataagaccaaaatggaaaaccagagggcctggttatactcagtatggagtttcaatgcactgtgtgagggaagaacattccgctgtcaatatgaacctccactacttggaaaatggcactgttatgttgaactttatttaccgaaaagaactgttctttcttcctttgggatttgcacttaaggcacttgtcagcttttctgattatcagatctttcaggagctcatcaaaggaaaagaggatgattctttccttaggaactctgtttctcagatgttaaggattgtaatggaagagggttgttcgacacaaaaacaggtccttaactacctaggtgaatgcttcagagtaaaactcaatgttcctgactggtacccaaatgagcaagctgcggagttcctgtttaaccagtgcatctgtatccacttgaaatccaatactgaaaagttttatatgctttgtctcatgacgcgaaagctctttgctttagccaaaggagagtgcatggaggacaatcctgatagtttggtgaaccaggaagtcctcacaccgggtcagctcttccttatgttcctgaaggaaaaactggaaggttggttagtgtctattaaaatagcttttgataagaaggctcagaagaccagtgtttccatgaacactgacaatttgatgaggatttttacaatgggcatagaccttacaaaaccatttgaatacctttttgctactgggaatctgcgttctaaaacaggtcttggcctcctacaagattctggactttgtgttgtggctgacaagctgaacttcatacgctacctctcccatttccgctgcgtgcacagaggggctgattttgccaagatgaggaccaccacagtacgcaggctgctgccagagtcctggggcttcctttgtcccgtgcataccccagacggggagccctgtggcctgatgaaccacctaactgccgtatgtgaggttgtcacacagtttgtgtatacggcatctattccagctttactgtgcaacttgggggtcactcccattgatggagctccccaccgatcatacagtgagtgctaccctgtcctgctggacggtgtcatggttggctgggtggataaggatcttgctccaggcatcgcagattctcttcgtcattttaaggtgttgagagagaaaagaattcctccctggatggaagtggtccttatacccatgacaggaaaaccaagtctgtacccaggattgttcctttttaccactccttgtagactggtacggcctgtgcagaacttagcattgggcaaagaagagctaattggaactatggaacagatcttcatgaatgtcgctatctttgaggatgaagtttttgctggagttaccacacaccaggaactctttccacacagcctgctgagtgtgattgccaacttcatccctttctctgatcacaaccagagtccacggaacatgtaccaatgccagatgggtaagcaaactatgggctttccacttctcacttatcaagaccgatcggataacaaactgtatcgtcttcagactcctcagagtcccttggtgagaccctccatgtatgattattatgacatggataactatccaattgggaccaatgccatcgttgctgtgatttcttacactggctatgatatggaagatgccatgattgtgaataaggcctcttgggaacgaggctttgcccatggaagtgtctacaagtctgagttcatagacctctctgaaaaaattaaacaaggagatagtagcctggtgtttggcatcaaacctggtgacccacgcgttctgcagaagttagatgacgatggattgccgtttataggagcaaaactgcagtacggagatccgtattacagctacctcaacctcaacaccggggaaagttttgtgatgtactataagagtaaagaaaattgtgttgtggataacatcaaagtgtgcagtaatgacactgggagtggaaaattcaagtgtgtttgcatcactatgagagtgcctcggaacccaactatcggagataaatttgccagtcgccatgggcagaagggcattttaagcagattgtggccggctgaggacatgccttttactgagagtgggatggtcccagacattctgttcaatccccatggttttccatcccgcatgaccattgggatgttaattgagagtatggccgggaagtctgcagctttgcatggtctctgccatgatgctacacccttcatcttctcagaggagaactcggccttagaatactttggtgagatgttaaaggctgctggctacaatttctatggcaccgagaggttatatagtggcatcagtgggctagaactggaagcagacatcttcataggagtggtttattatcagcgcttacgccatatggtctcagacaaatttcaagtaaggacaactggagcccgagacagagtcaccaaccagcctattgggggaagaaatgtccagggtggaatccgttttggggagatggaacgggatgcgcttttagctcatggtacatcttttctccttcatgaccgcctcttcaactgctcagatcggtcggtagcccatgtgtgtgtgaagtgtggcagtttactctctccactgttggagaagccacccccttcttggtctgccatgcgcaacagaaaatacaactgtactctgtgtagtcgcagtgacactatcgatactgtttctgtgccttatgtttttcggtattttgtagctgaactggcagctatgaacatcaaagtgaaactggatgttgtttaacttgatgttgaccttttggattaagaggactatcagattaaagcaaaatgtaattttaattcaatgaagatatcattaccaggttactcttgagatttttcaacggtgttagaactctcaaccaagacctgaaaaccaagtatgcaaggtttctgaatctctctggtagattaactattgacaatgattttctgttatctttgttcaaaaagttcatgtcttctcaaaatatgaaatattgataaatggaagagcatacggtgacaagtctcctttccaaccccaggttccctacaccctgctctcagcaggcagtgagtgtcacacacctgttaatccatcttgagcaggacagtactatacaaatagaatgcaagctgtaatgtaattttatattttcttatagccacgttgaagtaaaaacaaacaggtacagtgttttttaccagctttatagaagtacagttgttacatatttaatgaatacaatttgatgggtctgactatatgcacacacctttgataccatcaccacaatcagggtaataaacatacctgtcatctcc

SEQ ID NO: 167480 - DNA, 572 bp, Homo sapiens
  Payload ID: 12947
  Gene Symbol: POLR1B
  Gene Name: polymerase (RNA) I polypeptide B, 128kDa
  ENST ID: ENST00000430769
  CDS Start-End: 231-572
gactttggccggatgactccccagggtcggcatcagcgtgggactgggaacaggtgaagggaaacagaagagagcctgagaagaccgctctcctccgatcctaattgactgagccaatgagagccaaagaggctgcggaaacgggactgcggccactacttccggcgtgtaccgagagactggcgtccggcgtgtaccgagagactggcgtccggtgtgcaggtggccacatggatcctggcagccggtggcggaacctgcccagcgggcctagcctaaagcacttgactgacccctcttatggaatcccgcgggaacagcaaaaggcagcgttgcaggagctgacgcgggcgcacgtggagtccttcaactacgctgtgcacgagggtctcggcctcgcggtgcaggctatacctccctttgaatttgctttcaaagatgagcgtatctcttttactattctggatgctgttatcagtccacctacagttccaaaagggaccatctgcaaagaggccaatgtttatccagcagaatgccggggccgaaggagtacctaccgtgggaagttg

SEQ ID NO: 167481 - DNA, 4961 bp, Homo sapiens
  Payload ID: 12947
  Gene Symbol: POLR1B
  Gene Name: polymerase (RNA) I polypeptide B, 128kDa
  Uniprot ID: Q9H9Y6
  ENST ID: ENST00000537335
  CDS Start-End: 766-3540
agatgcgacgaggttagcggggcccgaccactccttggcttcccaggggtgagcctcgcgagttaggagttgggtagagagtcagcccggggcccggcatccgctttttcgttgaagcaacgactttggccggatgactccccagggtcggcatcagcgtgggactgggaacaggtgaagggaaacagaagagagcctgagaagaccgctctcctccgatcctaattgactgagccaatgagagccaaagaggtcacatgctcaactgggcggggagcgggtttccacctgcggcatctttcgcgagcggggagatgagtggggcggaatatgggagaaagggagggcccgccacgctctggctggacacggccttaatcggcccgttcactcgacgtttttggttctacgttgaccccgagaaaccgaaaccgcagggcctagggcgggtggaacgagagggaactacatttcccagcaggctgcggaaacgggactgcggccactacttccggcgtgtaccgagagactggcgtccggcgtgtaccgagagactggcgtccggtgtgcaggtggccacatggatcctggcagccggtggcggaacctgcccagcgggcctagcctaaagcacttgactgacccctcttatggaatcccgcgggaacagcaaaaggcagcgttgcaggagctgacgcgggcgcacgtggagtccttcaactacgctgtgcacgagggtctcggcctcgcggtgcaggagtttcaatgcactgtgtgagggaagaacattccgctgtcaatatgaacctccactacttggaaaatggcactgttatgttgaactttatttaccgaaaagaactgttctttcttcctttgggatttgcacttaaggcacttgtcagcttttctgattatcagatctttcaggagctcatcaaaggaaaagaggatgattctttccttaggaactctgtttctcagatgttaaggattgtaatggaagagggttgttcgacacaaaaacaggtccttaactacctaggtgaatgcttcagagtaaaactcaatgttcctgactggtacccaaatgagcaagctgcggagttcctgtttaaccagtgcatctgtatccacttgaaatccaatactgaaaagttttatatgctttgtctcatgacgcgaaagctctttgctttagccaaaggagagtgcatggaggacaatcctgatagtttggtgaaccaggaagtcctcacaccgggtcagctcttccttatgttcctgaaggaaaaactggaaggttggttagtgtctattaaaatagcttttgataagaaggctcagaagaccagtgtttccatgaacactgacaatttgatgaggatttttacaatgggcatagaccttacaaaaccatttgaatacctttttgctactgggaatctgcgttctaaaacaggtcttggcctcctacaagattctggactttgtgttgtggctgacaagctgaacttcatacgctacctctcccatttccgctgcgtgcacagaggggctgattttgccaagatgaggaccaccacagtacgcaggctgctgccagagtcctggggcttcctttgtcccgtgcataccccagacggggagccctgtggcctgatgaaccacctaactgccgtatgtgaggttgtcacacagtttgtgtatacggcatctattccagctttactgtgcaacttgggggtcactcccattgatggagctccccaccgatcatacagtgagtgctaccctgtcctgctggacggtgtcatggttggctgggtggataaggatcttgctccaggcatcgcagattctcttcgtcattttaaggtgttgagagagaaaagaattcctccctggatggaagtggtccttatacccatgacaggaaaaccaagtctgtacccaggattgttcctttttaccactccttgtagactggtacggcctgtgcagaacttagcattgggcaaagaagagctaattggaactatggaacagatcttcatgaatgtcgctatctttgaggatgaagtttttgctggagttaccacacaccaggaactctttccacacagcctgctgagtgtgattgccaacttcatccctttctctgatcacaaccagagtccacggaacatgtaccaatgccagatgggtaagcaaactatgggctttccacttctcacttatcaagaccgatcggataacaaactgtatcgtcttcagactcctcagagtcccttggtgagaccctccatgtatgattattatgacatggataactatccaattgggaccaatgccatcgttgctgtgatttcttacactggctatgatatggaagatgccatgattgtgaataaggcctcttgggaacgaggctttgcccatggaagtgtctacaagtctgagttcatagacctctctgaaaaaattaaacaaggagatagtagcctggtgtttggcatcaaacctggtgacccacgcgttctgcagaagttagatgacgatggattgccgtttataggagcaaaactgcagtacggagatccgtattacagctacctcaacctcaacaccggggaaagttttgtgatgtactataagagtaaagaaaattgtgttgtggataacatcaaagtgtgcagtaatgacactgggagtggaaaattcaagtgtgtttgcatcactatgagagtgcctcggaacccaactatcggagataaatttgccagtcgccatgggcagaagggcattttaagcagattgtggccggctgaggacatgccttttactgagagtgggatggtcccagacattctgttcaatccccatggttttccatcccgcatgaccattgggatgttaattgagagtatggccgggaagtctgcagctttgcatggtctctgccatgatgctacacccttcatcttctcagaggagaactcggccttagaatactttggtgagatgttaaaggctgctggctacaatttctatggcaccgagaggttatatagtggcatcagtgggctagaactggaagcagacatcttcataggagtggtttattatcagcgcttacgccatatggtctcagacaaatttcaagtaaggacaactggagcccgagacagagtcaccaaccagcctattgggggaagaaatgtccagggtggaatccgttttggggagatggaacgggatgcgcttttagctcatggtacatcttttctccttcatgaccgcctcttcaactgctcagatcggtcggtagcccatgtgtgtgtgaagtgtggcagtttactctctccactgttggagaagccacccccttcttggtctgccatgcgcaacagaaaatacaactgtactctgtgtagtcgcagtgacactatcgatactgtttctgtgccttatgtttttcggtattttgtagctgaactggcagctatgaacatcaaagtgaaactggatgttgtttaacttgatgttgaccttttggattaagaggactatcagattaaagcaaaatgtaattttaattcaatgaagatatcattaccaggttactcttgagatttttcaacggtgttagaactctcaaccaagacctgaaaaccaagtatgcaaggtttctgaatctctctggtagattaactattgacaatgattttctgttatctttgttcaaaaagttcatgtcttctcaaaatatgaaatattgataaatggaagagcatacggtgacaagtctcctttccaaccccaggttccctacaccctgctctcagcaggcagtgagtgtcacacacctgttaatccatcttgagcaggacagtactatacaaatagaatgcaagctgtaatgtaattttatattttcttatagccacgttgaagtaaaaacaaacaggtacagtgttttttaccagctttatagaagtacagttgttacatatttaatgaatacaatttgatgggtctgactatatgcacacacctttgataccatcaccacaatcagggtaataaacatacctgtcatctccacaagtttcctcctgcccctttgttttttgctttttggttgctgttgagtttttgttttgtcttctgtggtaagaacacttaactcaagacctaccctcttaacaaatctttaagtgcacgatatagtattgttaattccaggcaccatgttgtacaacagatctttagaccttacttgtcttgcataactgaagctttatacctgttgaacaactctccatttccctggcccctagcaaccacccttctaccctgtttctatgagtttgactattacagatatctcatatagtgggatcatgcaatatttgtcctgtgactggcttatttcacttagcatagtgaaataagattcatccattttggaagccaggcatggtgctgtgcatctatagtccctgctatttgagaggctgaggtgggaggatcatttgagtgcaggagttcaaggacagcctgggtaatataggaagaccctgtcttgaagaccctgacctcaagtgatccacccacctcggcctccgaaagtgctaggattacaggtgtgagccactgtgcctggcctccggtgagtattttatatttagtctacacttccatacttggcttttttctgcttttatattgatctgctttcatagcagtgtgtagagtgccacttatgttttctttcttgtgtacagtattttattgtatggatttaccatcccctgtgtatttaagttgttccattctttggccattataacttttttctgcaaatattctggtgacttatctttggccattataaactgttgataatagatcatcttgtatatacttctgcaattataagatgttttttgatgatg

SEQ ID NO: 167482 - DNA, 5059 bp, Homo sapiens
  Payload ID: 12947
  Gene Symbol: POLR1B
  Gene Name: polymerase (RNA) I polypeptide B, 128kDa
  Uniprot ID: Q9H9Y6
  ENST ID: ENST00000541869
  CDS Start-End: 117-3638
gactttggccggatgactccccagggtcggcatcagcgtgggactgggaacaggtgaagggaaacagaagagagcctgagaagaccgctctcctccgatcctaattgactgagccaatgagagccaaagaggctgcggaaacgggactgcggccactacttccggcgtgtaccgagagactggcgtccggcgtgtaccgagagactggcgtccggtgtgcaggtggccacatggatcctggcagccggtggcggaacctgcccagcgggcctagcctaaagcacttgactgacccctcttatggaatcccgcgggaacagcaaaaggcagcgttgcaggagctgacgcgggcgcacgtggagtccttcaactacgctgtgcacgagggtctcggcctcgcggtgcaggctatacctccctttgaatttgctttcaaagatgagcgtatctcttttactattctggatgctgttatcagtccacctacagttccaaaagggaccatctgcaaagaggccaatgtttatccagcagaatgccggggccgaaggagtacctaccgtgggaagttgacagctgatatcaactgggcagtgaatggaatctcaaaaggaatcattaagcagtttcttggctatgttcccatcatggtgaaatccaagctttgcaacttacgtaaccttcccccacaagccctcattgagcaccatgaggaggcagaggaaatggggggctattttataatcaatggcattgaaaaagtcatccgaatgttgattatgcctcggagaaattttcccattgcaatgataagaccaaaatggaaaaccagagggcctggttatactcagtatggagtttcaatgcactgtgtgagggaagaacattccgctgtcaatatgaacctccactacttggaaaatggcactgttatgttgaactttatttaccgaaaagaactgttctttcttcctttgggatttgcacttaaggcacttgtcagcttttctgattatcagatctttcaggagctcatcaaaggaaaagaggatgattctttccttaggaactctgtttctcagatgttaaggattgtaatggaagagggttgttcgacacaaaaacaggtccttaactacctaggtgaatgcttcagagtaaaactcaatgttcctgactggtacccaaatgagcaagctgcggagttcctgtttaaccagtgcatctgtatccacttgaaatccaatactgaaaagttttatatgctttgtctcatgacgcgaaagctctttgctttagccaaaggagagtgcatggaggacaatcctgatagtttggtgaaccaggaagtcctcacaccgggtcagctcttccttatgttcctgaaggaaaaactggaaggttggttagtgtctattaaaatagcttttgataagaaggctcagaagaccagtgtttccatgaacactgacaatttgatgaggatttttacaatgggcatagaccttacaaaaccatttgaatacctttttgctactgggaatctgcgttctaaaacaggtcttggcctcctacaagattctggactttgtgttgtggctgacaagctgaacttcatacgctacctctcccatttccgctgcgtgcacagaggggctgattttgccaagatgaggaccaccacagtacgcaggctgctgccagagtcctggggcttcctttgtcccgtgcataccccagacggggagccctgtggcctgatgaaccacctaactgccgtatgtgaggttgtcacacagtttgtgtatacggcatctattccagctttactgtgcaacttgggggtcactcccattgatggagctccccaccgatcatacagtgagtgctaccctgtcctgctggacggtgtcatggttggctgggtggataaggatcttgctccaggcatcgcagattctcttcgtcattttaaggtgttgagagagaaaagaattcctccctggatggaagtggtccttatacccatgacaggaaaaccaagtctgtacccaggattgttcctttttaccactccttgtagactggtacggcctgtgcagaacttagcattgggcaaagaagagctaattggaactatggaacagatcttcatgaatgtcgctatctttgaggatgaagtttttgctggagttaccacacaccaggaactctttccacacagcctgctgagtgtgattgccaacttcatccctttctctgatcacaaccagagtccacggaacatgtaccaatgccagatgggtaagcaaactatgggctttccacttctcacttatcaagaccgatcggataacaaactgtatcgtcttcagactcctcagagtcccttggtgagaccctccatgtatgattattatgacatggataactatccaattgggaccaatgccatcgttgctgtgatttcttacactggctatgatatggaagatgccatgattgtgaataaggcctcttgggaacgaggctttgcccatggaagtgtctacaagtctgagttcatagacctctctgaaaaaattaaacaaggagatagtagcctggtgtttggcatcaaacctggtgacccacgcgttctgcagaagttagatgacgatggattgccgtttataggagcaaaactgcagtacggagatccgtattacagctacctcaacctcaacaccggggaaagttttgtgatgtactataagagtaaagaaaattgtgttgtggataacatcaaagtgtgcagtaatgacactgggagtggaaaattcaagtgtgtttgcatcactatgagagtgcctcggaacccaactatcggagataaatttgccagtcgccatgggcagaagggcattttaagcagattgtggccggctgaggacatgccttttactgagagtgggatggtcccagacattctgttcaatccccatggttttccatcccgcatgaccattgggatgttaattgagagtatggccgggaagtctgcagctttgcatggtctctgccatgatgctacacccttcatcttctcagaggagaactcggccttagaatactttggtgagatgttaaaggctgctggctacaatttctatggcaccgagaggttatatagtggcatcagtgggctagaactggaagcagacatcttcataggagtggtttattatcagcgcttacgccatatggtctcagacaaatttcaagtaaggacaactggagcccgagacagagtcaccaaccagcctattgggggaagaaatgtccagggtggaatccgttttggggagatggaacgggatgcgcttttagctcatggtacatcttttctccttcatgaccgcctcttcaactgctcagatcggtcggtagcccatgtgtgtgtgaagtgtggcagtttactctctccactgttggagaagccacccccttcttggtctgccatgcgcaacagaaaatacaactgtactctgtgtagtcgcagtgacactatcgatactgtttctgtgccttatgtttttcggtattttgtagctgaactggcagctatgaacatcaaagtgaaactggatgttgtttaacttgatgttgaccttttggattaagaggactatcagattaaagcaaaatgtaattttaattcaatgaagatatcattaccaggttactcttgagatttttcaacggtgttagaactctcaaccaagacctgaaaaccaagtatgcaaggtttctgaatctctctggtagattaactattgacaatgattttctgttatctttgttcaaaaagttcatgtcttctcaaaatatgaaatattgataaatggaagagcatacggtgacaagtctcctttccaaccccaggttccctacaccctgctctcagcaggcagtgagtgtcacacacctgttaatccatcttgagcaggacagtactatacaaatagaatgcaagctgtaatgtaattttatattttcttatagccacgttgaagtaaaaacaaacaggtacagtgttttttaccagctttatagaagtacagttgttacatatttaatgaatacaatttgatgggtctgactatatgcacacacctttgataccatcaccacaatcagggtaataaacatacctgtcatctccacaagtttcctcctgcccctttgttttttgctttttggttgctgttgagtttttgttttgtcttctgtggtaagaacacttaactcaagacctaccctcttaacaaatctttaagtgcacgatatagtattgttaattccaggcaccatgttgtacaacagatctttagaccttacttgtcttgcataactgaagctttatacctgttgaacaactctccatttccctggcccctagcaaccacccttctaccctgtttctatgagtttgactattacagatatctcatatagtgggatcatgcaatatttgtcctgtgactggcttatttcacttagcatagtgaaataagattcatccattttggaagccaggcatggtgctgtgcatctatagtccctgctatttgagaggctgaggtgggaggatcatttgagtgcaggagttcaaggacagcctgggtaatataggaagaccctgtcttgaagaccctgacctcaagtgatccacccacctcggcctccgaaagtgctaggattacaggtgtgagccactgtgcctggcctccggtgagtattttatatttagtctacacttccatacttggcttttttctgcttttatattgatctgctttcatagcagtgtgtagagtgccacttatgttttctttcttgtgtacagtattttattgtatggatttaccatcccctgtgtatttaagttgttccattctttggccattataacttttttctgcaaatattctggtgacttatctttggccattataaactgttgataatagatcatcttgtatatacttctgcaattataagatgttttttgatgatg

SEQ ID NO: 167483 - DNA, 1280 bp, Homo sapiens
  Payload ID: 12948
  Gene Symbol: POLR1C
  Gene Name: polymerase (RNA) I polypeptide C, 30kDa
  Uniprot ID: O15160
  ENST ID: ENST00000304004
  CDS Start-End: 22-1050
agtctcgtggagagattgaagatggcggcttctcaggcggtggaggaaatgcggagccgcgtggttctgggggagtttggggttcgcaatgtccatactactgactttcccggtaactattccggttatgatgatgcctgggaccaggaccgcttcgagaagaatttccgtgtggatgtagtacacatggatgaaaactcactggagtttgacatggtgggaattgacgcagccattgccaatgcttttcgacgaattctgctagctgaggtgccaactatggctgtggagaaggtcctggtgtacaataatacatccattgttcaggatgagattcttgctcaccgtctggggctcattcccattcatgctgatccccgtctttttgagtatcggaaccaaggagatgaagaaggcacagagatagatactctacagtttcgtctccaggtcagatgcactcggaacccccatgctgctaaagattcctctgaccccaacgaactgtacgtgaaccacaaagtgtataccaggcatatgacatggatccccctggggaaccaggctgatctctttccagagggcactatccgaccagtgcatgatgatatcctcatcgctcagctgcggcctggccaagaaattgacctgctcatgcactgtgtcaagggcattggcaaagatcatgccaagttttcaccagtggcaacagccagttacaggctcctgccagacatcaccctgcttgagcccgtggaaggggaggcagctgaggagttgagcaggtgcttctcacctggtgttattgaggtgcaggaagtccaaggtaaaaaggtggccagagttgccaacccccggctggataccttcagcagagaaatcttccggaatgagaagctaaagaaggttgtgaggcttgcccgggttcgagatcattatatctgtaagaaagatttgctggctgcggtggctcacacctgtaatcccagcactttgggaggccaaggcgagtggatcacggggtcaagagagcgagaccatcctggctaacatggtgaaaccccgtctctactaaaaaaaaaaaaaaaaaaaaaaaaaattagtcgggcatgggggcgagcgcctgtagtcccagctactcgagaagctaaggcaagagaatggtgtgaacctgggaggcgaagcttgcagtgagccgagatcacgccactgcactccagcctgggcaacagagcaagactccgtctcaaaaaaaaaaaaaaagaaaagaaagaaagaga

SEQ ID NO: 167484 - DNA, 1119 bp, Homo sapiens
  Payload ID: 12948
  Gene Symbol: POLR1C
  Gene Name: polymerase (RNA) I polypeptide C, 30kDa
  ENST ID: ENST00000372344
  CDS Start-End: 23-913
tagtctcgtggagagattgaagatggcggcttctcaggcggtggaggaaatgcggagccgcgtggttctgggggagtttggggttcgcaatgtccatactactgactttcccggtaactattccggttatgatgatgcctgggaccaggaccgcttcgagaagaatttccgtgtggatgtagtacacatggatgaaaactcactggagtttgacatggtgggaattgacgcagccattgccaatgcttttcgacgaattctgctagctgaggtgccaactatggctgtggagaaggtcctggtgtacaataatacatccattgttcaggatgagattcttgctcaccgtctggggctcattcccattcatgctgatccccgtctttttgagtatcggaaccaaggagatgaagaaggcacagagatagatactctacagtttcgtctccaggtcagatgcactcggaacccccatgctgctaaagattcctctgaccccaacgaactgtacgtgaaccacaaagtgtataccaggcatatgacatggatccccctggggaaccaggctgatctctttccagagggcactatccgaccagtgcatgatgatatcctcatcgctcagctgcggcctggccaagaaattgacctgctcatgcactgtgtcaagggcattggtaaaaaggtggccagagttgccaacccccggctggataccttcagcagagaaatcttccggaatgagaagctaaagaaggttgtgaggcttgcccgggttcgagatcattatatcttctctgttgagtcaacgggggtgttgccaccagatgtgctggtgagtgaagccatcaaagtactgatggggaagtgccggcgcttcttggatgaactagatgcggttcagatggactgagcttggatgcttctgaggcaagctgaagctttgggttctgactgacccaccctacaggactgctgaacagagagcccagtgtgactagggatcctgagttttctgggacaattccagctttaatcaatacattttgttaaatgtgccataaaatgagactttttacgcctttataaggccttagatgtaaataaactcacccaaac

SEQ ID NO: 167485 - DNA, 1355 bp, Homo sapiens
  Payload ID: 12948
  Gene Symbol: POLR1C
  Gene Name: polymerase (RNA) I polypeptide C, 30kDa
  Uniprot ID: O15160
  ENST ID: ENST00000372389
  CDS Start-End: 89-1129
aggaggcggtgcgttgccacggagacggagcagggctactaggacgcacgcgcgagatagaacctctagtctcgtggagagattgaagatggcggcttctcaggcggtggaggaaatgcggagccgcgtggttctgggggagtttggggttcgcaatgtccatactactgactttcccggtaactattccggttatgatgatgcctgggaccaggaccgcttcgagaagaatttccgtgtggatgtagtacacatggatgaaaactcactggagtttgacatggtgggaattgacgcagccattgccaatgcttttcgacgaattctgctagctgaggtgccaactatggctgtggagaaggtcctggtgtacaataatacatccattgttcaggatgagattcttgctcaccgtctggggctcattcccattcatgctgatccccgtctttttgagtatcggaaccaaggagatgaagaaggcacagagatagatactctacagtttcgtctccaggtcagatgcactcggaacccccatgctgctaaagattcctctgaccccaacgaactgtacgtgaaccacaaagtgtataccaggcatatgacatggatccccctggggaaccaggctgatctctttccagagggcactatccgaccagtgcatgatgatatcctcatcgctcagctgcggcctggccaagaaattgacctgctcatgcactgtgtcaagggcattggcaaagatcatgccaagttttcaccagtggcaacagccagttacaggctcctgccagacatcaccctgcttgagcccgtggaaggggaggcagctgaggagttgagcaggtgcttctcacctggtgttattgaggtgcaggaagtccaaggtaaaaaggtggccagagttgccaacccccggctggataccttcagcagagaaatcttccggaatgagaagctaaagaaggttgtgaggcttgcccgggttcgagatcattatatcttctctgttgagtcaacgggggtgttgccaccagatgtgctggtgagtgaagccatcaaagtactgatggggaagtgccggcgcttcttggatgaactagatgcggttcagatggactgagcttggatgcttctgaggcaagctgaagctttgggttctgactgacccaccctacaggactgctgaacagagagcccagtgtgactagggatcctgagttttctgggacaattccagctttaatcaatacattttgttaaatgtgccataaaatgagactttttacgcctttataaggccttagatgtaaataaactcacccaaacaaaaaaactttttgagacta

SEQ ID NO: 167486 - DNA, 576 bp, Homo sapiens
  Payload ID: 12948
  Gene Symbol: POLR1C
  Gene Name: polymerase (RNA) I polypeptide C, 30kDa
  ENST ID: ENST00000428025
  CDS Start-End: 204-576
gttgtcgcgaaggccgcggcagatgtcccgcacctcggcgccggacagcggctcccccgaaatctggatggagctgggcagcatcgtgcccacggctgggcctccgggtccatactactgactttcccggtaactattccggttatgatgatgcctgggaccaggaccgcttcgagaagaatttccgtgtggatgtagtacacatggatgaaaactcactggagtttgacatggtgggaattgacgcagccattgccaatgcttttcgacgaattctgctagctgaggtgccaactatggctgtggagaaggtcctggtgtacaataatacatccattgttcaggatgagattcttgctcaccgtctggggctcattcccattcatgctgatccccgtctttttgagtatcggaaccaaggagatgaagaaggcacagagatagatactctacagtttcgtctccaggtcagatgcactcggaacccccatgctgctaaagattcctctgaccccaacgaactgtacgtgaaccacaaagtgtataccaggcatatgacatggatccccctgggga

SEQ ID NO: 167487 - DNA, 418 bp, Homo sapiens
  Payload ID: 12948
  Gene Symbol: POLR1C
  Gene Name: polymerase (RNA) I polypeptide C, 30kDa
  ENST ID: ENST00000423780
  CDS Start-End: 1-418
ggcggcttctcaggcggtggaggaaatgcggagccgcgtggttctgggggagtttggggttcgcaatgtccatactactgactttcccggtaactattccggttatgatgatgcctgggaccaggaccgcttcgagaagaatttccgtgtggatgtagtacacatggatgaaaactcactggagtttgacatggtgggaattgacgcagccattgccaatgcttttcgacgaattctgctagctgaggtgccaactatggctgtggagaaggtcctggtgtacaataatacatccattgttcaggatgagattcttgctcaccgtctggggctcattcccattcatgctgatccccgtctttttgagtatcggaaccaagtgtataccaggcatatgacatggatccccctggggaac

SEQ ID NO: 167488 - DNA, 1166 bp, Homo sapiens
  Payload ID: 12949
  Gene Symbol: POLR1D
  Gene Name: polymerase (RNA) I polypeptide D, 16kDa
  Uniprot ID: Q9Y2S0
  ENST ID: ENST00000302979
  CDS Start-End: 563-964
cccctccctcttcaaggtgtgttgaccgactacagtttaagcctgtcgtcccacaaaaggcccgggagggccggggtcccaggaagggccatcctgggtcaacaccgccccagttgggaagtcgggccgctttcggacttgccactgggaagggaagtgatttgggggcggcaggtaaggccgcgccccttcgccatcacctggggaaaggtaccagagttgagccggggcgcccgcaggcctgtctgggcctcggggtaaggcggcgctggccccgccccctgcccctcccgccgcgagtggcctcgcgtggtcgcccaggtgagccgcggggccgcgagccaccgctcaccccgcgtcggggcgggggctgggggtggagcctcatgccccgccccgcggctgggccctgccgcgccgctgcggctcctcctccctccttccgtcctccgcgccttccgtcggtcggtccttgcttcctgcttcgcctccgcgcctcgcgctatgggacagagcccccgatccgccagcaccacctgaggatccagaaaccgccccagcgatggaagaggatcaggagctggagagaaaaatatctggattgaagacctcaatggctgaaggcgagaggaagacagccctggaaatggtccaggcagctggaacagatagacactgtgtgacatttgtattgcacgaggaagaccataccctaggaaattctctacgttacatgatcatgaagaacccggaagtggaattttgtggttacactacgacccatccttcagagagcaaaattaatttacgcattcagactcgaggtacccttccagctgttgagccatttcagagaggcctgaatgagctcatgaatgtctgccaacatgtgcttgacaagtttgaggccagcataaaggactataaggatcaaaaagcaagcagaaatgaatccacattctagtcctttatgcagtatacaaggagaactgtcctgtaggatattctcttcctgatggtgcagaacccagaattagaagtttgtggttacagcatactctgtccttcagaaaggcgtgattctagctgttgaccccttgcagctgttggaatctctgcaagaacctctgtattcttctaataaattccctcttttatttaaacta

SEQ ID NO: 167489 - DNA, 668 bp, Homo sapiens
  Payload ID: 12949
  Gene Symbol: POLR1D
  Gene Name: polymerase (RNA) I polypeptide D, 16kDa
  ENST ID: ENST00000399696
  CDS Start-End: 116-466
ccacctgaggatccagaaaccgccccagcgatggaagaggatcaggagctggagagtatgatctcatttttataaaaaatatgtgtgtagaaaaatatctggattgaagacctcaatggctgaaggcgagaggaagacagccctggaaatggtccaggcagctggaacagatagacactgtgtgacatttgtattgcacgaggaagaccataccctaggaaattctctacgttacatgatcatgaagaacccggaagtggaattttgtggttacactacgacccatccttcagagagcaaaattaatttacgcattcagactcgaggtacccttccagctgttgagccatttcagagaggcctgaatgagctcatgaatgtctgccaacatgtgcttgacaagtttgaggccagcataaaggactataaggatcaaaaagcaagcagaaatgaatccacattctagtcctttatgcagtatacaaggagaactgtcctgtaggatattctcttcctgatggtgcagaacccagaattagaagtttgtggttacagcatactctgtccttcagaaaggcgtgattctagctgttgaccccttgcagctgttggaatctctgcaagaacctctgtattcttctaataaattccctcttttatttaaacta

SEQ ID NO: 167490 - DNA, 2036 bp, Homo sapiens
  Payload ID: 12949
  Gene Symbol: POLR1D
  Gene Name: polymerase (RNA) I polypeptide D, 16kDa
  Uniprot ID: Q9Y2S0
  ENST ID: ENST00000399697
  CDS Start-End: 206-574
gtcggggcgggggctgggggtggagcctcatgccccgccccgcggctgggccctgccgcgccgctgcggctcctcctccctccttccgtcctccgcgccttccgtcggtcggtccttgcttcctgcttcgcctccgcgcctcgcgctatgggacagagcccccgatccgccagcaccacctgaggatccagaaaccgccccagcgatggaagaggatcaggagctggagaggaaagcaatagaagaactgcttaaggaggcaaaacgtgggaaaactagagctgaaacaatgggacccatgggttggatgaagtgtcctcttgctagcaccaataaaagatttctaattaacacaattaaaaacacattgccctctcataaagagcaagaccatgaacaaaaagagggcgataaggaaccagcgaagagccaggcccagaaagaagaaaacccgaagaaacacagaagccatccttacaagcacagcttccgcgctcgaggttccgccagttactccccgccacgaaagcggagcagccaggacaagtacgaaaagcggtccaaccggcggtgaggctggaaccagggccagccagccctgcgggcctccgtgctccttcggggtgcggtgtgcggagaaggcctgagctggcagggcaaacacctgagagtgactttgacattaggtcctttgttgtttttaaagaggctgctggccacaggcaaaaaaaatgacctagcaactcttgaggaaacaagtgcaaaggaggatgtcttggcaagtttaagctacttctgcagtgtagtagacttacatattgttgtttatcttgtttggaagtgtgtttcaaaataaacatgtctagaatttaaagttttcagagattgttaaaactggttccaattttttggtcatttctcagaaaaataaaatacttataaatcctatattttactttttgggggtattacatttaaaatttagaaatcatcagtccagtgaccatatttatgaaaagctgtagccctccaaggtctgggaatttatcgagaagctctttgatagctctgcatttgttttcccttaggtgaacaatgtaggaaatcctcaaagtggctttgaatttaatgctccacttcagttaccagaggttaaaaatgggttttgttgtttcctgtgcattctcaaactcatttattagatagaacaatctttctatatttaatttttttaatatataggtcttaagtggtgctttaaaaagaaccctcacaagttaaaaattaagagttgtttcagtgctagatcttaccagctaaagacttgtgataccactatatagtatagttgttccagaaatcttcattttaaatagaagtgtttacaatgccttttttcccccagtattggttttcaatacctgttttcatatacaattacaaacctttcaaacctgtattccttctttatactcaggaaaatgtcaccaagcaccctcctccccagttcacaaaaggaagaagatgaagattctgtctccctgttccccctccccagttttccaaagtgtctgagcatatgcctggctgtcctcagatcatcaccatgccacatccctgctccctacttcctggcagccaagaaaagccctttctacatgctagaaggaaatacatccaaaaagttagcattggagtgttagaaactagaatagacctctccgccaccgagctgctgtgtcacgccctcagcctgctagggagtgacaagcccaagtcattcttgatccaccccttctcccaccccagatcccagggactcatcctgtgactttgtaaccacactcattcctttcaaacacagaggaggaattattgcttcatctgactttattcaaatctagttatgtattggcctaaattatttgtgcaaaatttgaaatgttttttatttaaatattagaaatagcacaaagtcatggagtttttaaaaattgttataattaagtaaaaataaagctgaattgtgtcatttg

SEQ ID NO: 167491 - DNA, 1606 bp, Homo sapiens
  Payload ID: 12949
  Gene Symbol: POLR1D
  Gene Name: polymerase (RNA) I polypeptide D, 16kDa
  ENST ID: ENST00000621089
  CDS Start-End: 253-537
gcagaaacgtagttgcgctggacagctggagtcgggcagggtcggggccagcggcgaggggacaagaagggccgattcgagaggaagcgcacctgagggagcacagcgaaggccgggacgcagggagctggatggagagcgagcctgggcggcgaaaggttgccgaggcgggggctgggcgcctgggaacaaaggaaagcaatagaagaactgcttaaggaggcaaaacgtgggaaaactagagctgaaacaatgggacccatgggttggatgaagtgtcctcttgctagcaccaataaaagatttctaattaacacaattaaaaacacattgccctctcataaagagcaagaccatgaacaaaaagagggcgataaggaaccagcgaagagccaggcccagaaagaagaaaacccgaagaaacacagaagccatccttacaagcacagcttccgcgctcgaggttccgccagttactccccgccacgaaagcggagcagccaggacaagtacgaaaagcggtccaaccggcggtgaggctggaaccagggccagccagccctgcgggcctccgtgctccttcggggtgcggtgtgcggagaaggcctgagctggcagggcaaacacctgagagtgactttgacattaggtcctttgttgtttttaaagaggctgctggccacaggcaaaaaaaatgacctagcaactcttgaggaaacaagtgcaaaggaggatgtcttggcaagtttaagctacttctgcagtgtagtagacttacatattgttgtttatcttgtttggaagtgtgtttcaaaataaacatgtctagaatttaaagttttcagagattgttaaaactggttccaattttttggtcatttctcagaaaaataaaatacttataaatcctatattttactttttgggggtattacatttaaaatttagaaatcatcagtccagtgaccatatttatgaaaagctgtagccctccaaggtctgggaatttatcgagaagctctttgatagctctgcatttgttttcccttaggtgaacaatgtaggaaatcctcaaagtggctttgaatttaatgctccacttcagttaccagaggttaaaaatgggttttgttgtttcctgtgcattctcaaactcatttattagatagaacaatctttctatatttaatttttttaatatataggtcttaagtggtgctttaaaaagaaccctcacaagttaaaaattaagagttgtttcagtgctagatcttaccagctaaagacttgtgataccactatatagtatagttgttccagaaatcttcattttaaatagaagtgtttacaatgccttttttcccccagtattggttttcaatacctgttttcatatacaattacaaacctttcaaacctgtattccttctttatactcaggaaaatgtcaccaagcaccctcctccccagttcacaaaaggaagaagatgaagattctgtctccctgttccccctccccagttttccaaagtgtctgagcatatgcctggctgtcctcagatcatcaccatgccacatccctgctccctacttcctggcagccaag

SEQ ID NO: 167492 - DNA, 1723 bp, Homo sapiens
  Payload ID: 12949
  Gene Symbol: POLR1D
  Gene Name: polymerase (RNA) I polypeptide D, 16kDa
  ENST ID: ENST00000489647
  CDS Start-End: 115-243
tccgcgccttccgtcggtcggtccttgcttcctgcttcgcctccgcgcctcgcgctatgggacagagcccccgatccgccagcaccacctgaggatccagaaaccgccccagcgatggaagaggatcaggagctggagaggaaagcaatagaagaactgcttaaggaggcaaaacgtgggaaaactagagctgaaacaatgggacccatgggttgcttattacagggacaagatacaaactaaaatcagccaaaataagacacaaagattaaagccactgttatcctctgctccgtgaagaggacatgctaccctcccagcatcagtgtgtgataataagcatggaatattgccaagcaaggaagctcatctgcggctcagcattcaaagtttttattgcggtttcattaaataggtttgaagtcatgatatgctaccctcccagcatcagtgtgtgataataggcatggaatattgccaagcaaggaagctcacctgagcctcagtgttcaaagtttttattgaggtttcattacataggtttgattgatggatggatggatggatggatggattacatgactgatctcagtttccaggttgactgataccacgtaacccaaagctctcaccctaagtcacatgttagtctctctggcatggccagctcccactctaagactcttaggtgtgaccagctccaccctaaacaaagacatttctatgacattactttctggaagctaaggcaaaggccagccctctctttgggccaaaccaaactcttgactacatgggcaggaaatgtataagagaagctggaaaatcttgtcacaccagaaagcaaagaaactgtcaaagaccaatgtactcatttcagaaagactcaggacccacttgaaaggtctcccactagtcaaagatgatataatttgatttaaaaaacaaataaatgattaaaacacctaaaatatgttaaaatctgtaaggtcataatgataatcataataacaaacctggtagtcccttttataggatgctagagcaccaaatcactattcacaaaactgataaataggaagaagtaagcatttaccctgttccctgtacaaattatacttcaaagtcaccaattaattgatgaaagaaaactttacagaagaattgtaactaatatattagaaggattatagaataatattatcatcatttgagtttcaacacattcattaacccttataccacagaaagatgcaagaagagcaaaccaccacctctggggcatccttgtcaaaaaattgaacctgaatctgatcaagtctctagttagaactactagtttgcaagaaatacagagggcagagaaacatgttaaatgacaccataaggctgcaatcacaaaaatccaaaatgtgagaaatgctacaggacaaagaacccagtttctttaacaaatgaattgcaaggagaaaagaaagaagagtatgctgtgaattaatagatttgaggaacatcaaataaaatgggtaccttgtttgtgtctttatccaaactaactgtaaaaagttattcaacaattgagggtatttgatgatattaaggaactgatgttgattttttaggtgtgatagtattgctgttattttaatttttaaaagccattatcttttagaaatgtattctgatatatttatggatgaaattatataatgaaataatccaa

SEQ ID NO: 167493 - DNA, 565 bp, Homo sapiens
  Payload ID: 12949
  Gene Symbol: POLR1D
  Gene Name: polymerase (RNA) I polypeptide D, 16kDa
  ENST ID: ENST00000627604
  CDS Start-End: 558-565
actccgccctcgccgcccgcctcccccactcgccccgggctgtccccgccgcccgcctgattcccctgcggaagccccgctggctaggtgtctgcgcgcacccccggccgccgccaagagtggcacagctggggaaggagtgaacatccagaggaatcgcggggcggggtggggggaggccaggagaacaggtggcgcagggaagcagaaacgtagttgcgctggacagctggagtcgggcagggtcggggccagcggcgaggggacaagaagggccgattcgagaggaagcgcacctgagggagcacagcgaaggccgggacgcagggagctggatggagagcgagcctgggcggcgaaaggttgccgaggcgggggctgggcgcctgggaacaaagttgaaaatgcaactgcaagctccccggtgaaacaaataccgccttcaaccttcgtattctgtggtgactcatctcgcacgtgacccccctccctcttcaaggaaagcaatagaagaactgcttaaggaggcaaaacgtgggaaaactagagctgaaacaatgggacc

SEQ ID NO: 167494 - DNA, 1931 bp, Homo sapiens
  Payload ID: 12949
  Gene Symbol: POLR1D
  Gene Name: polymerase (RNA) I polypeptide D, 16kDa
  ENST ID: ENST00000630983
  CDS Start-End: 110-211
gccttccgtcggtcggtccttgcttcctgcttcgcctccgcgcctcgcgctatgggacagagcccccgatccgccagcaccacctgaggatccagaaaccgccccagcgatggaagaggatcaggagctggagaggaaagcaatagaagaactgcttaaggaggcaaaacgtgggaaaactagagctgaaacaatgggacccatgggatgaagtgtcctcttgctagcaccaataaaagatttctaattaacacaattaaaaacacattgccctctcataaagagcaagaccatgaacaaaaagagggcgataaggaaccagcgaagagccaggcccagaaagaagaaaacccgaagaaacacagaagccatccttacaagcacagcttccgcgctcgaggttccgccagttactccccgccacgaaagcggagcagccaggacaagtacgaaaagcggtccaaccggcggtgaggctggaaccagggccagccagccctgcgggcctccgtgctccttcggggtgcggtgtgcggagaaggcctgagctggcagggcaaacacctgagagtgactttgacattaggtcctttgttgtttttaaagaggctgctggccacaggcaaaaaaaatgacctagcaactcttgaggaaacaagtgcaaaggaggatgtcttggcaagtttaagctacttctgcagtgtagtagacttacatattgttgtttatcttgtttggaagtgtgtttcaaaataaacatgtctagaatttaaagttttcagagattgttaaaactggttccaattttttggtcatttctcagaaaaataaaatacttataaatcctatattttactttttgggggtattacatttaaaatttagaaatcatcagtccagtgaccatatttatgaaaagctgtagccctccaaggtctgggaatttatcgagaagctctttgatagctctgcatttgttttcccttaggtgaacaatgtaggaaatcctcaaagtggctttgaatttaatgctccacttcagttaccagaggttaaaaatgggttttgttgtttcctgtgcattctcaaactcatttattagatagaacaatctttctatatttaatttttttaatatataggtcttaagtggtgctttaaaaagaaccctcacaagttaaaaattaagagttgtttcagtgctagatcttaccagctaaagacttgtgataccactatatagtatagttgttccagaaatcttcattttaaatagaagtgtttacaatgccttttttcccccagtattggttttcaatacctgttttcatatacaattacaaacctttcaaacctgtattccttctttatactcaggaaaatgtcaccaagcaccctcctccccagttcacaaaaggaagaagatgaagattctgtctccctgttccccctccccagttttccaaagtgtctgagcatatgcctggctgtcctcagatcatcaccatgccacatccctgctccctacttcctggcagccaagaaaagccctttctacatgctagaaggaaatacatccaaaaagttagcattggagtgttagaaactagaatagacctctccgccaccgagctgctgtgtcacgccctcagcctgctagggagtgacaagcccaagtcattcttgatccaccccttctcccaccccagatcccagggactcatcctgtgactttgtaaccacactcattcctttcaaacacagaggaggaattattgcttcatctgactttattcaaatctagttatgtattggcctaaattatttgtgcaaaatttgaaatgttttttatttaaatattagaaatagcacaaagtcatggagtttttaaaaattgttataattaagtaaaaataaagctgaattgtgtc

SEQ ID NO: 167495 - DNA, 2118 bp, Homo sapiens
  Payload ID: 12949
  Gene Symbol: POLR1D
  Gene Name: polymerase (RNA) I polypeptide D, 16kDa
  ENST ID: ENST00000465887
  CDS Start-End: 93-221
ccttgcttcctgcttcgcctccgcgcctcgcgctatgggacagagcccccgatccgccagcaccacctgaggatccagaaaccgccccagcgatggaagaggatcaggagctggagaggaaagcaatagaagaactgcttaaggaggcaaaacgtgggaaaactagagctgaaacaatgggacccatgggttgcttattacagggacaagatacaaactaaaatcagccaaaataagacacaaagattaaagccactgttatcctctgctccgtgaagaggacatgctaccctcccagcatcagtgtgtgataataagcatggaatattgccaagcaaggaagctcatctgcggctcagcattcaaagtttttattgcggtttcattaaataggatgaagtgtcctcttgctagcaccaataaaagatttctaattaacacaattaaaaacacattgccctctcataaagagcaagaccatgaacaaaaagagggcgataaggaaccagcgaagagccaggcccagaaagaagaaaacccgaagaaacacagaagccatccttacaagcacagcttccgcgctcgaggttccgccagttactccccgccacgaaagcggagcagccaggacaagtacgaaaagcggtccaaccggcggtgaggctggaaccagggccagccagccctgcgggcctccgtgctccttcggggtgcggtgtgcggagaaggcctgagctggcagggcaaacacctgagagtgactttgacattaggtcctttgttgtttttaaagaggctgctggccacaggcaaaaaaaatgacctagcaactcttgaggaaacaagtgcaaaggaggatgtcttggcaagtttaagctacttctgcagtgtagtagacttacatattgttgtttatcttgtttggaagtgtgtttcaaaataaacatgtctagaatttaaagttttcagagattgttaaaactggttccaattttttggtcatttctcagaaaaataaaatacttataaatcctatattttactttttgggggtattacatttaaaatttagaaatcatcagtccagtgaccatatttatgaaaagctgtagccctccaaggtctgggaatttatcgagaagctctttgatagctctgcatttgttttcccttaggtgaacaatgtaggaaatcctcaaagtggctttgaatttaatgctccacttcagttaccagaggttaaaaatgggttttgttgtttcctgtgcattctcaaactcatttattagatagaacaatctttctatatttaatttttttaatatataggtcttaagtggtgctttaaaaagaaccctcacaagttaaaaattaagagttgtttcagtgctagatcttaccagctaaagacttgtgataccactatatagtatagttgttccagaaatcttcattttaaatagaagtgtttacaatgccttttttcccccagtattggttttcaatacctgttttcatatacaattacaaacctttcaaacctgtattccttctttatactcaggaaaatgtcaccaagcaccctcctccccagttcacaaaaggaagaagatgaagattctgtctccctgttccccctccccagttttccaaagtgtctgagcatatgcctggctgtcctcagatcatcaccatgccacatccctgctccctacttcctggcagccaagaaaagccctttctacatgctagaaggaaatacatccaaaaagttagcattggagtgttagaaactagaatagacctctccgccaccgagctgctgtgtcacgccctcagcctgctagggagtgacaagcccaagtcattcttgatccaccccttctcccaccccagatcccagggactcatcctgtgactttgtaaccacactcattcctttcaaacacagaggaggaattattgcttcatctgactttattcaaatctagttatgtattggcctaaattatttgtgcaaaatttgaaatgttttttatttaaatattagaaatagcacaaagtcatggagtttttaaaaattgttataattaagtaaaaataaagctgaattgtgtc

SEQ ID NO: 167496 - DNA, 2229 bp, Homo sapiens
  Payload ID: 12950
  Gene Symbol: POLR1E
  Gene Name: polymerase (RNA) I polypeptide E, 53kDa
  Uniprot ID: Q9GZS1
  ENST ID: ENST00000377792
  CDS Start-End: 289-1734
ctctaaccctctccccttccgtctcggtacctcagctgtcctctcgccctccgttgggcttctccccagcggggccgggacccctctagtctccaccactcccctgggctctgtcagggctcccctgtccgtctttctgtcactacctcccagccagattgggacatcccactcacccgctccccagagctgtgtccaggaccctgctgaccccctcacccaccaggtctcccgcctcccccatttccctctcttcactgggcaggggttccttctgtcactttaggtatgtaccaggcctctgctgtcagcctccttccgcgagacattccctcctgtcacagcccctccccagggttctcccacctccctacctcctcttctcagctggccccggatctcctccagttccctttgggtcaggacccgagcttccttgccatccccattctgacactccctcccagtgacagtctagtcccaccgtacattgtgtggtacattgtgtggccttctgctctcatctcattcttgggctgcactcttacagtccagttctccaacgggaagctacagagtccaggcaacatgcgctttaccttgtatgagaacaaagattccaccaaccccaggaagaggaatcaacggatcctggcagctgaaacagataggctctcctatgtgggaaacaattttgggactggagccctcaaatgcaacactttgtgcaggcactttgtgggaattttgaacaagacctctggccaaatggaagtatatgatgctgaattgttcaacatgcagccactattttcagatgtatcagttgagagtgaactggcgctagagagtcagaccaaaacttacagagaaaagatggattcttgtattgaagcctttggtaccaccaaacagaagcgagctctgaacaccaggagaatgaacagagttggcaatgaatctttgaatcgtgcagtggctaaagctgcagagactatcattgatacgaagggtgtgactgctctggtcagcgatgctatccacaatgacttgcaagatgactccctctaccttcctccctgctatgatgatgcagccaagcctgaagacgtgtataaatttgaagatcttctttcccctgcggagtatgaagctcttcagagcccatctgaagctttcaggaacgtcacgtcagaagaaatactgaagatgattgaggagaacagccattgcacctttgtcatagaagcgttgaagtctttgccatcagatgtggagagccgagaccgccaggcccgatgcatatggtttctggataccctcatcaaatttcgagctcatagggtagttaagcggaaaagtgctctgggacctggagttccccacatcatcaacaccaaactgctgaagcactttacttgcttgacctacaacaatggcagattacggaacttaatttcggattctatgaaggcgaagattactgcatatgtgatcatacttgccttgcacatacatgacttccaaattgacctgacagtgttacagagggacttgaagctcagtgagaaaaggatgatggagatagccaaagccatgaggctgaagatctccaaaagaagggtgtctgtggccgccggcagtgaagaagatcacaagctgggcaccctgtccctcccgctgcctccagcccagacctcagaccgcctggcaaagcggaggaagattacctagacgcatgctttccagacagggcgttttggctgcatcacagccactggctggtcctattcatttccatttttatgtatgttttgaaaagaaaaggtccggggatggtggctcacacctgaaatcccagcactttgggaggccgaggcaggaagatcattgagctcaggagtttgaaaccagtctggacaacatagggagaccccatctctaccggaggaaaaaaaaaagagtcaggcctggtggtgtgcgcctgtaatcccagctactcgggaggctgaggcaggacgattacttgagcttgggaaatcaaggttgcagtgagctatgattgtgtggccacactccatcctgggtcacagagtgagaccttgtctcaaaaaagtaacataaggaaaaaagaagccttgctttagcacaggtatgaagccagaagccagcatctcaactgtgcttgtcttatgcagaaatataaagcgatggccaggttggacttca

SEQ ID NO: 167497 - DNA, 1868 bp, Homo sapiens
  Payload ID: 12950
  Gene Symbol: POLR1E
  Gene Name: polymerase (RNA) I polypeptide E, 53kDa
  Uniprot ID: Q9GZS1
  ENST ID: ENST00000377798
  CDS Start-End: 114-1373
ggcggggccacgccttttccggcccgcagcgcggcctgggctcccgcgtgtttaaaagtgcgcttgtggctgctgctgtcttaactcctgtgcttggcggacagacaggcgagatggcggcggaggtgttgccgagtgcgaggtggcagtattgtggggcgcccgacgggagccagagagctgtactggtccagttctccaacgggaagctacagagtccaggcaacatgcgctttaccttgtatgagaacaaagattccaccaaccccaggaagaggaatcaacggatcctggcagctgaaacagataggctctcctatgtgggaaacaattttgggactggagccctcaaatgcaacactttgtgcaggcactttgtgggaattttgaacaagacctctggccaaatggaagtatatgatgctgaattgttcaacatgcagccactattttcagatgtatcagttgagagtgaactggcgctagagagtcagaccaaaacttacagagaaaagatggattcttgtattgaagcctttggtaccaccaaacagaagcgagctctgaacaccaggagaatgaacagagttggcaatgaatctttgaatcgtgcagtggctaaagctgcagagactatcattgatacgaagggtgtgactgctctggtcagcgatgctatccacaatgacttgcaagatgactccctctaccttcctccctgctatgatgatgcagccaagcctgaagacgtgtataaatttgaagatcttctttcccctgcggagtatgaagctcttcagagcccatctgaagctttcaggaacgtcacgtcagaagaaatactgaagatgattgaggagaacagccattgcacctttgtcatagaagcgttgaagtctttgccatcagatgtggagagccgagaccgccaggcccgatgcatatggtttctggataccctcatcaaatttcgagctcatagggtagttaagcggaaaagtgctctgggacctggagttccccacatcatcaacaccaaactgctgaagcactttacttgcttgacctacaacaatggcagattacggaacttaatttcggattctatgaaggcgaagattactgcatatgtgatcatacttgccttgcacatacatgacttccaaattgacctgacagtgttacagagggacttgaagctcagtgagaaaaggatgatggagatagccaaagccatgaggctgaagatctccaaaagaagggtgtctgtggccgccggcagtgaagaagatcacaagctgggcaccctgtccctcccgctgcctccagcccagacctcagaccgcctggcaaagcggaggaagattacctagacgcatgctttccagacagggcgttttggctgcatcacagccactggctggtcctattcatttccatttttatgtatgttttgaaaagaaaaggtccggggatggtggctcacacctgaaatcccagcactttgggaggccgaggcaggaagatcattgagctcaggagtttgaaaccagtctggacaacatagggagaccccatctctaccggaggaaaaaaaaaagagtcaggcctggtggtgtgcgcctgtaatcccagctactcgggaggctgaggcaggacgattacttgagcttgggaaatcaaggttgcagtgagctatgattgtgtggccacactccatcctgggtcacagagtgagaccttgtctcaaaaaagtaacataaggaaaaaagaagccttgctttagcacaggtatgaagccagaagccagcatctcaactgtgcttgtcttatgcagaaatataaagcgatggccaggttggacttca

SEQ ID NO: 167498 - DNA, 1805 bp, Homo sapiens
  Payload ID: 12950
  Gene Symbol: POLR1E
  Gene Name: polymerase (RNA) I polypeptide E, 53kDa
  ENST ID: ENST00000442009
  CDS Start-End: 101-526
cttttccggcccgcagcgcggcctgggctcccgcgtgtttaaaagtgcgcttgtggctgctgctgtcttaactcctgtgcttggcggacagacaggcgagatggcggcggaggtgttgccgagtgcgaggtggcagtattgtggggcgcccgacgggagccagagagctgtactggtccagttctccaacgggaagctacagagtccaggcaacatgcgctttaccttgtatgagaacaaagattccaccaaccccaggaagaggaatcaacggatcctggcagctgaaacagataggctctcctatgtgggaaacaattttgggactggagccctcaaatgcaacactttgtgcaggcactttgtgggaattttgaacaagacctctggccaaatggaagtatatgatgctgaattgttcaacatgcagccactattttcaggtctttcaccaagaaagcaaaattattttctggaaagagccaaggacttgttttctaatcctgtctctgccactacctggtgaactgacctgggatgtatcagttgagagtgaactggcgctagagagtcagaccaaaacttacagagaaaagatggattcttgtattgaagcctttggtaccaccaaacagaagcgagctctgaacaccaggagaatgaacagagttggcaatgaatctttgaatcgtgcagtggctaaagctgcagagactatcattgatacgaagggtgtgactgctctggtcagcgatgctatccacaatgacttgcaagatgactccctctaccttcctccctgctatgatgatgcagccaagcctgaagacgtgtataaatttgaagatcttctttcccctgcggagtatgaagctcttcagagcccatctgaagctttcaggaacgtcacgtcagaagaaatactgaagatgattgaggagaacagccattgcacctttgtcatagaagcgttgaagtctttgccatcagatgtggagagccgagaccgccaggcccgatgcatatggtttctggataccctcatcaaatttcgagctcatagggtagttaagcggaaaagtgctctgggacctggagttccccacatcatcaacaccaaactgctgaagcactttacttgcttgacctacaacaatggcagattacggaacttaatttcggattctatgaaggcgaagattactgcatatgtgatcatacttgccttgcacatacatgacttccaaattgacctgacagtgttacagagggacttgaagctcagtgagaaaaggatgatggagatagccaaagccatgaggctgaagatctccaaaagaagggtgtctgtggccgccggcagtgaagaagatcacaagctgggcaccctgtccctcccgctgcctccagcccagacctcagaccgcctggcaaagcggaggaagattacctagacgcatgctttccagacagggcgttttggctgcatcacagccactggctggtcctattcatttccatttttatgtatgttttgaaaagaaaaggtccggggatggtggctcacacctgaaatcccagcactttgggaggccgaggcaggaagatcattgagctcaggagtttgaaaccagtctggacaacatagggagaccccatctctaccggaggaaaaaaaaaagagtcaggcctggtggtgtgcgcctgtaatcccagctactcgggaggctgaggcaggacgattacttgagcttgggaaatcaaggttgcagtgagctatgattgtgtggccacactccatcctg

SEQ ID NO: 167499 - DNA, 2083 bp, Homo sapiens
  Payload ID: 12951
  Gene Symbol: POLR2A
  Gene Name: polymerase (RNA) II (DNA directed) polypeptide A, 220kDa
  Uniprot ID: P24928
  ENST ID: ENST00000572844
  CDS Start-End: 146-1846
ccaccttcccctcctccggctttttcctcccaactcggggaggtccttcccggtggccgccctgacgaggtctgagcacctaggcggaggcggcgcaggctttttgtagtgaggtttgcgcctgcgcagcgcgcctgcctccgccatgcacgggggtggccccccctcgggggacagcgcatgcccgctgcgcaccatcaagagagtccagttcggagtcctgagtccggatgaactgaagcgaatgtctgtgacggagggtggcatcaaatacccagagacgactgagggaggccgccccaagcttggggggctgatggacccgaggcagggggtgattgagcggactggccgctgccaaacatgtgcaggaaacatgacagagtgtcctggccactttggccacattgaactggccaagcctgtgtttcacgtgggcttcctggtgaagacaatgaaagttttgcgctgtgtctgcttcttctgctccaaactgcttgtggactctaacaacccaaagatcaaggatatcctggctaagtccaagggacagcccaagaagcggctcacacatgtctacgacctttgcaagggcaaaaacatatgcgagggtggggaggagatggacaacaagttcggtgtggaacaacctgagggtgacgaggatctgaccaaagaaaagggccatggtggctgtgggcggtaccagcccaggatccggcgttctggcctagagctgtatgcggaatggaagcacgttaatgaggactctcaggagaagaagatcctgctgagtccagagcgagtgcatgagatcttcaaacgcatctcagatgaggagtgttttgtgctgggcatggagccccgctatgcacggccagagtggatgattgtcacagtgctgcctgtgcccccgctctccgtgcggcctgctgttgtgatgcagggctctgcccgtaaccaggatgacctgactcacaaactggctgacatcgtgaagatcaacaatcagctgcggcgcaatgagcagaacggcgcagcggcccatgtcattgcagaggatgtgaagctcctccagttccatgtggccaccatggtggacaatgagctgcctggcttgccccgtgccatgcagaagtctgggcgtcccctcaagtccctgaagcagcggttgaagggcaaggaaggccgggtgcgagggaacctgatgggcaaaagagtggacttctcggcccgtactgtcatcacccccgaccccaacctctccattgaccaggttggcgtgccccgctccattgctgccaacatgacctttgcggagattgtcacccccttcaacattgacagacttcaagaactagtgcgcagggggaacagccagtacccaggcgccaagtacatcatccgagacaatggtgatcgcattgacttgcgtttccaccccaagcccagtgaccttcacctgcagaccggctataaggtggaacggcacatgtgtgatggggacattgttatcttcaaccggcagccaactctgcacaaaatgtccatgatggggcatcgggtccgcattctcccatggtctacctttcgcttgaatcttagtgtgacaactccgtacaatgcagactttgacggggatgagatgaacttgcacctgccacagtctctggagacgcgagcagagatccaggagctggccatggttcctcgcatgattgtcaccccccagagcaatcggcctgtcatgggtattgtgcaggacacactcacagcagtgcgcaaattcaccaagagagacgtcttcctggagcgggtgtgtggtccaaatggaaacctggcttaagtgggcagtggggctctggggtgcaaggtggaggctagagaggaagagctgtgttttttttcctgacttacccagcagtggtctgtgagattgtcttttctggtgggcgaacaaaaagggggttaggaaaactcaggccaaaaaggtgtaaggcgttaattccccatttaattccttaaaatttcatgtaataccaggtattgcctgtaaaggaaagataaagggaaaaataagtaa

SEQ ID NO: 167500 - DNA, 6751 bp, Homo sapiens
  Payload ID: 12951
  Gene Symbol: POLR2A
  Gene Name: polymerase (RNA) II (DNA directed) polypeptide A, 220kDa
  ENST ID: ENST00000617998
  CDS Start-End: 400-6342
gctcagaagcgccgagagcgcggccgggacggttggagaagaaggcggctcccggaagggggagagacaaactgccgtaacctctgccgttcaggaacccggttacttatttattcgttaccctttttcttcttcctcccccaaaaaccttttccttttcccttctttttttttcctttttgggagctgaaaaatttccggtaagggaaagaagggctcctttcgctccttatttccccgcctccttccctcccccaccttcccctcctccggctttttcctcccaactcggggaggtccttcccggtggccgccctgacgaggtctgagcacctaggcggaggcggcgcaggctttttgtagtgaggtttgcgcctgcgcagcgcgcctgcctccgccatgcacgggggtggccccccctcgggggacagcgcatgcccgctgcgcaccatcaagagagtccagttcggagtcctgagtccggatgaactgaagcgaatgtctgtgacggagggtggcatcaaatacccagagacgactgagggaggccgccccaagcttggggggctgatggacccgaggcagggggtgattgagcggactggccgctgccaaacatgtgcaggaaacatgacagagtgtcctggccactttggccacattgaactggccaagcctgtgtttcacgtgggcttcctggtgaagacaatgaaagttttgcgctgtgtctgcttcttctgctccaaactgcttgtggactctaacaacccaaagatcaaggatatcctggctaagtccaagggacagcccaagaagcggctcacacatgtctacgacctttgcaagggcaaaaacatatgcgagggtggggaggagatggacaacaagttcggtgtggaacaacctgagggtgacgaggatctgaccaaagaaaagggccatggtggctgtgggcggtaccagcccaggatccggcgttctggcctagagctgtatgcggaatggaagcacgttaatgaggactctcaggagaagaagatcctgctgagtccagagcgagtgcatgagatcttcaaacgcatctcagatgaggagtgttttgtgctgggcatggagccccgctatgcacggccagagtggatgattgtcacagtgctgcctgtgcccccgctctccgtgcggcctgctgttgtgatgcagggctctgcccgtaaccaggatgacctgactcacaaactggctgacatcgtgaagatcaacaatcagctgcggcgcaatgagcagaacggcgcagcggcccatgtcattgcagaggatgtgaagctcctccagttccatgtggccaccatggtggacaatgagctgcctggcttgccccgtgccatgcagaagtctgggcgtcccctcaagtccctgaagcagcggttgaagggcaaggaaggccgggtgcgagggaacctgatgggcaaaagagtggacttctcggcccgtactgtcatcacccccgaccccaacctctccattgaccaggttggcgtgccccgctccattgctgccaacatgacctttgcggagattgtcacccccttcaacattgacagacttcaagaactagtgcgcagggggaacagccagtacccaggcgccaagtacatcatccgagacaatggtgatcgcattgacttgcgtttccaccccaagcccagtgaccttcacctgcagaccggctataaggtggaacggcacatgtgtgatggggacattgttatcttcaaccggcagccaactctgcacaaaatgtccatgatggggcatcgggtccgcattctcccatggtctacctttcgcttgaatcttagtgtgacaactccgtacaatgcagactttgacggggatgagatgaacttgcacctgccacagtctctggagacgcgagcagagatccaggagctggccatggttcctcgcatgattgtcaccccccagagcaatcggcctgtcatgggtattgtgcaggacacactcacagcagtgcgcaaattcaccaagagagacgtcttcctggagcggggtgaagtgatgaacctcctgatgttcctgtcgacgtgggatgggaaggtcccacagccggccatcctaaagccccggcccctgtggacaggcaagcaaatcttctccctcatcatacctggtcacatcaattgtatccgtacccacagcacccatcccgatgatgaagacagtggcccttacaagcacatctctcctggggacaccaaggtggtggtggagaatggggagctgatcatgggcatcctgtgtaagaagtctctgggcacgtcagctggctccctggtccacatctcctacctagagatgggtcatgacatcactcgcctcttctactccaacattcagactgtcattaacaactggctcctcatcgagggtcatactattggcattggggactccattgctgattctaagacttaccaggacattcagaacactattaagaaggccaagcaggacgtaatagaggtcatcgagaaggcacacaacaatgagctggagcccaccccagggaacactctgcggcagacgtttgagaatcaggtgaaccgcattcttaacgatgcccgagacaagactggctcctctgctcagaaatccctgtctgaatacaataacttcaagtctatggtcgtgtccggagctaaaggttccaagattaacatctcccaggtcattgctgtcgttggacagcagaacgtcgagggcaagcggattccatttggcttcaagcaccggactctgcctcacttcatcaaggatgactacgggcctgagagccgtggctttgtggagaactcctacctagccggcctcacacccactgagttctttttccacgccatggggggtcgtgaggggctcattgacacggctgtcaagactgctgagactggatacatccagcggcggctgatcaagtccatggagtcagtgatggtgaagtacgacgcgactgtgcggaactccatcaaccaggtggtgcagctgcgctacggcgaagacggcctggcaggcgagagcgttgagttccagaacctggctacgcttaagccttccaacaaggcttttgagaagaagttccgctttgattataccaatgagagggccctgcggcgcactctgcaggaggacctggtgaaggacgtgctgagcaacgcacacatccagaacgagttggagcgggaatttgagcggatgcgggaggatcgggaggtgctcagggtcatcttcccaactggagacagcaaggtcgtcctcccctgtaacctgctgcggatgatctggaatgctcagaaaatcttccacatcaacccacgccttccctccgacctgcaccccatcaaagtggtggagggagtcaaggaattgagcaagaagctggtgattgtgaatggggatgacccactaagtcgacaggcccaggaaaatgccacgctgctcttcaacatccacctgcggtccacgttgtgttcccgccgcatggcagaggagtttcggctcagtggggaggccttcgactggctgcttggggagattgagtccaagttcaaccaagccattgcgcatcccggggaaatggtgggggctctggctgcgcagtcccttggagaacctgccacccagatgaccttgaataccttccactatgctggtgtgtctgccaagaatgtgacgctgggtgtgccccgacttaaggagctcatcaacatttccaagaagccaaagactccttcgcttactgtcttcctgttgggccagtccgctcgagatgctgagagagccaaggatattctgtgccgtctggagcatacaacgttgaggaaggtgactgccaacacagccatctactatgaccccaacccccagagcacggtggtggcagaggatcaggaatgggtgaatgtctactatgaaatgcctgactttgatgtggcccgaatctccccctggctgttgcgggtggagctggatcggaagcacatgactgaccggaagctcaccatggagcagattgctgaaaagatcaatgctggttttggtgacgacttgaactgcatctttaatgatgacaatgcagagaagctggtgctccgtattcgcatcatgaacagcgatgagaacaagatgcaagaggaggaagaggtggtggacaagatggatgatgatgtcttcctgcgctgcatcgagtccaacatgctgacagatatgaccctgcagggcatcgagcagatcagcaaggtgtacatgcacttgccacagacagacaacaagaagaagatcatcatcacggaggatggggaattcaaggccctgcaggagtggatcctggagacggacggcgtgagcttgatgcgggtgctgagtgagaaggacgtggaccccgtacgcaccacgtccaatgacattgtggagatcttcacggtgctgggcattgaagccgtgcggaaggccctggagcgggagctgtaccacgtcatctcctttgatggctcctatgtcaattaccgacacttggctctcttgtgtgataccatgacctgtcgtggccacttgatggccatcacccgacacggagtcaaccgccaggacacaggaccactcatgaagtgttcctttgaggaaacggtggacgtgcttatggaagcagccgcacacggtgagagtgaccccatgaagggggtctctgagaatatcatgctgggccagctggctccggccggcactggctgctttgacctcctgcttgatgcagagaagtgcaagtatggcatggagatccccaccaatatccccggcctgggggctgctggacccaccggcatgttctttggttcagcacccagtcccatgggtggaatctctcctgccatgacaccttggaaccagggtgcaacccctgcctatggcgcctggtcccccagtgttgggagtggaatgaccccaggggcagccggcttctctcccagtgctgcgtcagatgccagcggcttcagcccaggttactcccctgcctggtctcccacaccgggctccccggggtccccaggtccctcaagcccctacatcccttcaccaggtggtgccatgtctcccagctactcgccaacgtcacctgcctacgagccccgctctcctgggggctacacaccccagagtccctcttattcccccacttcaccctcctactcccctacctctccatcctattctccaaccagtcccaactatagtcccacatcacccagctattcgccaacgtcacccagctactcaccgacctctcccagctactcacccacctctcccagctactcgcccacctctcccagctactcgcccacctctcccagctactcacccacttcccctagctactcgcccacttcccctagctactcgccaacgtctcccagctactcgccgacatctcccagctactcgccaacttcacccagctattctcccacttctcccagctactcacctacctctccaagctattcacccacctcccccagctactcacccacttccccaagttactcacccaccagcccgaactattctccaaccagtcccaattacaccccaacatcacccagctacagcccgacatcacccagctattcacctactagtcccaactacacacctaccagccctaactacagcccaacctctccaagctactctccaacatcacccagctattccccgacctcaccaagttactccccttccagcccacgatacacaccacagtctccaacctataccccaagctcacccagctacagccccagctcgcccagctacagcccaacctcacccacaagtacaccccaaccagtccttcttacagtcccagctccccagagtataccccaacctctcccaagtactcacctaccagtcccaaatattcacccacctctcccaagtactcgcctaccagtcccacctattcacccaccaccccaaaatactccccaacatctcctacttattccccaacctctccagtctacaccccaacctctcccaagtactcacctactagccccacttactcgcccacttcccccaagtactcgcccaccagccccacctactcgcccacctcccccaaaggctcaacctactctcccacttcccctggttactcgcccaccagccccacctacagtctcacaagcccggctatcagcccggatgacagtgacgaggagaactgagggcacgtggggtgcggcagcgggctagggcccagggcagcttgcccgtgctgctgtgcagttcttgcctccctcacggggcgtcacccccagcccagctccgttgtacataaatgccttgtggcagagctcccggtgaacttctggatcccgtttctgatgcagactcttgtcttgttctccacttgtgctgttagaactcactggcccagtggtgttctcactcctaccccacccaccccctgcctgtccccaaattgaagatccttccttgcctgtggcttgatgcggggcgggtaaagggtattttaacttaggggtagttcctgctgtgagtggttacagctgatcctcgggaagaacaaagctaaagctgccttttgtctgttattttatttttttgaagtttaaataaagtttactaattttgaccaaaa

SEQ ID NO: 167501 - DNA, 6738 bp, Homo sapiens
  Payload ID: 12951
  Gene Symbol: POLR2A
  Gene Name: polymerase (RNA) II (DNA directed) polypeptide A, 220kDa
  ENST ID: ENST00000621442
  CDS Start-End: 387-6299
gagagcgcggccgggacggttggagaagaaggcggctcccggaagggggagagacaaactgccgtaacctctgccgttcaggaacccggttacttatttattcgttaccctttttcttcttcctcccccaaaaaccttttccttttcccttctttttttttcctttttgggagctgaaaaatttccggtaagggaaagaagggctcctttcgctccttatttccccgcctccttccctcccccaccttcccctcctccggctttttcctcccaactcggggaggtccttcccggtggccgccctgacgaggtctgagcacctaggcggaggcggcgcaggctttttgtagtgaggtttgcgcctgcgcagcgcgcctgcctccgccatgcacgggggtggccccccctcgggggacagcgcatgcccgctgcgcaccatcaagagagtccagttcggagtcctgagtccggatgaactgaagcgaatgtctgtgacggagggtggcatcaaatacccagagacgactgagggaggccgccccaagcttggggggctgatggacccgaggcagggggtgattgagcggactggccgctgccaaacatgtgcaggaaacatgacagagtgtcctggccactttggccacattgaactggccaagcctgtgtttcacgtgggcttcctggtgaagacaatgaaagttttgcgctgtgtctgcttcttctgctccaaactgcttgtggactctaacaacccaaagatcaaggatatcctggctaagtccaagggacagcccaagaagcggctcacacatgtctacgacctttgcaagggcaaaaacatatgcgagggtggggaggagatggacaacaagttcggtgtggaacaacctgagggtgacgaggatctgaccaaagaaaagggccatggtggctgtgggcggtaccagcccaggatccggcgttctggcctagagctgtatgcggaatggaagcacgttaatgaggactctcaggagaagaagatcctgctgagtccagagcgagtgcatgagatcttcaaacgcatctcagatgaggagtgttttgtgctgggcatggagccccgctatgcacggccagagtggatgattgtcacagtgctgcctgtgcccccgctctccgtgcggcctgctgttgtgatgcagggctctgcccgtaaccaggatgacctgactcacaaactggctgacatcgtgaagatcaacaatcagctgcggcgcaatgagcagaacggcgcagcggcccatgtcattgcagaggatgtgaagctcctccagttccatgtggccaccatggtggacaatgagctgcctggcttgccccgtgccatgcagaagtctgggcgtcccctcaagtccctgaagcagcggttgaagggcaaggaaggccgggtgcgagggaacctgatgggcaaaagagtggacttctcggcccgtactgtcatcacccccgaccccaacctctccattgaccaggttggcgtgccccgctccattgctgccaacatgacctttgcggagattgtcacccccttcaacattgacagacttcaagaactagtgcgcagggggaacagccagtacccaggcgccaagtacatcatccgagacaatggtgatcgcattgacttgcgtttccaccccaagcccagtgaccttcacctgcagaccggctataaggtggaacggcacatgtgtgatggggacattgttatcttcaaccggcagccaactctgcacaaaatgtccatgatggggcatcgggtccgcattctcccatggtctacctttcgcttgaatcttagtgtgacaactccgtacaatgcagactttgacggggatgagatgaacttgcacctgccacagtctctggagacgcgagcagagatccaggagctggccatggttcctcgcatgattgtcaccccccagagcaatcggcctgtcatgggtattgtgcaggacacactcacagcagtgcgcaaattcaccaagagagacgtcttcctggagcggggtgaagtgatgaacctcctgatgttcctgtcgacgtgggatgggaaggtcccacagccggccatcctaaagccccggcccctgtggacaggcaagcaaatcttctccctcatcatacctggtcacatcaattgtatccgtacccacagcacccatcccgatgatgaagacagtggcccttacaagcacatctctcctggggacaccaaggtggtggtggagaatggggagctgatcatgggcatcctgtgtaagaagtctctgggcacgtcagctggctccctggtccacatctcctacctagagatgggtcatgacatcactcgcctcttctactccaacattcagactgtcattaacaactggctcctcatcgagggtcatactattggcattggggactccattgctgattctaagacttaccaggacattcagaacactattaagaaggccaagcaggacgtaatagaggtcatcgagaaggcacacaacaatgagctggagcccaccccagggaacactctgcggcagacgtttgagaatcaggtgaaccgcattcttaacgatgcccgagacaagactggctcctctgctcagaaatccctgtctgaatacaataacttcaagtctatggtcgtgtccggagctaaaggttccaagattaacatctcccaggtcattgctgtcgttggacagcagaacgtcgagggcaagcggattccatttggcttcaagcaccggactctgcctcacttcatcaaggatgactacgggcctgagagccgtggctttgtggagaactcctacctagccggcctcacacccactgagttctttttccacgccatggggggtcgtgaggggctcattgacacggctgtcaagactgctgagactggatacatccagcggcggctgatcaagtccatggagtcagtgatggtgaagtacgacgcgactgtgcggaactccatcaaccaggtggtgcagctgcgctacggcgaagacggcctggcaggcgagagcgttgagttccagaacctggctacgcttaagccttccaacaaggcttttgagaagaagttccgctttgattataccaatgagagggccctgcggcgcactctgcaggaggacctggtgaaggacgtgctgagcaacgcacacatccagaacgagttggagcgggaatttgagcggatgcgggaggatcgggaggtgctcagggtcatcttcccaactggagacagcaaggtcgtcctcccctgtaacctgctgcggatgatctggaatgctcagaaaatcttccacatcaacccacgccttccctccgacctgcaccccatcaaagtggtggagggagtcaaggaattgagcaagaagctggtgattgtgaatggggatgacccactaagtcgacaggcccaggaaaatgccacgctgctcttcaacatccacctgcggtccacgttgtgttcccgccgcatggcagaggagtttcggctcagtggggaggccttcgactggctgcttggggagattgagtccaagttcaaccaagccattgcgcatcccggggaaatggtgggggctctggctgcgcagtcccttggagaacctgccacccagatgaccttgaataccttccactatgctggtgtgtctgccaagaatgtgacgctgggtgtgccccgacttaaggagctcatcaacatttccaagaagccaaagactccttcgcttactgtcttcctgttgggccagtccgctcgagatgctgagagagccaaggatattctgtgccgtctggagcatacaacgttgaggaaggtgactgccaacacagccatctactatgaccccaacccccagagcacggtggtggcagaggatcaggaatgggtgaatgtctactatgaaatgcctgactttgatgtggcccgaatctccccctggctgttgcgggtggagctggatcggaagcacatgactgaccggaagctcaccatggagcagattgctgaaaagatcaatgctggttttggtgacgacttgaactgcatctttaatgatgacaatgcagagaagctggtgctccgtattcgcatcatgaacagcgatgagaacaagatgcaagaggaggaagaggtggtggacaagatggatgatgatgtcttcctgcgctgcatcgagtccaacatgctgacagatatgaccctgcagggcatcgagcagatcagcaaggtgtacatgcacttgccacagacagacaacaagaagaagatcatcatcacggaggatggggaattcaaggccctgcaggagtggatcctggagacggacggcgtgagcttgatgcgggtgctgagtgagaaggacgtggaccccgtacgcaccacgtccaatgacattgtggagatcttcacggtgctgggcattgaagccgtgcggaaggccctggagcgggagctgtaccacgtcatctcctttgatggctcctatgtcaattaccgacacttggctctcttgtgtgataccatgacctgtcgtggccacttgatggccatcacccgacacggagtcaaccgccaggacacaggaccactcatgaagtgttcctttgaggaaacggtggacgtgcttatggaagcagccgcacacggtgagagtgaccccatgaagggggtctctgagaatatcatgctgggccagctggctccggccggcactggctgctttgacctcctgcttgatgcagagaagtgcaagtatggcatggagatccccaccaatatccccggcctgggggctgctggacccaccggcatgttctttggttcagcacccagtcccatgggtggaatctctcctgccatgacaccttggaaccagggtgcaacccctgcctatggcgcctggtcccccagtgttgggagtggaatgaccccaggggcagccggcttctctcccagtgctgcgtcagatgccagcggcttcagcccaggttactcccctgcctggtctcccacaccgggctccccggggtccccaggtccctcaagcccctacatcccttcaccaggtggtgccatgtctcccagctactcgccaacgtcacctgcctacgagccccgctctcctgggggctacacaccccagagtccctcttattcccccacttcaccctcctactcccctacctctccatcctattctccaaccagtcccaactatagtcccacatcacccagctattcgccaacgtcacccagctactcaccgacctctcccagctactcacccacctctcccagctactcgcccacctctcccagctactcgcccacctctcccagctactcacccacttcccctagctactcgcccacttcccctagctactcgccaacgtctcccagctactcgccgacatctcccagctactcgccaacttcacccagctattctcccacttctcccagctactcacctacctctccaagctattcacccacctcccccagctactcacccacttccccaagttactcacccaccagcccgaactattctccaaccagtcccaattacaccccaacatcacccagctacagcccgacatcacccagctattcacctactagtcccaactacacacctaccagccctaactacagcccaacctctccaagctactctccaacatcacccagctattccccgacctcaccaagttactccccttccagcccacgatacacaccacagtctccaacctataccccaagctcacccagctacagccccagctcgcccagctacagcccaacctcacccaagtacaccccaaccagtccttcttacagtcccagctccccagagtataccccaacctctcccaagtactcacctaccagtcccaaatattcacccacctctcccaagtactcgcctaccagtcccacctattcacccaccaccccaaaatactccccaacatctcctacttattccccaacctctccagtctacaccccaacctctcccaagtactcacctactagccccacttactcgcccacttcccccaagtactcgcccaccagccccacctactcgcccacctcccccaaaggctcaacctactctcccacttcccctggttactcgcccaccagccccacctacagtctcacaagcccggctatcagcccggatgacagtgacgaggagaactgagggcacgtggggtgcggcagcgggctagggcccagggcagcttgcccgtgctgctgtgcagttcttgcctccctcacggggcgtcacccccagcccagctccgttgtacataaatgccttgtggcagagctcccggtgaacttctggatcccgtttctgatgcagactcttgtcttgttctccacttgtgctgttagaactcactggcccagtggtgttctcactcctaccccacccaccccctgcctgtccccaaattgaagatccttccttgcctgtggcttgatgcggggcgggtaaagggtattttaacttaggggtagttcctgctgtgagtggttacagctgatcctcgggaagaacaaagctaaagctgccttttgtctgttattttatttttttgaagtttaaataaagtttactaattttgaccaaaagt

SEQ ID NO: 167502 - DNA, 3748 bp, Homo sapiens
  Payload ID: 12952
  Gene Symbol: POLR2B
  Gene Name: polymerase (RNA) II (DNA directed) polypeptide B, 140kDa
  Uniprot ID: P30876
  ENST ID: ENST00000314595
  CDS Start-End: 44-3568
cttttgatttcaagagttaggagctcgagaaccgtttggcaatatgtacgacgcggatgaggatatgcaatatgatgaggatgatgatgaaatcaccccggatttgtggcaagaagcatgctggattgtaatcagttcctattttgacgagaaaggcttggttagacaacagctggattcttttgatgagtttattcagatgtctgttcaaagaattgtggaagacgctcctcctatagacctacaggctgaagctcagcatgctagtggagaagttgaagaaccgccacgatatttgctgaagtttgaacaaatttatctttccaagcctacccattgggaaagagatggtgctccttcaccaatgatgcccaatgaagctagattaaggaatctcacgtattctgctccgctttatgttgatataacaaaaacagtcattaaagaaggtgaagaacaacttcagactcagcatcagaaaacttttataggaaaaattccaattatgttgcggtcaacttactgccttttgaatggcttgacagatcgtgatctttgtgagttaaatgaatgccctttggatcctggtggctatttcattattaatggatcagaaaaggttctgattgcccaagagaaaatggcaacaaacacagtttatgtgtttgccaaaaaggattctaaatatgcctacacaggagagtgtagatcatgtcttgagaattcttcccgacccaccagtactatatgggttagcatgctggcaagaggaggacagggtgccaagaagagtgctattggtcagcgcattgtggcaactctaccatatatcaagcaagaagttcccatcattattgtgttcagagcattaggttttgtgtccgacagagatattttagaacatattatttatgattttgaagatccagagatgatggaaatggttaaaccttctctcgatgaagcttttgtcatccaagaacagaatgttgcactaaatttcattggttcaagaggagcaaagcctggtgttactaaagagaaaagaattaaatatgcaaaggaagttttacaaaaagaaatgctccctcatgttggtgtcagtgatttttgtgagaccaaaaaagcctatttcttgggatacatggttcataggttacttctggcagctttgggtagaagagaactagatgacagagatcactatggaaacaagagattggatcttgctgggccgctgcttgcattcttatttagaggtatgtttaagaatttgcttaaagaagtgcggatctatgcacagaaatttattgatcgaggaaaggattttaacttggagttggcaattaaaacacggatcatatctgatggcctaaaatactctttagctactggaaactggggtgatcaaaagaaagctcatcaagccagagctggagtatctcaggtgttaaaccgcctgacttttgcgtctactctttctcacctgcgtcgtttaaattctcctattggtagagacggcaagctagcaaaaccaagacagttgcataatacgttgtggggaatggtgtgtcctgccgagaccccagagggccatgctgtaggacttgtgaagaatttagccttgatggcgtatatttcagttggatctcaaccatctccaattctggaatttttagaagaatggagtatggaaaatttagaagaaatttctcctgcagctattgctgatgcaaccaagatttttgttaatggctgctgggttggaatacataaagatcccgaacaacttatgaacaccctaaggaaattgagacgtcagatggacatcattgtgtctgaagtttctatgatcagagatattcgagagagggagattcggatctatacggatgcaggccgtatttgtagaccacttctgattgtggaaaaacaaaagctacttttgaagaagaggcatattgaccaattgaaagagagagaatataacaactatagttggcaggatcttgtggccagtggggtagtggagtatattgataccctggaagaagaaacagtgatgcttgcaatgactccagatgatttacaggagaaagaagtagcttattgttccacatatacacactgtgagattcatccctcaatgatccttggtgtctgtgcatctattattccctttcctgatcataaccagtcccctagaaacacataccagtctgctatgggtaagcaggctatgggagtttacatcaccaacttccatgttcgcatggacacattggcccatgttctctattatcctcaaaagccacttgtgactacacggtctatggaatatctacgatttagagagctgccagcaggcatcaactcaattgtggccattgcatcatacactggatataatcaggaagactctgttatcatgaatcgttcagctgtagaccgcggcttcttcaggtctgttttctatcgctcatacaaagaacaggagtctaaaaaaggatttgatcaagaagaagtttttgagaagcctacacgtgaaacatgccagggcatgaggcatgccatttacgacaagctggatgatgatggtttgatagctccaggggttcgtgtatcaggagatgatgttattataggcaaaacagtcaccttgcctgaaaatgaagatgaattggagagcaccaatagacgctataccaagagagactgtagcacttttctcagaactagcgagacgggcattgtggatcaggttatggtaactctcaatcaggaaggatataaattttgtaaaataagggtacgctctgttaggattccacagattggagacaaatttgctagtcgacatggtcaaaagggtacttgtggtattcagtatagacaagaggatatgcctttcacctgtgaaggtatcacccctgatatcatcatcaatccccatgccatcccctctcgtatgactattggtcacttaattgaatgccttcaagggaaggtatcggctaacaagggtgaaattggtgatgccactccatttaatgatgctgttaacgtgcagaagatttctaatcttttatctgattatggctatcatctcagaggaaatgaggtcctgtacaatgggttcactggtcgaaaaatcacatcacaaatatttattggccccacttattaccagcgtttgaagcatatggtggatgataagattcactctcgtgctaggggacctattcagatcctcaatagacagcccatggagggtagatctcgtgatggtggcctgcgttttggagaaatggaacgagattgtcagattgcccatggagcagcccagtttttaagggaaagattgtttgaggcatcagatccatatcaggttcatgtttgcaatctttgtggaataatggcgattgccaacaccaggacccatacatatgaatgcaggggctgccgcaataaaacccagatttctttggtgcgaatgccttacgcatgcaaactattgtttcaggaacttatgtctatgagtattgcaccgcgaatgatgagtgtttagctattttacaggagtcaacaagataattaaatatcttggtgtcttgtttctattgtgtggctttttaaaaatgacaaatatgtactgtgttgtgataaaaagtattttatttgtttaatgatatgcatgcttttcttctgtaaatatataataaatttttgtagatagtcttgatgtgtg

SEQ ID NO: 167503 - DNA, 4108 bp, Homo sapiens
  Payload ID: 12952
  Gene Symbol: POLR2B
  Gene Name: polymerase (RNA) II (DNA directed) polypeptide B, 140kDa
  Uniprot ID: P30876
  ENST ID: ENST00000381227
  CDS Start-End: 414-3938
actgagaacctacttaaagctatggcaaaggcactggaggattgagctaggtgggcagaaaagagcagtgtcgttatttgtgcaacaacattgaaaaacaagcagaaataaaacattgacggaacggatacgaccgcagattgcgggagctgtcctctcaatcagcccggcagcggcggcccacaatttacgcgtgtgcaaccctaaccccggcccaagcttgacctacaatttgcgcaggcgcagatcctaactttggcgtccctgtgggcggcctttggtgtgagacgcgtggtattctgggaacgtcggagacggaagttacttcgtctttagctcctggcgctgctggcttctgggcggtttttgtcttttgatttcaagagttaggagctcgagaaccgtttggcaatatgtacgacgcggatgaggatatgcaatatgatgaggatgatgatgaaatcaccccggatttgtggcaagaagcatgctggattgtaatcagttcctattttgacgagaaaggcttggttagacaacagctggattcttttgatgagtttattcagatgtctgttcaaagaattgtggaagacgctcctcctatagacctacaggctgaagctcagcatgctagtggagaagttgaagaaccgccacgatatttgctgaagtttgaacaaatttatctttccaagcctacccattgggaaagagatggtgctccttcaccaatgatgcccaatgaagctagattaaggaatctcacgtattctgctccgctttatgttgatataacaaaaacagtcattaaagaaggtgaagaacaacttcagactcagcatcagaaaacttttataggaaaaattccaattatgttgcggtcaacttactgccttttgaatggcttgacagatcgtgatctttgtgagttaaatgaatgccctttggatcctggtggctatttcattattaatggatcagaaaaggttctgattgcccaagagaaaatggcaacaaacacagtttatgtgtttgccaaaaaggattctaaatatgcctacacaggagagtgtagatcatgtcttgagaattcttcccgacccaccagtactatatgggttagcatgctggcaagaggaggacagggtgccaagaagagtgctattggtcagcgcattgtggcaactctaccatatatcaagcaagaagttcccatcattattgtgttcagagcattaggttttgtgtccgacagagatattttagaacatattatttatgattttgaagatccagagatgatggaaatggttaaaccttctctcgatgaagcttttgtcatccaagaacagaatgttgcactaaatttcattggttcaagaggagcaaagcctggtgttactaaagagaaaagaattaaatatgcaaaggaagttttacaaaaagaaatgctccctcatgttggtgtcagtgatttttgtgagaccaaaaaagcctatttcttgggatacatggttcataggttacttctggcagctttgggtagaagagaactagatgacagagatcactatggaaacaagagattggatcttgctgggccgctgcttgcattcttatttagaggtatgtttaagaatttgcttaaagaagtgcggatctatgcacagaaatttattgatcgaggaaaggattttaacttggagttggcaattaaaacacggatcatatctgatggcctaaaatactctttagctactggaaactggggtgatcaaaagaaagctcatcaagccagagctggagtatctcaggtgttaaaccgcctgacttttgcgtctactctttctcacctgcgtcgtttaaattctcctattggtagagacggcaagctagcaaaaccaagacagttgcataatacgttgtggggaatggtgtgtcctgccgagaccccagagggccatgctgtaggacttgtgaagaatttagccttgatggcgtatatttcagttggatctcaaccatctccaattctggaatttttagaagaatggagtatggaaaatttagaagaaatttctcctgcagctattgctgatgcaaccaagatttttgttaatggctgctgggttggaatacataaagatcccgaacaacttatgaacaccctaaggaaattgagacgtcagatggacatcattgtgtctgaagtttctatgatcagagatattcgagagagggagattcggatctatacggatgcaggccgtatttgtagaccacttctgattgtggaaaaacaaaagctacttttgaagaagaggcatattgaccaattgaaagagagagaatataacaactatagttggcaggatcttgtggccagtggggtagtggagtatattgataccctggaagaagaaacagtgatgcttgcaatgactccagatgatttacaggagaaagaagtagcttattgttccacatatacacactgtgagattcatccctcaatgatccttggtgtctgtgcatctattattccctttcctgatcataaccagtcccctagaaacacataccagtctgctatgggtaagcaggctatgggagtttacatcaccaacttccatgttcgcatggacacattggcccatgttctctattatcctcaaaagccacttgtgactacacggtctatggaatatctacgatttagagagctgccagcaggcatcaactcaattgtggccattgcatcatacactggatataatcaggaagactctgttatcatgaatcgttcagctgtagaccgcggcttcttcaggtctgttttctatcgctcatacaaagaacaggagtctaaaaaaggatttgatcaagaagaagtttttgagaagcctacacgtgaaacatgccagggcatgaggcatgccatttacgacaagctggatgatgatggtttgatagctccaggggttcgtgtatcaggagatgatgttattataggcaaaacagtcaccttgcctgaaaatgaagatgaattggagagcaccaatagacgctataccaagagagactgtagcacttttctcagaactagcgagacgggcattgtggatcaggttatggtaactctcaatcaggaaggatataaattttgtaaaataagggtacgctctgttaggattccacagattggagacaaatttgctagtcgacatggtcaaaagggtacttgtggtattcagtatagacaagaggatatgcctttcacctgtgaaggtatcacccctgatatcatcatcaatccccatgccatcccctctcgtatgactattggtcacttaattgaatgccttcaagggaaggtatcggctaacaagggtgaaattggtgatgccactccatttaatgatgctgttaacgtgcagaagatttctaatcttttatctgattatggctatcatctcagaggaaatgaggtcctgtacaatgggttcactggtcgaaaaatcacatcacaaatatttattggccccacttattaccagcgtttgaagcatatggtggatgataagattcactctcgtgctaggggacctattcagatcctcaatagacagcccatggagggtagatctcgtgatggtggcctgcgttttggagaaatggaacgagattgtcagattgcccatggagcagcccagtttttaagggaaagattgtttgaggcatcagatccatatcaggttcatgtttgcaatctttgtggaataatggcgattgccaacaccaggacccatacatatgaatgcaggggctgccgcaataaaacccagatttctttggtgcgaatgccttacgcatgcaaactattgtttcaggaacttatgtctatgagtattgcaccgcgaatgatgagtgtttagctattttacaggagtcaacaagataattaaatatcttggtgtcttgtttctattgtgtggctttttaaaaatgacaaatatgtactgtgttgtgataaaaagtattttatttgtttaatgatatgcatgcttttcttctgtaaatatataataaatttttgtagatagtc

SEQ ID NO: 167504 - DNA, 3666 bp, Homo sapiens
  Payload ID: 12952
  Gene Symbol: POLR2B
  Gene Name: polymerase (RNA) II (DNA directed) polypeptide B, 140kDa
  ENST ID: ENST00000431623
  CDS Start-End: 197-3496
gtggtattctgggaacgtcggagacggaagttacttcgtctttagctcctggcgctgctggcttctgggcggtttttgtcttttgatttcaagagttaggagctcgagaaccgtttggcaatatgtacgacgcggatgaggatatgcaatatgatgaggatgatgatgaaatcaccccggatttgtggcaagaagcatgctggattgtaatcagccacgatatttgctgaagtttgaacaaatttatctttccaagcctacccattgggaaagagatggtgctccttcaccaatgatgcccaatgaagctagattaaggaatctcacgtattctgctccgctttatgttgatataacaaaaacagtcattaaagaaggtgaagaacaacttcagactcagcatcagaaaacttttataggaaaaattccaattatgttgcggtcaacttactgccttttgaatggcttgacagatcgtgatctttgtgagttaaatgaatgccctttggatcctggtggctatttcattattaatggatcagaaaaggttctgattgcccaagagaaaatggcaacaaacacagtttatgtgtttgccaaaaaggattctaaatatgcctacacaggagagtgtagatcatgtcttgagaattcttcccgacccaccagtactatatgggttagcatgctggcaagaggaggacagggtgccaagaagagtgctattggtcagcgcattgtggcaactctaccatatatcaagcaagaagttcccatcattattgtgttcagagcattaggttttgtgtccgacagagatattttagaacatattatttatgattttgaagatccagagatgatggaaatggttaaaccttctctcgatgaagcttttgtcatccaagaacagaatgttgcactaaatttcattggttcaagaggagcaaagcctggtgttactaaagagaaaagaattaaatatgcaaaggaagttttacaaaaagaaatgctccctcatgttggtgtcagtgatttttgtgagaccaaaaaagcctatttcttgggatacatggttcataggttacttctggcagctttgggtagaagagaactagatgacagagatcactatggaaacaagagattggatcttgctgggccgctgcttgcattcttatttagaggtatgtttaagaatttgcttaaagaagtgcggatctatgcacagaaatttattgatcgaggaaaggattttaacttggagttggcaattaaaacacggatcatatctgatggcctaaaatactctttagctactggaaactggggtgatcaaaagaaagctcatcaagccagagctggagtatctcaggtgttaaaccgcctgacttttgcgtctactctttctcacctgcgtcgtttaaattctcctattggtagagacggcaagctagcaaaaccaagacagttgcataatacgttgtggggaatggtgtgtcctgccgagaccccagagggccatgctgtaggacttgtgaagaatttagccttgatggcgtatatttcagttggatctcaaccatctccaattctggaatttttagaagaatggagtatggaaaatttagaagaaatttctcctgcagctattgctgatgcaaccaagatttttgttaatggctgctgggttggaatacataaagatcccgaacaacttatgaacaccctaaggaaattgagacgtcagatggacatcattgtgtctgaagtttctatgatcagagatattcgagagagggagattcggatctatacggatgcaggccgtatttgtagaccacttctgattgtggaaaaacaaaagctacttttgaagaagaggcatattgaccaattgaaagagagagaatataacaactatagttggcaggatcttgtggccagtggggtagtggagtatattgataccctggaagaagaaacagtgatgcttgcaatgactccagatgatttacaggagaaagaagtagcttattgttccacatatacacactgtgagattcatccctcaatgatccttggtgtctgtgcatctattattccctttcctgatcataaccagtcccctagaaacacataccagtctgctatgggtaagcaggctatgggagtttacatcaccaacttccatgttcgcatggacacattggcccatgttctctattatcctcaaaagccacttgtgactacacggtctatggaatatctacgatttagagagctgccagcaggcatcaactcaattgtggccattgcatcatacactggatataatcaggaagactctgttatcatgaatcgttcagctgtagaccgcggcttcttcaggtctgttttctatcgctcatacaaagaacaggagtctaaaaaaggatttgatcaagaagaagtttttgagaagcctacacgtgaaacatgccagggcatgaggcatgccatttacgacaagctggatgatgatggtttgatagctccaggggttcgtgtatcaggagatgatgttattataggcaaaacagtcaccttgcctgaaaatgaagatgaattggagagcaccaatagacgctataccaagagagactgtagcacttttctcagaactagcgagacgggcattgtggatcaggttatggtaactctcaatcaggaaggatataaattttgtaaaataagggtacgctctgttaggattccacagattggagacaaatttgctagtcgacatggtcaaaagggtacttgtggtattcagtatagacaagaggatatgcctttcacctgtgaaggtatcacccctgatatcatcatcaatccccatgccatcccctctcgtatgactattggtcacttaattgaatgccttcaagggaaggtatcggctaacaagggtgaaattggtgatgccactccatttaatgatgctgttaacgtgcagaagatttctaatcttttatctgattatggctatcatctcagaggaaatgaggtcctgtacaatgggttcactggtcgaaaaatcacatcacaaatatttattggccccacttattaccagcgtttgaagcatatggtggatgataagattcactctcgtgctaggggacctattcagatcctcaatagacagcccatggagggtagatctcgtgatggtggcctgcgttttggagaaatggaacgagattgtcagattgcccatggagcagcccagtttttaagggaaagattgtttgaggcatcagatccatatcaggttcatgtttgcaatctttgtggaataatggcgattgccaacaccaggacccatacatatgaatgcaggggctgccgcaataaaacccagatttctttggtgcgaatgccttacgcatgcaaactattgtttcaggaacttatgtctatgagtattgcaccgcgaatgatgagtgtttagctattttacaggagtcaacaagataattaaatatcttggtgtcttgtttctattgtgtggctttttaaaaatgacaaatatgtactgtgttgtgataaaaagtattttatttgtttaatgatatgcatgcttttcttctgtaaatatataataaatttttgtagatagtc

SEQ ID NO: 167505 - DNA, 3839 bp, Homo sapiens
  Payload ID: 12952
  Gene Symbol: POLR2B
  Gene Name: polymerase (RNA) II (DNA directed) polypeptide B, 140kDa
  ENST ID: ENST00000441246
  CDS Start-End: 317-3820
attctgggaacgtcggagacggaagttacttcgtctttagctcctggcgctgctggcttctgggcggtttttgtcttttgatttcaagagttaggagctcgagaaccgtttggcaatatgtacgacgcggatgagggctggagtgcagtggcgcgatctcagctcctgcgaggaggcggaccgcccattccgtgcccggtagccgcgagggaccggtggtagccgcgagggacgggcggcgggctcggtgctgtggcgaggcggggatggcactcccccccgccgccccgtggggcggccccgactttcgggcgatatgcaatatgatgaggatgatgatgaaatcaccccggatttgtggcaagaagcatgctggattgtaatcagttcctattttgacgagaaaggcttggttagacaacagctggattcttttgatgagtttattcagatgtctgttcaaagaattgtggaagacgctcctcctatagacctacaggctgaagctcagcatgctagtggagaagttgaagaaccgccacgatatttgctgaagtttgaacaaatttatctttccaagcctacccattgggaaagagatggtgctccttcaccaatgatgcccaatgaagctagattaaggaatctcacgtattctgctccgctttatgttgatataacaaaaacagtcattaaagaaggtgaagaacaacttcagactcagcatcagaaaacttttataggaaaaattccaattatgttgcggtcaacttactgccttttgaatggcttgacagatcgtgatctttgtgagttaaatgaatgccctttggatcctggtggctatttcattattaatggatcagaaaaggttctgattgcccaagagaaaatggcaacaaacacagtttatgtgtttgccaaaaaggattctaaatatgcctacacaggagagtgtagatcatgtcttgagaattcttcccgacccaccagtactatatgggttagcatgctggcaagaggaggacagggtgccaagaagagtgctattggtcagcgcattgtggcaactctaccatatatcaagcaagaagttcccatcattattgtgttcagagcattaggttttgtgtccgacagagatattttagaacatattatttatgattttgaagatccagagatgatggaaatggttaaaccttctctcgatgaagcttttgtcatccaagaacagaatgttgcactaaatttcattggttcaagaggagcaaagcctggtgttactaaagagaaaagaattaaatatgcaaaggaagttttacaaaaagaaatgctccctcatgttggtgtcagtgatttttgtgagaccaaaaaagcctatttcttgggatacatggttcataggttacttctggcagctttgggtagaagagaactagatgacagagatcactatggaaacaagagattggatcttgctgggccgctgcttgcattcttatttagaggtatgtttaagaatttgcttaaagaagtgcggatctatgcacagaaatttattgatcgaggaaaggattttaacttggagttggcaattaaaacacggatcatatctgatggcctaaaatactctttagctactggaaactggggtgatcaaaagaaagctcatcaagccagagctggagtatctcaggtgttaaaccgcctgacttttgcgtctactctttctcacctgcgtcgtttaaattctcctattggtagagacggcaagctagcaaaaccaagacagttgcataatacgttgtggggaatggtgtgtcctgccgagaccccagagggccatgctgtaggacttgtgaagaatttagccttgatggcgtatatttcagttggatctcaaccatctccaattctggaatttttagaagaatggagtatggaaaatttagaagaaatttctcctgcagctattgctgatgcaaccaagatttttgttaatggctgctgggttggaatacataaagatcccgaacaacttatgaacaccctaaggaaattgagacgtcagatggacatcattgtgtctgaagtttctatgatcagagatattcgagagagggagattcggatctatacggatgcaggccgtatttgtagaccacttctgattgtggaaaaacaaaagctacttttgaagaagaggcatattgaccaattgaaagagagagaatataacaactatagttggcaggatcttgtggccagtggggtagtggagtatattgataccctggaagaagaaacagtgatgcttgcaatgactccagatgatttacaggagaaagaagtagcttattgttccacatatacacactgtgagattcatccctcaatgatccttggtgtctgtgcatctattattccctttcctgatcataaccagtcccctagaaacacataccagtctgctatgggtaagcaggctatgggagtttacatcaccaacttccatgttcgcatggacacattggcccatgttctctattatcctcaaaagccacttgtgactacacggtctatggaatatctacgatttagagagctgccagcaggcatcaactcaattgtggccattgcatcatacactggatataatcaggaagactctgttatcatgaatcgttcagctgtagaccgcggcttcttcaggtctgttttctatcgctcatacaaagaacaggagtctaaaaaaggatttgatcaagaagaagtttttgagaagcctacacgtgaaacatgccagggcatgaggcatgccatttacgacaagctggatgatgatggtttgatagctccaggggttcgtgtatcaggagatgatgttattataggcaaaacagtcaccttgcctgaaaatgaagatgaattggagagcaccaatagacgctataccaagagagactgtagcacttttctcagaactagcgagacgggcattgtggatcaggttatggtaactctcaatcaggaaggatataaattttgtaaaataagggtacgctctgttaggattccacagattggagacaaatttgctagtcgacatggtcaaaagggtacttgtggtattcagtatagacaagaggatatgcctttcacctgtgaaggtatcacccctgatatcatcatcaatccccatgccatcccctctcgtatgactattggtcacttaattgaatgccttcaagggaaggtatcggctaacaagggtgaaattggtgatgccactccatttaatgatgctgttaacgtgcagaagatttctaatcttttatctgattatggctatcatctcagaggaaatgaggtcctgtacaatgggttcactggtcgaaaaatcacatcacaaatatttattggccccacttattaccagcgtttgaagcatatggtggatgataagattcactctcgtgctaggggacctattcagatcctcaatagacagcccatggagggtagatctcgtgatggtggcctgcgttttggagaaatggaacgagattgtcagattgcccatggagcagcccagtttttaagggaaagattgtttgaggcatcagatccatatcaggttcatgtttgcaatctttgtggaataatggcgattgccaacaccaggacccatacatatgaatgcaggggctgccgcaataaaacccagatttctttggtgcgaatgccttacgcatgcaaactattgtttcaggaacttatgtctatgagtattgcaccgcgaatgatgagtgtttagctattttacaggagtcaac

SEQ ID NO: 167506 - DNA, 539 bp, Homo sapiens
  Payload ID: 12952
  Gene Symbol: POLR2B
  Gene Name: polymerase (RNA) II (DNA directed) polypeptide B, 140kDa
  ENST ID: ENST00000433463
  CDS Start-End: 310-539
acttcgtctttagctcctggcgctgctggcttctgggcggtttttgtcttttgatttcaagagttaggagctcgagaaccgtttggcaatatgtacgacgcggatgaggagtctcgctctgtggcccaggctggagtgcagtggcgcgatctcagctcctgcgaggaggcggaccgcccattccgtgcccggtagccgcgagggaccggtggtagccgcgagggacgggcggcgggctcggtgctgtggcgaggcggggatggcactcccccccgccgccccgtggggcggccccgactttcgggcgatatgcaatatgatgaggatgatgatgaaatcaccccggatttgtggcaagaagcatgctggattgtaatcagttcctattttgacgagaaaggcttggttagacaacagctggattcttttgatgagtttattcagatgtctgttcaaagaattgtggaagacgctcctcctatagacctacaggctgaagctcagcatgctagtggagaagttgaagaaccggtaagata

SEQ ID NO: 167507 - DNA, 608 bp, Homo sapiens
  Payload ID: 12952
  Gene Symbol: POLR2B
  Gene Name: polymerase (RNA) II (DNA directed) polypeptide B, 140kDa
  ENST ID: ENST00000450656
  CDS Start-End: 417-608
ctcgcgatttaagctctgagactgagaacctacttaaagctatggcaaaggcactggaggattgagctaggtgtcgttatttgtgcaacaacattgaaaaacaagcagaaataaaacattgacggaacggatacgaccgcagattgcgggagctgtcctctcaatcagcccggcagcggcggcccacaatttacgcgtgtgcaaccctaaccccggcccaagcttgacctacaatttgcgcaggcgcagatcctaactttggcgtccctgtgggcggcctttggtgtgagacgcgtggtattctgggaacgtcggagacggaagttacttcgtctttagctcctggcgctgctggcttctgggcggtttttgtcttttgatttcaagagttaggagctcgagaaccgtttggcaatatgtacgacgcggatgaggatatgcaatatgatgaggatgatgatgaaatcaccccggatttgtggcaagaagcatgctggattgtaatcagttcctattttgacgagaaaggcttggttagacaacagctggattcttttgatgagtttattcagatgtctgttcaaagaattgtggaagacgctcctcct

SEQ ID NO: 167508 - DNA, 2057 bp, Homo sapiens
  Payload ID: 12953
  Gene Symbol: POLR2C
  Gene Name: polymerase (RNA) II (DNA directed) polypeptide C, 33kDa
  Uniprot ID: P19387
  ENST ID: ENST00000219252
  CDS Start-End: 339-1166
atggacagtacaaacagtactaccacgaacgtccctgcactcgtatctttgtttacaactgcaagtgtttctgcagtatgaattcttagaagtgttactgttaagtgaaggacgtatgcgtgttttgccaaactaccctccgagatagctgaatctggtacattttaaagcaggaggccgcagaagacgctcggcagttctggcctccgagcagcaggcggcgctgtgagtcgtctttgcggaagccgcggaggcctcgctgactgacttccggtgttggcggtggcgccgcgcagtcaccgcggagcagacgcggaggctggtggcccctgggcgagatgccgtacgccaaccagcctaccgtgcggatcacggagctcactgacgagaatgtcaagttcatcatcgagaacaccgacctggcggtggccaattcgattcggagggtcttcatcgctgaggttcccataatagccattgactgggttcagattgatgccaattcctcagttcttcatgatgaattcattgctcacaggcttggattaattcccctcattagtgatgacattgtggacaagctgcagtactctcgggactgcacatgtgaggagttctgccccgagtgctcggtggagttcaccctcgatgtgcggtgcaatgaagaccagacgcgacatgtcacgtctcgagacctcatctccaacagcccccgggtcattccggtgacatcccggaaccgagataatgaccccaatgactacgtggagcaggatgacatcctcatcgtcaagttgagaaagggccaggagctgagacttcgagcctatgccaaaaagggctttggcaaggagcatgccaagtggaaccctactgcaggggtggcttttgaatacgatccagacaatgccctgaggcacacagtgtaccccaagcccgaggaatggccaaagagtgagtactcggagctggatgaggatgagtcgcaggctccctatgaccccaacggcaagccagaaaggttttactacaatgtggagtcctgtggctctctgcgtcctgaaaccattgtcctgtcagccctctcaggattgaagaagaaactgagtgatttacaaactcaattaagccacgagatccagagtgatgtgctaaccataaattaactgcagcttgcctgcttcagcaaaaacggagattcaggccagcagctggatatgggggtctctcttcagactcttctcgtttctgagaatctagtctactgttggttgagcttcttggcaggacatcagtaccaactagaagtgggtcatagatagattaccagggatgcagtggtgtttaggcaggataggtctttactggccctgactgctgttaataattggcagcagtgctccccagatcccagaaggtccctgctggagtgtttccagtgcacctgtagggaaccaactagacttctctcctggttagtccagctctttactctaaaccctttctgtccaaaatgagtcattttcagttgtaccttagatgtctggtgttgaggatcaagtgccatagcctttattcagggggcctataaacccttccagttcttgccccagggctggcctgctagcgcttcaaattcccaggtgtccctaatttgagaagtaaccttttggaatagcattagaccctggctgtcccctccccaccaaataaacatgatatttcattctctgtccagcagtcatgaaccccttcacctccaatgacctgatcatttagtttggtgggggtgggggtgggggtgggggtggaagcagccgcaggagcaagggcccctcccacatacacaggaggagtatttcatttctccttaatgaaggctctggccctaacccctcagcactgtctccagataggaacatgcacaaagcagttaattaggcagcctggagaaaaccagagatccagtacagaaaggaaaggatatttattgattaacagaagttgtctttttaaaagtgtttatttttggcaataaagagcacaacataatctcc

SEQ ID NO: 167509 - DNA, 748 bp, Homo sapiens
  Payload ID: 12953
  Gene Symbol: POLR2C
  Gene Name: polymerase (RNA) II (DNA directed) polypeptide C, 33kDa
  ENST ID: ENST00000562599
  CDS Start-End: 57-197
gtggcgccgcgcagtcaccgcggagcagacgcggaggctggtggcccctgggcgagatgccgtacgccaaccagcctaccgtgcggatcacggagctcactgacgagaatgtcaagttcatcatcgagaacaccgacctggcggtggccaattcgattcggagggtcttcatcgctgaggttcccataataggataatggcttccaggccgcgctcgcgcctgtaattccagcactttgggaggccaagactgaggaacacctgaggccaggagtttgagaccagcctggccaacatggggaaagcccgcctctactaaaaatgcaaaaattagccaggtgtggtggctcccacctgtaatcccagctactggggaggctgaggcagaattgattgaacccagaaggtggaggttgcagtgagccgagatcatgccactgcactctggcctgggcaatagagtgagactccttctcaaacaaaagaaaataaaaaagaagatagtggcttccagccacgtccatgttgctgcagaggacatgatttcgttcgttcttatggctgcatcacttactgcttttgtgaaacttggccattgactgggttcagattgatgccaattcctcagttcttcatgatgaattcattgctcacaggcttggattaattcccctcattagtgatgacattgtggacaagctgcagtactctcgggactgcacatgtgaggagttctgccccgagtgct

SEQ ID NO: 167510 - DNA, 5042 bp, Homo sapiens
  Payload ID: 12954
  Gene Symbol: POLR2D
  Gene Name: polymerase (RNA) II (DNA directed) polypeptide D
  Uniprot ID: O15514
  ENST ID: ENST00000272645
  CDS Start-End: 58-486
ttgctccgcgcttctgcttccggcggcgctggtggtggcgcgcggcgcggcgcggcgatggcggcgggtggcagcgatccgcgggctggcgacgtagaggaggacgcctcacagctcatctttcctaaagagtttgaaacagctgagacacttctaaattcagaagttcatatgcttctggaacatcgaaagcagcagaatgagagtgcagaggacgaacaggagctctcagaagtcttcatgaaaacattaaactacacagcccgtttcagtcgtttcaaaaacagagagaccattgccagtgttcgtagcttgctactccagaaaaagcttcataagtttgagttggcctgtttggccaacctttgcccagagactgctgaggagtccaaggctctaatcccaagcttggagggacggtttgaagatgaggagctgcagcagattcttgatgatatccagacaaagcgcagctttcagtattaatctccaaacatcactgctgctcggagaaaccacatccccaggcataacaccaccttcccactgtctggggctgacttgcacagaaattctgttgaagacagttgagaattcctttggagaaaacagcccagcttggcgtggggttaggttgctgtttcaaataactcacaggcccaggtgacatggaatcttggagcagccttgtgcagtggcagccagtggcttcctgaacgtgcctctgcgaagtgtgagatgaggggtcacataaccacactgttgactacctcattcctggtttttggcctccacatcatcttttttcttaatatttcatgttttaatttcagggtgtttatactttttgaaactagaccagaagatagtagactttatagagaaagaccagttttacctagatactaaaggaagaattaaaccgctgttagtttgaaatgctttttttttttttttttaaatggagatagggtcttaactcttgtccaggctggaggagtgcagtcgtacagtcatggctcactgaagtcttgaccccgctgcctcagcctcccaaataactggggccacaggtgtgcaccacaactctcagctaatttttaaaattttttatagaggtggggttttactatgctgtccagactggtcttaaactcctgggctcaagtgatccccctgccttggcctcccaaactggtgagattacaggcatgagccaccacaactggcctgaaattcttaaaggatgggagtgtcgatgacagcaccttggcatcgttgtgcctaacctgggagacggaagaagcacgccatgggaagtgtttacacttggggacaagtgctaagtattgtggagcccatagccccttgagatagatggctactttgcctttcttcttgaactgtcttgcagaatgtggatttggggtaagtggtcttgaaggattcatttagtcaccctcaaattaagatttttacttcatctttcttgggcctgcacctccaagataacaaagaagaagcaatggtcgtgccaaagaggtccacaaccaggtgtgcactgttcactgcagcccatttgctgtatgaactgtggttgttgtgtgcccaatgacaaggctactaagaaattcatcatttgaaacgtagaggccgcagcagtcagcgatgtttctgaaatgagcatccttgacgcctgtgtacttcccaggctggatgtgaagctacattaccatgtgagttgtgccattcacagcacagtggtgaggaattgagctcatgaagcaggcaaggaccgaacacctccaccccaacgtagacctgcaggtgctgccccatgacctccaccaaagcccatataaggagcggagttgttaaggactgaagaaaaacttctctggagaaaaataaaattgcaattctacttaaaaaaatttttttttttttttacttcataggccaggcttgaagttctgaacactttgaagtctccaattatgagagatccagtctaagcctctggcctgctaattagcaataagtgctttatttggaaggagggagtcatccactcttgagccactgcagtgaagtcacttgatctcagtctgggggaaaacacttcaatagctaaacattctagctttgatttttctgaagggaatacacttgttttcaattttggggtttttctttggggcacttgcttgactctgtatgaacttgtgatccaaggaaaaaggagaaagaacagtgttggcttttaaaatcaggatggttttatgtttgctacgaaataaggcaagaataaaaaattcttatttttatttatttatttattttttgagatagagtctggctgtgttgcccaggatgcaatggcgcaatcttggctcactgcaacctctgccttctgggttcaagtgattctcctgcctcagcctcccaagtagctgggattacaggtacctgccaccacgcctggctaattttttgtgtttttagtagagacagggtttcaccacgttcgccaggctagtcttgaactgacctcaagtgatcctcccacctcggcttcccaaagtgctgggattacaggcgtgagccaccggccaatctttttatccttgagcaacttcgcttctttgagcctcattggtgttctcaattgtgaaatatggataatagtatctgccccatgggtattttgagaaggttgaatgaacaggaaattattacaaagagcctagaggtgtctgatatatagtatgttccagtaaatgttcactattcttagcatctcaggcagatgagctagtatagatagatgattaagtcagcttgcttcatagaaattagtgcaagaatttgttagcctaccaactgatagtatcagacttggaaaataaatgaaattgggccaggcgtggtggctcacccttgtaatcccagcgctttcagaggccgaggcaggcggatcacctgaggttgggagtttgagaccatcctgaccaacatggagaaaccccgtctctacttaaaatacaaaattagcggggcgtggtggcgcatgcctgtaatctcagctactctggaggctgaggcaggagaattgcttgaacctgggaggcagagggggtggcgagccaagattgcaccattgtactccagcctaggcaacaagagcgaaactgtctcaaaaaaaaaaaaaaaaaaaaagtgaaattgcttacccaaatctacagttaactttcgttttttaatgcttgatgaatttgcatgtcattcttgggcagtggccatgctgtcttctctgtattgttccaatttgggtatatgtgctgccaaagtgagtactgcagaattatttcttgagagaggcacttacatgtgctgattggcactaaagcagtggaatgggaagaagagacttggaaggcagcccagacgatccaggcgtgtgctagatggcaactgaggagcacggtgctaccatctttactggtgtttccacctatgtgccaggggttctgtgagctacctgagaatactgaagtatataatgctctggcacatagttaggcactaatcagtggtatttatcaaggtgattaaaagcagatttaaaaagcagctcacagttgggcgcggtggctcacacctgtaatcccagcactttgggaggccgaggcgggtggatcaccagaggtcagaagttcgagaccagcctggccaacgttgtgaaaccctgtctctactaaaaatacaaaaattggccacgtgtggtggcgggcacctgtaatcctagctacttgggaagctgagacaggagaattgcttgaacccgggaggtggaggttgcagtgagccaagatcatgccattgcactccagcctgggcaacaagagcgagactccatcttgaaaaaaaataaaataataaaaagcagctcatactagggaacttggtaaagcaacctcatgctgttgtaggttgaaagcctggtcagctattctgcaagacagtcaaaaattgtttacagggctggacagcatattgctattgaaaaatagctattaggagaccttgcacaatttgtgaaacattgttaggctcattgtactgtgtaaaatcaggaaagaatttgggaacatactgatacaacaaaaagataggttgtcaaaccctcacttcaccagaaagctaaattaaccagataagtctttctgaaagttttagtgtcttagtttgttcctgcgctgtaacagaataccttagactgggtaacctataaataataggaatttatttctcacagttttggaggctggcaaatgcaagatccaggtgctggtacgttcagtgtctggcaagggcggctttctggtccaagatggtgcctttttttctgcatcttccatagggaatgaacactccttatggtagaagggatggaaggaccaggctttttttttttttttttttggatacagcaggatcttgctctgtcgcccaggctggagtgcagtggcatgattaaggttcactgcagcctcaatctcccactctccagcgatcatcccacctcagcctcttggatagctgggaccacaggcacgagctaccatgcctggctaatttattttttgtagagacggggtttcgccatgttgcccaggctggtctggaatttctgacctctagcagtccacctgtttccgcctcccaaatgctgagattagaggcatgagtcactgcacccagcccgcagcctcttttataagggcattaatccccttcatgagggatattctctcatgacttaatcacctgccaaagaccccacctcttaatactacatcagtgatgggttcaatgtatcaattgggtgggagggggcacattcagaccatagcatctagtcattctggttttattaagatttattagacctgaggcatgaaaaatagcatactggatgggacttcagcatcgatgagttgccttagtaatactgttaataaaaagcactaaatatgcca

SEQ ID NO: 167511 - DNA, 806 bp, Homo sapiens
  Payload ID: 12954
  Gene Symbol: POLR2D
  Gene Name: polymerase (RNA) II (DNA directed) polypeptide D
  ENST ID: ENST00000409698
  CDS Start-End: 226-540
aaggccctgcctcagcggcggcttgggcaagccccagcgcggcgtggggctggggagggaacatggccttgggagggaccatggccttgggagggaccgcctgggcaactgggttattttatgtgataaactgcgaagttccggggacctgtgtcaaagataaacaaagccggacactcaggtgagtttgaaacagctgagacacttctaaattcagaagttcatatgcttctggaacatcgaaagcagcagaatgagagtgcagaggacgaacaggagctctcagaagtcttcatgaaaacattaaactacacagcccgtttcagtcgtttcaaaaacagagagaccattgccagtgttcgtagcttgctactccagaaaaagcttcataagtttgagttggcctgtttggccaacctttgcccagagactgctgaggagtccaaggctctaatcccaagcttggagggacggtttgaagatgaggagctgcagcagattcttgatgatatccagacaaagcgcagctttcagtattaatctccaaacatcactgctgctcggagaaaccacatccccaggcataacaccaccttcccactgtctggggctgacttgcacagaaattctgttgaagacagttgagaattcctttggagaaaacagcccagcttggcgtggggttaggttgctgtttcaaataactcacaggcccaggtgacatggaatcttggagcagccttgtgcagtggcagccagtggcttcctgaacgtgcctctgcgaagtgtgagatgaggggtcacat

SEQ ID NO: 167512 - DNA, 1758 bp, Homo sapiens
  Payload ID: 12954
  Gene Symbol: POLR2D
  Gene Name: polymerase (RNA) II (DNA directed) polypeptide D
  ENST ID: ENST00000409955
  CDS Start-End: 18-350
cgcggcgcggcgcggcgatggcggcgggtggcagcgatccgcgggctggcgacgtagaggaggacgcctcacagctcatctttcctaaagagtttgaaacagctgagacacttctaaattcagaagttcatatgcttctggaacatcgaaagcagcagaatgagagtgcagaggacgaacaggagctctcagaagtcttcatgaaaacattaaactacacagcccgtttcagtcgtttcaaaaacagagagaccattgccagtgttcgtagcttggagggacggtttgaagatgaggagctgcagcagattcttgatgatatccagacaaagcgcagctttcagtattaatctccaaacatcactgctgctcggagaaaccacatccccaggcataacaccaccttcccactgtctggggctgacttgcacagaaattctgttgaagacagttgagaattcctttggagaaaacagcccagcttggcgtggggttaggttgctgtttcaaataactcacaggcccaggtgacatggaatcttggagcagccttgtgcagtggcagccagtggcttcctgaacgtgcctctgcgaagtgtgagatgaggggtcacataaccacactgttgactacctcattcctggtttttggcctccacatcatcttttttcttaatatttcatgttttaatttcagggtgtttatactttttgaaactagaccagaagatagtagactttatagagaaagaccagttttacctagatactaaaggaagaattaaaccgctgttagtttgaaatgctttttttttttttttttaaatggagatagggtcttaactcttgtccaggctggaggagtgcagtcgtacagtcatggctcactgaagtcttgaccccgctgcctcagcctcccaaataactggggccacaggtgtgcaccacaactctcagctaatttttaaaattttttatagaggtggggttttactatgctgtccagactggtcttaaactcctgggctcaagtgatccccctgccttggcctcccaaactggtgagattacaggcatgagccaccacaactggcctgaaattcttaaaggatgggagtgtcgatgacagcaccttggcatcgttgtgcctaacctgggagacggaagaagcacgccatgggaagtgtttacacttggggacaagtgctaagtattgtggagcccatagccccttgagatagatggctactttgcctttcttcttgaactgtcttgcagaatgtggatttggggtaagtggtcttgaaggattcatttagtcaccctcaaattaagatttttacttcatctttcttgggcctgcacctccaagataacaaagaagaagcaatggtcgtgccaaagaggtccacaaccaggtgtgcactgttcactgcagcccatttgctgtatgaactgtggttgttgtgtgcccaatgacaaggctactaagaaattcatcatttgaaacgtagaggccgcagcagtcagcgatgtttctgaaatgagcatccttgacgcctgtgtacttcccaggctggatgtgaagctacattaccatgtgagttgtgccattcacagcacagtggtgaggaattgagctcatgaagcaggcaaggaccgaacacctccaccccaacgtagacctgcaggtgctgccccatgacctccaccaaagcccatataaggagcggagttgttaaggactgaagaaaaact

SEQ ID NO: 167513 - DNA, 1286 bp, Homo sapiens
  Payload ID: 12955
  Gene Symbol: POLR2E
  Gene Name: polymerase (RNA) II (DNA directed) polypeptide E, 25kDa
  ENST ID: ENST00000215587
  CDS Start-End: 60-674
gtccgcgcgggttctcgcgcggagaaggggtgcgagcggcggcggcggcggaggctgccatggacgacgaggaggagacgtaccggctctggaaaatccgcaagaccatcatgcagctgtgccacgaccgtggctatctggtgacccaggacgagcttgaccagaccctggaggagttcaaagcccaatctggggacaagccgagtgaggggcggccgcggcgcacggacctcaccgtgctggtggcccacaacgatgaccccaccgaccagatgtttgtgttctttccagaggagcccaaggtgggcatcaagaccatcaaggtgtactgccagcgcatgcaggaggagaacatcacacgggctctcatcgtggtgcagcagggcatgacaccctccgccaagcagtccctggtcgacatggcccccaagtacatcctggagcagtttctgcagcaggagctgctcatcaacatcacggagcacgagctagtccctgagcacgtcgtcatgaccaaggaggaggtgacagagctgctggcccgatataagctccgagagaaccagctgcccaggatccaggcgggggaccctgtggcgcgctactttgggataaagcgtgggcagcccctgctctctgtctctgcaggtggtgaagatcatccggcccagtgagacggctggcaggtacatcacctaccggctggtgcagtagctaccgcctgacagcccctagaggcggacacacagcgacccccatccctgcaggacaaacgcccctgccctgccagaatccggcccccacagctctcacggctgctgctcctctggactccccaaggcaggtggcctccacccacgttctcccgtcctggggtgaggcttcctgtggcccagcccgccccattcacctgtggatttgtgcgagatgcagcctcagaaggaacaaggcccccagagggaggtcacctgggggcagctggtgccgggtcttcacccagaccacgctgggtcccctctgttgggggtttggggtccgggtctcccaccagccactgcttcctcctgggccctcggccttccacccctcgtcttccctccctcgggggccctgatgcgtggcggcccccgcccggcctcggctctttactccattcacagccatgcacgcgctcaagccaccagggtgcgagatgccagctctggagttctcggttgttgtaggaggttgggtgttttcaaatggtaaagatgttttgagcaaataaatttgcttgatacagaaac

SEQ ID NO: 167514 - DNA, 1096 bp, Homo sapiens
  Payload ID: 12955
  Gene Symbol: POLR2E
  Gene Name: polymerase (RNA) II (DNA directed) polypeptide E, 25kDa
  Uniprot ID: P19388
  ENST ID: ENST00000586746
  CDS Start-End: 40-672
ggagaaggggtgcgagcggcggcggcggcggaggctgccatggacgacgaggaggagacgtaccggctctggaaaatccgcaagaccatcatgcagctgtgccacgaccgtggctatctggtgacccaggacgagcttgaccagaccctggaggagttcaaagcccaatctggggacaagccgagtgaggggcggccgcggcgcacggacctcaccgtgctggtggcccacaacgatgaccccaccgaccagatgtttgtgttctttccagaggagcccaaggtgggcatcaagaccatcaaggtgtactgccagcgcatgcaggaggagaacatcacacgggctctcatcgtggtgcagcagggcatgacaccctccgccaagcagtccctggtcgacatggcccccaagtacatcctggagcagtttctgcagcaggagctgctcatcaacatcacggagcacgagctagtccctgagcacgtcgtcatgaccaaggaggaggtgacagagctgctggcccgatataagctccgagagaaccagctgcccaggatccaggcgggggaccctgtggcgcgctactttgggataaagcgtgggcaggtggtgaagatcatccggcccagtgagacggctggcaggtacatcacctaccggctggtgcagtagctaccgcctgacagttccacaggcgcatgggccacgtttccagtgcttggtggccatgtggggctgacgtgcgaaaccttagagccgggggatacgtccgtcatcgagaacgttttcctggactgccctgggctgcaggtggacgtgacgaggtcattcgatgcctgaccgtctgcacagcctgtggtgaagaccacccgggctcccacctcgcggggccccgtggcggggggttcccttcctcacacatccctcccctagggggaggcccagggccacgccacggggctctctctgtcccctccctggccccttcttctaagcttgcagctgccacagaaaatcttctaagcttgcagctgccacagaaaacacccgattaaaaactttttatttcagcaaaataaacgtgcctgtgaaagaa

SEQ ID NO: 167515 - DNA, 1214 bp, Homo sapiens
  Payload ID: 12955
  Gene Symbol: POLR2E
  Gene Name: polymerase (RNA) II (DNA directed) polypeptide E, 25kDa
  ENST ID: ENST00000591767
  CDS Start-End: 22-228
gcggcggcggcggaggctgccatggacgacgaggaggagacgtaccggctctggaaaatccgcaagaccatcatgcaggtgagcagcgggtcccgggggagttccggtgaagccaccagagcacctgccgaggagccggtcgctagcacccacccccactcgcctggtgcccagcatttgtctctctgcccagtctgggaggaaaactcccctccccttccttgctaggagcccaaggtgggcatcaagaccatcaaggtgtactgccagcgcatgcaggaggagaacatcacacgggctctcatcgtggtgcagcagggcatgacaccctccgccaagcagtccctggtcgacatggcccccaagtacatcctggagcagtttctgcagcaggagctgctcatcaacatcacggagcacgagctagtccctgagcacgtcgtcatgaccaaggaggaggtgacagagctgctggcccgatataagctccgagagaaccagctgcccaggatccaggcgggggaccctgtggcgcgctactttgggataaagcgtgggcaggtggtgaagatcatccggcccagtgagacggctggcaggtacatcacctaccggctggtgcagtagctaccgcctgacagcccctagaggcggacacacagcgacccccatccctgcaggacaaacgcccctgccctgccagaatccggcccccacagctctcacggctgctgctcctctggactccccaaggcaggtggcctccacccacgttctcccgtcctggggtgaggcttcctgtggcccagcccgccccattcacctgtggatttgtgcgagatgcagcctcagaaggaacaaggcccccagagggaggtcacctgggggcagctggtgccgggtcttcacccagaccacgctgggtcccctctgttgggggtttggggtccgggtctcccaccagccactgcttcctcctgggccctcggccttccacccctcgtcttccctccctcgggggccctgatgcgtggcggcccccgcccggcctcggctctttactccattcacagccatgcacgcgctcaagccaccagggtgcgagatgccagctctggagttctcggttgttgtaggaggttgggtgttttcaaatggtaaagatgttttgagcaaataaatttgcttgatacagaaaccaggccgactaacaa

SEQ ID NO: 167516 - DNA, 1105 bp, Homo sapiens
  Payload ID: 12955
  Gene Symbol: POLR2E
  Gene Name: polymerase (RNA) II (DNA directed) polypeptide E, 25kDa
  ENST ID: ENST00000589737
  CDS Start-End: 61-216
agtccgcgcgggttctcgcgcggagaaggggtgcgagcggcggcggcggcggaggctgccatggacgacgaggaggagacgtaccggctctggaaaatccgcaagaccatcatgcagaggagcccaaggtgggcatcaagaccatcaaggtgtactgccagcgcatgcaggaggagaacatcacacgggctctcatcgtggtgcagcagggcatgacaccctccgccaagcagtccctggtcgacatggcccccaagtacatcctggagcagtttctgcagcaggagctgctcatcaacatcacggagcacgagctagtccctgagcacgtcgtcatgaccaaggaggaggtgacagagctgctggcccgatataagctccgagagaaccagctgcccaggatccaggcgggggaccctgtggcgcgctactttgggataaagcgtgggcaggtggtgaagatcatccggcccagtgagacggctggcaggtacatcacctaccggctggtgcagtagctaccgcctgacagcccctagaggcggacacacagcgacccccatccctgcaggacaaacgcccctgccctgccagaatccggcccccacagctctcacggctgctgctcctctggactccccaaggcaggtggcctccacccacgttctcccgtcctggggtgaggcttcctgtggcccagcccgccccattcacctgtggatttgtgcgagatgcagcctcagaaggaacaaggcccccagagggaggtcacctgggggcagctggtgccgggtcttcacccagaccacgctgggtcccctctgttgggggtttggggtccgggtctcccaccagccactgcttcctcctgggccctcggccttccacccctcgtcttccctccctcgggggccctgatgcgtggcggcccccgcccggcctcggctctttactccattcacagccatgcacgcgctcaagccaccagggtgcgagatgccagctctggagttctcggttgttgtaggaggttgggtgttttcaaatggtaaagatgttttgagcaaataaatttgcttgatacagaaaccaggccgactaacaa

SEQ ID NO: 167517 - DNA, 2831 bp, Homo sapiens
  Payload ID: 12955
  Gene Symbol: POLR2E
  Gene Name: polymerase (RNA) II (DNA directed) polypeptide E, 25kDa
  Uniprot ID: P19388
  ENST ID: ENST00000615234
  CDS Start-End: 43-675
cgcggagaaggggtgcgagcggcggcggcggcggaggctgccatggacgacgaggaggagacgtaccggctctggaaaatccgcaagaccatcatgcagctgtgccacgaccgtggctatctggtgacccaggacgagcttgaccagaccctggaggagttcaaagcccaatctggggacaagccgagtgaggggcggccgcggcgcacggacctcaccgtgctggtggcccacaacgatgaccccaccgaccagatgtttgtgttctttccagaggagcccaaggtgggcatcaagaccatcaaggtgtactgccagcgcatgcaggaggagaacatcacacgggctctcatcgtggtgcagcagggcatgacaccctccgccaagcagtccctggtcgacatggcccccaagtacatcctggagcagtttctgcagcaggagctgctcatcaacatcacggagcacgagctagtccctgagcacgtcgtcatgaccaaggaggaggtgacagagctgctggcccgatataagctccgagagaaccagctgcccaggatccaggcgggggaccctgtggcgcgctactttgggataaagcgtgggcaggtggtgaagatcatccggcccagtgagacggctggcaggtacatcacctaccggctggtgcagtagctaccgcctgacagcccctagaggcggacacacagcgacccccatccctgcaggacaaacgcccctgccctgccagaatccggcccccacagctctcacggctgctgctcctctggactccccaaggcaggtggcctccacccacgttctcccgtcctggggtgaggcttcctgtggcccagcccgccccattcacctgtggatttgtgcgagatgcagcctcagaaggaacaaggcccccagagggaggtcacctgggggcagctggtgccgggtcttcacccagaccacgctgggtcccctctgttgggggtttggggtccgggtctcccaccagccactgcttcctcctgggccctcggccttccacccctcgtcttccctccctcgggggccctgatgcgtggcggcccccgcccggcctcggctctttactccattcacagccatgcacgcgctcaagccaccagggtgcgagatgccagctctggagttctcggttgttgtaggaggttgggtgttttcaaatggtaaagatgttttgagcaaataaatttgcttgatacagaaaccaggccgactaacaaggtttccagcaggtggccttgcctcaccccaagcacacgaggtcagcctggcaggtgtgccctcctcgcgctggcttcaggggtcagtgtctccccaggccctcgccctgccctcccacttcgtgctcctgggtaaggcgtgagcgtgtctgtctcttcccttcccgtgagggtgtggagttgttctctggcttgtgcagctgtggtttgcggccagttcctcttacagacgtttgggatctggctctacttccccgtttgcttactgtctgatttcagaaggcctcgcctgcccaagtttaacctagccacgtggttctctcacagtagctttattaagatgtaattcaccctcgggcggtcggtggtctgtaacgcgcccactgttctgtgcagcagggtccccagatccccaggccgcggactgtgtgtgtgatggggacagtgcttccccttctctccaaatgtacttttttcaaaattgtcttggccaaagcaagccagacccaaagggacaaacactgatgtcactcctaggaggtcactagagtcgtcagagactggaagtaggatgggggttcccgggactggggagttgggtggggatgggggttcccagggctggggaggagggaggggacagagtgtgtcatgtgcacagttttagtttgggaagatgagaaaattctggaggtggccgggcgcggtggctcacgcctgtaatcccagcactttgggaggccgaggtgggcggatcacctgaggtcgggagttcgagaccagcctgaccaacatggcaaaatcccatcactgcaaaaaatacaaaaattacctgggcgtggtggtgcatgcctgtaatcccagctacttgggagctaaggcaggagaatcacttgaacccaggaagtggaggatcgcttgagctcaggagttaaaagaccagcccgggcaacacagagaaaccccccacctctacaaaaaactttaagattacctgggcacagtggctcacacctgtaatcccaacactttgggaggctgaggcgggaggatcatttgagcccaggaggccgaggctgcagtgagctacgattgtgctcctgtactccagcctgggccacagggtcacaccctgtctcaaaaaaaaaaaaaaatgcagttccacaggcgcatgggccacgtttccagtgcttggtggccatgtggggctgacgtgcgaaaccttagagccgggggatacgtccgtcatcgagaacgttttcctggactgccctgggctgcaggtggacgtgacgaggtcattcgatgcctgaccgtctgcacagcctgtggtgaagaccacccgggctcccacctcgcggggccccgtggcggggggttcccttcctcacacatccctcccctagggggaggcccagggccacgccacggggctctctctgtcccctccctggccccttcttctaagcttgcagctgccacagaaaatcttctaagcttgcagctgccacagaaaacacccgattaaaaactttttatttcagcaaaataaacgtgcctgtgaaagaa

SEQ ID NO: 167518 - DNA, 1052 bp, Homo sapiens
  Payload ID: 12955
  Gene Symbol: POLR2E
  Gene Name: polymerase (RNA) II (DNA directed) polypeptide E, 25kDa
  ENST ID: ENST00000590060
  CDS Start-End: 1-252
cctgcctcagcctcccaaagtgctaggattacagaggagcccaaggtgggcatcaagaccatcaaggtgtactgccagcgcatgcaggaggagaacatcacacgggctctcatcgtggtgcagcagggcatgacaccctccgccaagcagtccctggtcgacatggcccccaagtacatcctggagcagtttctgcagcaggagctgctcatcaacatcacggagcacgagtccctgagcacgtcgtcatgaccaaggaggaggtgacagagctgctggcccgatataagctccgagagaaccagctgcccaggatccaggcgggggaccctgtggcgcgctactttgggataaagcgtgggcaggtggtgaagatcatccggcccagtgagacggctggcaggtacatcacctaccggctggtgcagtagctaccgcctgacagcccctagaggcggacacacagcgacccccatccctgcaggacaaacgcccctgccctgccagaatccggcccccacagctctcacggctgctgctcctctggactccccaagaaaccaggccgactaacaaggtttccagcaggtggccttgcctcaccccaagcacacgaggtcagcctggcaggtgtgccctcctcgcgctggcttcagggttccacaggcgcatgggccacgtttccagtgcttggtggccatgtggggctgacgtgcgaaaccttagagccgggggatacgtccgtcatcgagaacgttttcctggactgccctgggctgcaggtggacgtgacgaggtcattcgatgcctgaccgtctgcacagcctgtggtgaagaccacccgggctcccacctcgcggggccccgtggcggggggttcccttcctcacacatccctcccctagggggaggcccagggccacgccacggggctctctctgtcccctccctggccccttcttctaagcttgcagctgccacagaaaatcttctaagcttgcagctgccacagaaaacacccgattaaaaactttttatttcagcaaaataaa

SEQ ID NO: 167519 - DNA, 932 bp, Homo sapiens
  Payload ID: 12955
  Gene Symbol: POLR2E
  Gene Name: polymerase (RNA) II (DNA directed) polypeptide E, 25kDa
  ENST ID: ENST00000619917
  CDS Start-End: 52-606
gggttctcgcgcggagaaggggtgcgagcggcggcggcggcggaggctgccatggacgacgaggaggagacgtaccggctctggaaaatccgcaagaccatcatgcagctgtgccacgaccgtggctatctggtgacccaggacgagcttgaccagaccctggaggagttcaaagcccaatctggggacaagccgagtgaggggcggccgcggcgcacggacctcaccgtgctggtggcccacaacgatgaccccaccgaccagatgtttgtgttctttccagaggagcccaaggtgggcatcaagaccatcaaggtgtactgccagcgcatgcaggaggagaacatcacacgggctctcatcgtggtgcagcagggcatgacaccctccgccaagcagctagtccctgagcacgtcgtcatgaccaaggaggaggtgacagagctgctggcccgatataagctccgagagaaccagctgcccaggatccaggcgggggaccctgtggcgcgctactttgggataaagcgtgggcaggtggtgaagatcatccggcccagtgagacggctggcaggtacatcacctaccggctggtgcacccctagaggcggacacacagcgacccccatccctgcaggacaaacgcccctgccctgccagaatccggcccccacagctctcacggctgctgctcctctggactccccaaggcaggtggcctccacccacgttctcccgtcctggggtgaggcttcctgtggcccagcccgccccattcacctgtggatttgtgcgagatgcagcctcagaaggaacaaggcccccagagggaggtcacctgggggcagctggtgccgggtcttcacccagaccacgctgggtcccctctgttgggggtttggggtccgggtctcccaccagccactgcttc

SEQ ID NO: 167520 - DNA, 487 bp, Homo sapiens
  Payload ID: 12955
  Gene Symbol: POLR2E
  Gene Name: polymerase (RNA) II (DNA directed) polypeptide E, 25kDa
  ENST ID: ENST00000585838
  CDS Start-End: 1-404
cagaggagcccaaggtgggcatcaagaccatcaaggtgtactgccagcgcatgcaggaggagaacatcacacgggctctcatcgtggtgcagcagggcatgacaccctccgccaagcagtccctggtcgacatggcccccaagtacatcctggagcagtttctgcagcaggagctgctcatcaacatcacggagcacgagctagtccctgagcacgtcgtcatgaccaaggaggaggtgacagagctgctggcccgatataagctccgagagaaccagctgcccaggatccaggcgggggaccctgtggcgcgctactttgggataaagcgtgggcaggtggtgaagatcatccggcccagtgagacggctggcaggtacatcacctaccggctggtgcagtagctaccgcctgacagaggcggacacacagcgacccccatccctgcaggacaaacgcccctgccctgccagaatccggcccccac

SEQ ID NO: 167521 - DNA, 1749 bp, Homo sapiens
  Payload ID: 12955
  Gene Symbol: POLR2E
  Gene Name: polymerase (RNA) II (DNA directed) polypeptide E, 25kDa
  Uniprot ID: P19388
  ENST ID: ENST00000612655
  CDS Start-End: 66-698
ggcgcagtccgcgcgggttctcgcgcggagaaggggtgcgagcggcggcggcggcggaggctgccatggacgacgaggaggagacgtaccggctctggaaaatccgcaagaccatcatgcagctgtgccacgaccgtggctatctggtgacccaggacgagcttgaccagaccctggaggagttcaaagcccaatctggggacaagccgagtgaggggcggccgcggcgcacggacctcaccgtgctggtggcccacaacgatgaccccaccgaccagatgtttgtgttctttccagaggagcccaaggtgggcatcaagaccatcaaggtgtactgccagcgcatgcaggaggagaacatcacacgggctctcatcgtggtgcagcagggcatgacaccctccgccaagcagtccctggtcgacatggcccccaagtacatcctggagcagtttctgcagcaggagctgctcatcaacatcacggagcacgagctagtccctgagcacgtcgtcatgaccaaggaggaggtgacagagctgctggcccgatataagctccgagagaaccagctgcccaggatccaggcgggggaccctgtggcgcgctactttgggataaagcgtgggcaggtggtgaagatcatccggcccagtgagacggctggcaggtacatcacctaccggctggtgcagtagctaccgcctgacaggacaaacgcccctgccctgccagaatccggcccccacagctctcacggctgctgctcctctggactccccaaggcaggtggcctccacccacgttctcccgtcctggggtgaggcttcctgtggcccagcccgccccattcacctgtggatttgtgcgagatgcagcctcagaaggaacaaggcccccagagggaggtcacctgggggcagctggtgccgggtcttcacccagaccacgctgggtcccctctgttgggggtttggggtccgggtctcccaccagccactgcttcctcctgggccctcggccttccacccctcgtcttccctccctcgggggccctgatgcgtggcggcccccgcccggcctcggctctttactccattcacagccatgcacgcgctcaagccaccagggtgcgagatgccagctctggagttctcggttgttgtaggaggttgggtgttttcaaatggtaaagatgttttgagcaaataaatttgcttgatacagaaaccaggccgactaacaaggtttccagcaggtggccttgcctcaccccaagcacacgaggtcagcctggcaggtgtgccctcctcgcgctggcttcaggggtcagtgtctccccaggccctcgccctgccctcccacttcgtgctcctgggtaaggcgtgagcgtgtctgtctcttcccttcccgtgagggtgtggagttgttctctggcttgtgcagctgtggtttgcggccagttcctcttacagacgtttgggatctggctctacttccccgtttgcttactgtctgatttcagaaggcctcgcctgcccaagtttaacctagccacgtggttctctcacagtagctttattaagatgtaattcaccctcgggcggtcggtggtctgtaacgcgcccactgttctgtgcagcagggtccccagatccccaggccgcggactgtgtgtgtgatggggacagtgcttccccttctctccaaatgtacttttttcaaaattgtcttggccaaagcaagcca

SEQ ID NO: 167522 - DNA, 811 bp, Homo sapiens
  Payload ID: 12956
  Gene Symbol: POLR2F
  Gene Name: polymerase (RNA) II (DNA directed) polypeptide F
  ENST ID: ENST00000333418
  CDS Start-End: 1-436
ctggatggacagagggacgagggacgagcatctgccgtcgtgtcccggctgccctgcagtcgcctccaacacccgctgctgcccgcccgctgcctgcctgcctggcatctctctctcccgggctgggaccgtctcttctccctcctgtcttctacatgggatggactcaggagcgctcaacagatgctctgaaatcaatgactctgaatctagaagtcaaccggagaatgtgctcctcagagggccctggaatcttcccctcgtgcacttgggtttcagtttgctgaataagacggactctgctgcctgctcttcagagaaggttttggtggaggactcccctcaggtgcccctgcctggatcccccactgccccagaaggctggccttcagatgcctgggtagctggcttgcttgacccaagcatggacaagtgagaacagatgaaagaggccagcagacccaggacccagccctttctctgccaccagccagcactcactctgctgtgtgacctgagaccaggcagaccatctctctgggtctcagtttccccctctataacaccaggggctggtcttcatgatcccagggccctccccagctgtgcccatctgcaactgtgagattctgagagcagaggagggaaggcgggatggcccctctttccccaccgcctctctctgtcccccagggtcaccccaaagccgccccctcccccggctccctggaacttccctgcagctgcaggcctggtgagacaattgggtgttttagagaaatacatttttgggctaatttgccatgcataa

SEQ ID NO: 167523 - DNA, 560 bp, Homo sapiens
  Payload ID: 12956
  Gene Symbol: POLR2F
  Gene Name: polymerase (RNA) II (DNA directed) polypeptide F
  ENST ID: ENST00000405557
  CDS Start-End: 78-458
gcgcgagtcgtagtgtcgctgtttgcgggtctccgcgcgggaccggggcgcagcggggtcgctgaggcgagggtgtcatgtcagacaacgaggacaattttgatggcgacgactttgatgatgtggaggaggatgaagggctagatgacttggagaatgccgaagaggaaggccaggagaatgtcgagatcctcccctctggggagcgaccgcaggccaaccagaagcgaatcaccacaccatacatgaccaagtacgagcgagcccgcgtgctgggcacccgagcgctccagattgcgatgtgtgcccctgtgatggtggagctggagggggagacagatcctctgctcattgccatgaaggaactcaaacttctctgggggctggaatacacagtgctgagaccctcctacgcactggcccacagcctaggctctttcagcatctcctcccgctgacttctcccgacagtcctgctgggtggatatcatcaccccattgtacagatgcataaactgagcccaggttgctgatggtctcacccgagctgaacacaggat

SEQ ID NO: 167524 - DNA, 582 bp, Homo sapiens
  Payload ID: 12956
  Gene Symbol: POLR2F
  Gene Name: polymerase (RNA) II (DNA directed) polypeptide F
  ENST ID: ENST00000407936
  CDS Start-End: 92-568
ataagctaggagccgcgcgagtcgtagtgtcgctgtttgcgggtctccgcgcgggaccggggcgcagcggggtcgctgaggcgagggtgtcatgtcagacaacgaggacaattttgatggcgacgactttgatgatgtggaggaggatgaagggctagatgacttggagaatgccgaagaggaaggccaggagaatgtcgagatcctcccctctggggagcgaccgcaggccaaccagaagcgaatcaccacaccatacatgaccaagtacgagcgagcccgcgtgctgggcacccgagcgctccagattgcgatgtgtgcccctgtgatggtggagctggagggggagacagatcctctgctcattgccatgaaggaactcaacgcccgctcggcctcagaaccgcccggagaggagccgccctggatggacagagggacgagggacgagcatctgccgtcgtgtcccggctgccctgcagtcgcctccaacacccgctgctgcccgcccgctgcctgcctgcctggcatctctctctcccggaggcggcggctcagagaggagtgactcgcctgaagccc

SEQ ID NO: 167525 - DNA, 883 bp, Homo sapiens
  Payload ID: 12956
  Gene Symbol: POLR2F
  Gene Name: polymerase (RNA) II (DNA directed) polypeptide F
  ENST ID: ENST00000427034
  CDS Start-End: 1-281
ggacagagggacgagggacgagcatctgccgtcgtgtcccggctgccctgcagtcgcctccaacacccgctgctgcccgcccgctgcctgcctgcctggcatctctctctcccgggctgggaccgtctcttctccctcctgtcttctacatgggatggactcaggagcgctcaacagatgctctgaaatcaatgactctgaatctagaagtcaaccggagaatgtgctcctcagagggccctggaatcttcccctcgtgcacttgggtttcagtttgctgaataagacggactctgctgcctgctcttcagagaaggttttggtggaggactcccctcaggtgcccctgcctggatcccccactgccccagaaggctggccttcagatgcctggtaggcgggcaccaggttggggaggaggcttggttggtgccttgtccatcctcctgagcactgaagccctgaataggcagcttctgagcagaacactcaatttccctctctttccctcctgcccagggtagctggcttgcttgacccaagcatggacaagtgagaacagatgaaagaggccagcagacccaggacccagccctttctctgccaccagccagcactcactctgctgtgtgacctgagaccaggcagaccatctctctgggtctcagtttccccctctataacaccaggggctggtcttcatgatcccagggccctccccagctgtgcccatctgcaactgtgagattctgagagcagaggagggaaggcgggatggcccctctttccccaccgcctctctctgtcccccagggtcaccccaaagccgccccctcccccggctccctggaacttccctgcagctgcaggcctggtgagacaa

SEQ ID NO: 167526 - DNA, 2106 bp, Homo sapiens
  Payload ID: 12956
  Gene Symbol: POLR2F
  Gene Name: polymerase (RNA) II (DNA directed) polypeptide F
  Uniprot ID: P61218
  ENST ID: ENST00000442738
  CDS Start-End: 126-509
agtgatttcctctgggttacggcgcaggcgcaagataagctaggagccgcgcgagtcgtagtgtcgctgtttgcgggtctccgcgcgggaccggggcgcagcggggtcgctgaggcgagggtgtcatgtcagacaacgaggacaattttgatggcgacgactttgatgatgtggaggaggatgaagggctagatgacttggagaatgccgaagaggaaggccaggagaatgtcgagatcctcccctctggggagcgaccgcaggccaaccagaagcgaatcaccacaccatacatgaccaagtacgagcgagcccgcgtgctgggcacccgagcgctccagattgcgatgtgtgcccctgtgatggtggagctggagggggagacagatcctctgctcattgccatgaaggaactcaaggcccgaaagatccccatcatcattcgccgttacctgccagatgggagctatgaagactggggggtggacgagctcatcatcaccgactgagctggagtcatcttcctgcccttgccccatgcccaattttcattctcactttatatgtgtaaataataaaatattcaactttccaacccccttcccctctgcttatctgcaatgtcaccacctgttgcttccccgttaccgccatgctgcgtggagcatgcacctattccagtggccctgtgactgtcagctccttaagaagcaccaggggcccttagcccctttggatcccccacatccttccctccatctccctgttccccagagcaaaggctgctgcaggggagacacctcagctgccttccaagcagacagacaagtctttgtgcccagggagctggttgccacggaaacccccaatttcctttccagtggggactggctgcaggggcttctcccttctcaggagtatcacagagcaggtctcatcaagccacccattgtttcctaaggacctgcttcgagcctcttatcgtgggctcggatcccctttcaggagcagtgccccagcaggaagcgtgggggtgtgctgatctcccaccctccccaggcagagccctgctgggcaagtcagcagctggagcaaggaccgagcacctgcctacccctgcccccatggctctgtccccactcctcctcaggactctgcccacacgctgtcctctgtggcccacctctttggtgtgccacacccatgccttcttcctagcctctataagatatcctttccctcctatttggggctggtgatcccctgaggccttggggacatggtgctggggtggtggtgctcctgggttccaggtgttacattaagtcagagctggagttcccccttcctctgcctgaggttctaatgggtcctcttcctttctccaccctgcttacccaacctgaggtaagaccagtcacactggctcctccctcctagagggggtcagggggagggtgtatattgacatgaacagggatagagggtaaactggctccctgaatatgccagccttaacctccattccactgccagctccccttcaaagaggaggagctgggcttccctaacctctgcaggaggcagggcctccaggcctaggtgcagcctggccctgggatgggatgtggggagtgaatggtgaggatctgcattggtgggaggggtgtccgctgccctggagaagggttaattcagggagcagtggacttcacactcccatccaccctcctccaagcctgtggaatcctttaatcaagttgggtgctgaaatttcagctctgaaatgccgcctttgtgctggcatccaggcagccgccccagagtgcgggggtcactttctcggccccatttctctaaatggtctctttgttccctgctgggctgctcagtatcagatgtgattaaagggagatggggtttgggctggggaggaggggaattgggggttaacccttaggggatagagtgcaagggaaatgggacagaaggggtgtttttcctcctgtcttcctcttcccattctcctcttttggggagtcccctgctattcagctgtctgggcctggcttttgacttctcttgaataaaatgtcccggtcacca

SEQ ID NO: 167527 - DNA, 1890 bp, Homo sapiens
  Payload ID: 12956
  Gene Symbol: POLR2F
  Gene Name: polymerase (RNA) II (DNA directed) polypeptide F
  ENST ID: ENST00000443002
  CDS Start-End: 90-425
aagctaggagccgcgcgagtcgtagtgtcgctgtttgcgggtctccgcgcgggaccggggcgcagcggggtcgctgaggcgagggtgtcatgtcagacaacgaggacaattttgatggcgacgactttgatgatgtggaggaggatgaagggctagatgacttggagaatgccgaagaggaaggccaggagaatgtcgagatcctcccctctggggagcgaccgcaggccaaccagaagcgaatcaccacaccatacatgaccaagtacgagcgagcccgcgtgctgggcacccgagcgctccagattgcgatgtgtgcccctgtgatggtggagctggagggggagacagatcctctgctcattgccatgaaggaactcaactacttccagaaagcatttgaggaagcaccagtacagggataagagatgaagagacaggccaggtcaggctcaccaagcaggcagccctttctgccccatcctgcacagtaagagagacttctcagggatccctctgagaagtgcagagccccagcttgacccctggtcccttctctgcagacacccagcacacgcgcgttctggtctggttcaaggtggaaacacaagactaaagctgccaggaggccaaggtgaacggcaatcatgtgattaacacacacacacataaaaagctttttaacagcgcccgctcggcctcagaaccgcccggagaggagccgccctggatggacagagggacgagggacgagcatctgccgtcgtgtcccggctgccctgcagtcgcctccaacacccgctgctgcccgcccgctgcctgcctgcctggcatctctctctcccggtcccggatttactcagaagatgggccccagagaggaggagaggaaaggaatacctgtcagtcaaacgtgaagcccactgatgacactgcctggcagagctgcctccggtcagcagtgacccttcaccccccagctcccaagtcctcttcctgagggagctggtccggctttatggaaggctccgcctgtgttcccccactgggtccctggtccctcacctgtcacgtggggcgatggtcaccctccctccctgcctgccctgaaggatacactgagatgaaggtcaggaaatctgctggctgcagaaccaggggccatgcaggagtgagggatggtctggtcaagttgaggctctgccccagcctcagtttccccacacaggcatgagactgtcttcctgactttcagaggacagggctgagatgggatgagggaacacagggaaagcgtttagcacctctgagtgctgtgtggatgcgacctggggggtcctggcctccactctttaattctatctggactgtgtgccctcctacctccagtttccctgcgggggcctttcacagggcctggcttgcggatacggggtttggcgtagggcagtgcttctcaaatgggaaggcgcactgggattcttcaggttggggtggggcctgaggttctgcatttctaatcagttgcctaggactggctctaattcttgttgaatttacaatcacttgtggagttaagaaaaacatactgggccttggttgggtgtggtggctcacacctgtaatcccagcactttgggaggccaaggtgggcagatcatgaggtcgagagattgagaccatcctggccaacatggtgaaaccttgtctctactaaaaaaaaaaaaaaaaaaaaattagctgggcatggtggcaggcgcctgtaatcccagctacttgggaggctgaggcaggagaatcacttgaacccgggaggtggaggttgcagtgagctgagattgcaccattgcactccagcctgggcaaaaagagcgaaactctgtctcaaaa

SEQ ID NO: 167528 - DNA, 518 bp, Homo sapiens
  Payload ID: 12956
  Gene Symbol: POLR2F
  Gene Name: polymerase (RNA) II (DNA directed) polypeptide F
  ENST ID: ENST00000460648
  CDS Start-End: 92-316
ataagctaggagccgcgcgagtcgtagtgtcgctgtttgcgggtctccgcgcgggaccggggcgcagcggggtcgctgaggcgagggtgtcatgtcagacaacgaggacaattttgatggcgacgactttgatgatgtggaggaggatgaagggctagatgacttggagaatgccgaagaggtcagtattcagcctcaggctcccacctctgcagcccaagctgccaaatcgtctgacaggatgtgtgcccctgtgatggtggagctggagggggagacagatcctctgctcattgccatgaaggaactcaagtaagtcactcaaatcatggttcacttctccaaatctctgggaggcatctgttgggctctctgttgcaccctttgctcccacttgcctggctggagaagttgatgcttattcctacagatccttaggaacagctcaccaggaagtaggaggaagagagaagaggaggcagggaaagtgggagggcactgatgagacatggacgtct

SEQ ID NO: 167529 - DNA, 564 bp, Homo sapiens
  Payload ID: 12956
  Gene Symbol: POLR2F
  Gene Name: polymerase (RNA) II (DNA directed) polypeptide F
  ENST ID: ENST00000488684
  CDS Start-End: 90-320
aagctaggagccgcgcgagtcgtagtgtcgctgtttgcgggtctccgcgcgggaccggggcgcagcggggtcgctgaggcgagggtgtcatgtcagacaacgaggacaattttgatggcgacgactttgatgatgtggaggaggatgaagggctagatgacttggagaatgccgaagaggtcagtattcagcctcaggctcccacctctgcagcccaagctgccaaatcgtctgacaggaaggccaggagaatgtcgagatcctcccctctggggagcgaccgcaggccaaccagaagcgaatcaccacaccatacatgaccaagtacgagcgagcccgcgtgctgggcacccgagcgctccagattgcgatgtgtgcccctgtgatggtggagctggagggggagacagatcctctgctcattgccatgaaggaactcaagtaagtcactcaaatcatggttcacttctccaaatctctgggaggcatctgttgggctctctgttgcaccctttgctcccacttgcctggctggagaagttgatgcttattcctacagatcct

SEQ ID NO: 167530 - DNA, 550 bp, Homo sapiens
  Payload ID: 12956
  Gene Symbol: POLR2F
  Gene Name: polymerase (RNA) II (DNA directed) polypeptide F
  ENST ID: ENST00000492213
  CDS Start-End: 215-550
aagctaggagccgcgcgagtcgtagtgtcgctgtttgcgggtctccgcgcgggaccggggcgcagcggggtcgctgaggcgagggtgtcatgtcagacaacgaggacaattttgatggcgacgactttgatgatgtggaggaggatgaagggctagatgacttggagaatgccgaagagttttagtagtgacggggttcaccgtgttagccaggatggtctcgatctcctgccttgtgatccgcccgcctcggcctcccaaagtgctgggattacaggaaggccaggagaatgtcgagatcctcccctctggggagcgaccgcaggccaaccagaagcgaatcaccacaccatacatgaccaagtacgagcgagcccgcgtgctgggcacccgagcgctccagattgcgatgtgtgcccctgtgatggtggagctggagggggagacagatcctctgctcattgccatgaaggaactcaaggcccgaaagatccccatcatcattcgccgttacctgccagatgggagctatgaagactggggggtggac

SEQ ID NO: 167531 - DNA, 584 bp, Homo sapiens
  Payload ID: 12956
  Gene Symbol: POLR2F
  Gene Name: polymerase (RNA) II (DNA directed) polypeptide F
  ENST ID: ENST00000470701
  CDS Start-End: 130-498
cgctgtttgcgggtctccgcgcgggaccggggcgcagcggggtcgctgaggcgagggtgtcatgtcagacaacgaggacaagtgagtgcgggagcggagtggcctttgcggcaaccttggaaggggcggatgagttttgatggcgacgactttgatgatgtggaggaggatgaagggctagatgacttggagaatgccgaagaggaaggccaggagaatgtcgagatcctcccctctggggagcgaccgcaggccaaccagaagcgaatcaccacaccatacatgaccaagtacgagcgagcccgcgtgctgggcacccgagcgctccagattgcgatgtgtgcccctgtgatggtggagctggagggggagacagatcctctgctcattgccatgaaggaactcaaggcccgaaagatccccatcatcattcgccgttacctgccagatgggagctatgaagactggggggtggacgagctcatcatcaccgactgagctggagtcatcttcctgcccttgccccatgcccaattttcattctcactttatatgtgtaaataataaaatattcaactttccaa

SEQ ID NO: 167532 - DNA, 615 bp, Homo sapiens
  Payload ID: 12956
  Gene Symbol: POLR2F
  Gene Name: polymerase (RNA) II (DNA directed) polypeptide F
  ENST ID: ENST00000483713
  CDS Start-End: 90-320
aagctaggagccgcgcgagtcgtagtgtcgctgtttgcgggtctccgcgcgggaccggggcgcagcggggtcgctgaggcgagggtgtcatgtcagacaacgaggacaattttgatggcgacgactttgatgatgtggaggaggatgaagggctagatgacttggagaatgccgaagaggtcagtattcagcctcaggctcccacctctgcagcccaagctgccaaatcgtctgacaggaaggccaggagaatgtcgagatcctcccctctggggagcgaccgcaggccaaccagaagcgaatcaccacaccatacatgaccaagtacgagcgagcccgcgtgctgggcacccgagcgctccagattgcgatgtgtgcccctgtgatggtggagctggagggggagacagatcctctgctcattgccatgaaggaactcaaggcccgaaagatccccatcatcattcgccgttacctgccagatgggagctatgaagactggggggtggacgagctcatcatcaccgactgagctggagtcatcttcctgcccttgccccatgcccaattttcattctcactttatatgtgtaaataataaaatattcaactttc

SEQ ID NO: 167533 - DNA, 760 bp, Homo sapiens
  Payload ID: 12956
  Gene Symbol: POLR2F
  Gene Name: polymerase (RNA) II (DNA directed) polypeptide F
  ENST ID: ENST00000606538
  CDS Start-End: 78-374
gcgcgagtcgtagtgtcgctgtttgcgggtctccgcgcgggaccggggcgcagcggggtcgctgaggcgagggtgtcatgtcagacaacgaggacaattttgatggcgacgactttgatgatgtggaggaggatgaagggctagatgacttggagaatgccgaagaggaaggccaggagaatgtcgagatcctcccctctggggagcgaccgcaggccaaccagaagcgaatcaccacaccatacatgaccaagtacgagcgagcccgcgtgctgggcacccgagcgctccagattgcgatgtgtgcccctgtgatggtggagctggagggggagacagatcctctgctcattgccatgaaggaactcaagtaagtcactcaaatcatggttcacttctccaaatctctgggaggcatctgttgggctctctgttgcaccctttgctcccacttgcctggctggagaagttgatgcttattcctacagatccttaggaacagctcaccaggaagtaggaggaagagagaagaggaggcagggaaagtgggagggcactgatgagacatggacgtcttctggctgttggaatttccctgttcctgctgcaggaggccttaccaatattctgtcattcttccccctcttgtctgatataaaaactttctttttcttgtaattgctttcttacaaagtacactcatcagccccaagaggctgctcctaagacttctctttgcttgtgttttgcacacaatctg

SEQ ID NO: 167534 - DNA, 827 bp, Homo sapiens
  Payload ID: 12957
  Gene Symbol: POLR2G
  Gene Name: polymerase (RNA) II (DNA directed) polypeptide G
  Uniprot ID: P62487
  ENST ID: ENST00000301788
  CDS Start-End: 106-624
agtcgcagcaagcgcggaactggggttgcggcgtctaagtgtttccggtggattcccagggactgtcggaggtgtggactctgcctgcctacctggtctgggaagatgttctaccatatctccctagagcacgaaatcctgctgcacccgcgctacttcggccccaacttgctcaacacggtgaagcagaagctcttcaccgaggtggaggggacctgcacagggaagtatggctttgtaattgctgtcaccaccattgacaatattggtgctggtgtgatccagccaggccgaggctttgtcctttatccagttaagtacaaggccattgttttccggccatttaaaggggaggtcgtggatgctgttgtcactcaggtcaacaaggttggactcttcacagaaattgggcccatgtcttgcttcatctctcgacattccatcccttcagagatggagtttgatcctaactccaacccaccatgttacaagacaatggatgaggatattgtgattcagcaggacgatgagatccgcttaaagattgtggggacccgtgtggacaagaatgacatttttgctattggctccctgatggacgattacttggggcttgtaagctgagcctggtggcctcctacccttggtcctactctaggaagtgtgattgtcacacttatcatgttgtccagaggtccagtctggctgctgttgtggaggcaaggaaggcaactcatcccagaaggcatctggtgcttcttgtagcttaactactgcctcctcatttttcagtatgtgttctaagtataaaaagtccttggttctca

SEQ ID NO: 167535 - DNA, 1053 bp, Homo sapiens
  Payload ID: 12957
  Gene Symbol: POLR2G
  Gene Name: polymerase (RNA) II (DNA directed) polypeptide G
  ENST ID: ENST00000524819
  CDS Start-End: 67-192
tgtttccggtggattcccagggactgtcggaggtgtggactctgcctgcctacctggtctgggaagatgttctaccatatctccctagagcacgaaatcctgctgcacccgcgctacttcggccccaacttgctcaacacggtgaagcagaagctcttcaccgaggtggaggggacctgcacagggaagtgagtgtcgagctcaccgcaccgccagatcgttcgatgcgcacacggggcgctatacctgcaacccctccccaactcctactcgtcctgccacccactctggggacccctctcctctctcaggcagccagttgcttcctgctttgggttcccagggcgccctctgcaatgctggacaataagacttccttctctcagctgagatgggtcattcattgactcctcaaacattttaaaaacccttggtgtgtgccaggacccgtgttgggctcagaacaaggtatggctttgtaattgctgtcaccaccattgacaatattggtgctggtgtgatccagccaggccgaggctttgtcctttatccagttaagtacaaggccattgttttccggccatttaaaggggaggtcgtggatgctgttgtcactcaggtcaacaaggttggactcttcacagaaattgggcccatgtcttgcttcatctctcgacattccatcccttcagagatggagtttgatcctaactccaacccaccatgttacaagacaatggatgaggatattgtgattcagcaggacgatgagatccgcttaaagattgtggggacccgtgtggacaagaatgacatttttgctattggctccctgatggacgattacttggggcttgtaagctgagcctggtggcctcctacccttggtcctactctaggaagtgtgattgtcacacttatcatgttgtccagaggtccagtctggctgctgttgtggaggcaaggaaggcaactcatcccagaaggcatctggtgcttcttgtagcttaactactgcctcctcatttttcagtatgtgttctaagtataaaa

SEQ ID NO: 167536 - DNA, 388 bp, Homo sapiens
  Payload ID: 12957
  Gene Symbol: POLR2G
  Gene Name: polymerase (RNA) II (DNA directed) polypeptide G
  ENST ID: ENST00000533442
  CDS Start-End: 348-388
ggggttgcggcgtctaagtgtttccggtggattcccagggactgtcggagatctccctagagcacgaaatcctgctgcacccgcgctacttcggccccaacttgctcaacacggtgaagcagaagctcttcaccgaggtggaggggacctgcacagggaagtatggctttgtaattgctgtcaccaccattgacaatattggtgctggtgtgatccagccaggccgaggctttgtcctttatccagttaagtacaaggccattgttttccggccatttaaaggggaggtcgtggatgctgttgtcactcaggtcaacaaggttggactcttcacagaaattgggcccatgtcttgcttcatctctcgacattccatcccttcagagat

SEQ ID NO: 167537 - DNA, 919 bp, Homo sapiens
  Payload ID: 12957
  Gene Symbol: POLR2G
  Gene Name: polymerase (RNA) II (DNA directed) polypeptide G
  ENST ID: ENST00000525455
  CDS Start-End: 70-264
aagtgtttccggtggattcccagggactgtcggaggtgtggactctgcctgcctacctggtctgggaagatgttctaccatatctccctagagcacgaaatcctgctgcacccgcgctacttcggccccaacttgctcaacacggtgaagcagaagctcttcaccgaggtggaggggacctgcacagggaaaatcaagactgtctggggcagacctgagaatctgcattttaagaagatgattctcaggcatcccgaagattgagatctgttgcctcaaggactccagccttcttggacatttattgtgaaattaccagaacagcatttggtcttacacatactgatctctgttctgtcttcttttggtcattaagctctctgggagcagaggtgctatctacttgtccttttgctctccccgaccctacccccaagagctcagcgacttttattgcagatgtctttagaggctcttggacacacagtgtcttcctgtttctcatcctccttgcaggttggactcttcacagaaattgggcccatgtcttgcttcatctctcgacattccatcccttcagagatggagtttgatcctaactccaacccaccatgttacaagacaatggatgaggatattgtgattcagcaggacgatgagatccgcttaaagattgtggggacccgtgtggacaagaatgacatttttgctattggctccctgatggacgattacttggggcttgtaagctgagcctggtggcctcctacccttggtcctactctaggaagtgtgattgtcacacttatcatgttgtccagaggtccagtctggctgctgttgtggaggcaaggaaggcaactcatcccagaaggcatctggtgcttcttgtagcttaactactgcctcctcatttttc

SEQ ID NO: 167538 - DNA, 1556 bp, Homo sapiens
  Payload ID: 12957
  Gene Symbol: POLR2G
  Gene Name: polymerase (RNA) II (DNA directed) polypeptide G
  ENST ID: ENST00000531944
  CDS Start-End: 33-158
gtggactctgcctgcctacctggtctgggaagatgttctaccatatctccctagagcacgaaatcctgctgcacccgcgctacttcggccccaacttgctcaacacggtgaagcagaagctcttcaccgaggtggaggggacctgcacagggaagtgagtgtcgagctcaccgcaccgccagatcgttcgatgcgcacacggggcgctatacctgcaacccctccccaactcctactcgtcctgccacccactctggggacccctctcctctctcaggcagccagttgcttcctgctttgggttcccagggcgccctctgcaatgctggacaataagacttccttctctcagctgagatgggtcattcattgactcctcaaacattttaaaaacccttggtgtgtgccaggacccgtgttgggctcagaacaaggtagaatgggaacaagatagaatgaggacagcccctgtggagctcacagtgtaatcattgttcctgtgtctgctctccctctgtcattctgctggttttctcttatcccctgtgcccagggaccacacaccatgggcctctatatatcttctgaatgaatgaccagaaaaagcagatcgagagtttgggggaggaaggaagtagcctgggatttgaccatctctgggctttgcacagaggggcctctctgatattaatgagctgggacccagctcagggcagtggagtacttgggcctccagcatcagaaaaacctgcaggaacatgcagattcctgagcctccttattccctacagaatcaagactgtctggggcagacctgagaatctgcattttaagaagatgattctcaggcatcccgaagattgagatctgttgcctcaaggactccagccttcttggacatttattgtgaaattaccagaacagcatttggtcttacacatactgatctctgttctgtcttcttttggtcattaagctctctgggagcagaggtgctatctacttgtccttttgctctccccgaccctacccccaagagctcagcgacttttattgcagatgtctttagaggctcttggacacacagtgtcttcctgtttctcatcctccttgcaggttggactcttcacagaaattgggcccatgtcttgcttcatctctcgacattccatcccttcagagatggagtttgatcctaactccaacccaccatgttacaagacaatggatgaggatattgtgattcagcaggacgatgagatccgcttaaagattgtggggacccgtgtggacaagaatgacatttttgctattggctccctgatggacgattacttggggcttgtaagctgagcctggtggcctcctacccttggtcctactctaggaagtgtgattgtcacacttatcatgttgtccagaggtccagtctggctgctgttgtggaggcaaggaaggcaactcatcccagaaggcatctggtgcttcttgtagcttaactactgcctcctcatttttcagtatgtgttctaagtataaaaagtccttggttctca

SEQ ID NO: 167539 - DNA, 660 bp, Homo sapiens
  Payload ID: 12957
  Gene Symbol: POLR2G
  Gene Name: polymerase (RNA) II (DNA directed) polypeptide G
  ENST ID: ENST00000531996
  CDS Start-End: 1-183
atctccctagagcacgaaatcctgctgcacccgcgctacttcggccccaacttgctcaacacggtgaagcagaagctcttcaccgaggtggaggggacctgcacagggaaaatcaagactgtctggggcagacctgagaatctgcattttaagaagatgattctcaggcatcccgaagattgagatctgttgcctcaaggactccagccttcttggacatttattgtgaaattaccagaacagcatttggtcttacacatactgatctctgttctgtcttcttttggtcattaagctctctgggagcagaggtatggctttgtaattgctgtcaccaccattgacaatattggtgctggtgtgatccagccaggccgaggctttgtcctttatccagttaagtacaaggccattgttttccggccatttaaaggggaggtcgtggatgctgttgtcactcaggtcaacaaggttggactcttcacagaaattgggcccatgtcttgcttcatctctcgacattccatcccttcagagatggagtttgatcctaactccaacccaccatgttacaagacaatggatgaggatattgtgattcagcaggacgatgagatccgcttaaagattgtggggacccgtgtggacaagaatgacatt

SEQ ID NO: 167540 - DNA, 1802 bp, Homo sapiens
  Payload ID: 12958
  Gene Symbol: POLR2H
  Gene Name: polymerase (RNA) II (DNA directed) polypeptide H
  Uniprot ID: P52434
  ENST ID: ENST00000456318
  CDS Start-End: 1050-1502
gggacggcccagccaggctggggtccgcgcggggcctcccgagaggcggcaaggggcgctgggaaggcgcaagcccgcgccggctccctgcggatgcccgggtcggagaggggcgcccgggaggggcgggtctactggcacgtggaggggccggcccgggttcgcggttccccgtgcccaggcaggaggggctgcagacgcctgagctccgtaggggttggggctgggggctgcggagctgtctacatcggactcctccgggtcagcccgttaggagccgcctcccctctgcccctccgaagagacgagcggcccagacaggcctgggaaggcccctctgccccgtcaggggtgaaaagcaaagctggaaggattcggagagggttggggccgtcttcctcatccttccttttctcggggctcccgtggcgacgtcatggcaaattcccaaactggacggatccggctcgggttacgtccagcagggccgagccggcccaggccggccccggggtcctcggtgccggctggaggggctgggcacctctggggcggggttctgctccacctgccctcggcgcggactgtgccctcggcgggcacgcggaccggcggggtagggctagggcccggcttctctgggccaaggatcaaggtccctgcctgggttaggcccccacgcattccagtcttcggaacccggcctctgaagagggcgcagtagggccccagcggagcgcgagaacccgctctacagcctattgcttccccgccctgggcagagccacctggacatgagacccgccctcaatgccgaagcctctcggaagcaatctttcgggacggaagttaagtagccccgagcgggaggctgtggcggaagtggtcgcgttaccgcttgtttgtgcgcatgcgccactctcgtctggccgccgcgctttcaggaggtgcttttggttctctccggtcttgtccacgctagggggtgcacgtactcccaactgtggtcgcgctctcaccccttctgctgctctcgtggccccctcgcgatggcgggcatcctgtttgaggatattttcgatgtgaaggatattgacccggagggcaagaagtttgaccgagtgtctcgactgcattgtgagagtgaatctttcaagatggatctaatcttagatgtaaacattcaaatttaccctgtagacttgggtgacaagtttcggttggtcatagctagtaccttgtatgaagatggtaccctggatgatggtgaatacaaccccactgatgataggccttccagggctgaccagtttgagtatgtaatgtatggaaaagtgtacaggattgagggagatgaaacttctactgaagcagcaacacgcctctctgcgtacgtgtcctatgggggcctgctcatgaggctgcagggggatgccaacaacctgcatggattcgaggtggactccagagtttatctcctgatgaagaagctagccttctgaacctcgcctgaagccagcctctctgccaagtcactcaggtcatgggcattgttcaagcctgagtggcagccgctcttgctcacctgttgaggaagggctggctcactgtccaccgtggcggcatctttaactggcctccactcaatgggaaactgactcgcctgtgaaagacacagtgggagagctgaaaatgaatcagaagctttatgtatatgatttttaaattaaactttactttttcagactgcccctcccctttttgtaaaaagtccatttactgtaaaatcgttttttccagtt

SEQ ID NO: 167541 - DNA, 807 bp, Homo sapiens
  Payload ID: 12958
  Gene Symbol: POLR2H
  Gene Name: polymerase (RNA) II (DNA directed) polypeptide H
  Uniprot ID: P52434
  ENST ID: ENST00000443489
  CDS Start-End: 250-510
actctcgtctggccgccgcgctttcaggaggtgcttttggttctctccggtcttgtccacgctagggggtgcacgtactcccaactgtggtcgcgctctcaccccttctgctgctctcgtggccccctcgcgatggcgggcatcctgtttgaggatattttcgatgtgaaggatattgacccggagggcaagaagtttgaccgaggtaagtaagtgtctcgactgcattgtgagagtgaatctttcaagatggatctaatcttagatgtaaacattcaaatttaccctgtagacttgggtgacaagtttcggttggtcatagctagtaccttgtatgaagatggtaccctggatgatggtgaatacaaccccactgatgataggccttccagctctgcgtacgtgtcctatgggggcctgctcatgaggctgcagggggatgccaacaacctgcatggattcgaggtggactccagagtttatctcctgatgaagaagctagccttctgaacctcgcctgaagccagcctctctgccaagtcactcaggtcatgggcattgttcaagcctgagtggcagccgctcttgctcacctgttgaggaagggctggctcactgtccaccgtggcggcatctttaactggcctccactcaatgggaaactgactcgcctgtgaaagacacagtgggagagctgaaaatgaatcagaagctttatgtatatgatttttaaattaaactttactttttcagactgcccctcccctttttgtaaaaagtccatttactgtaaaatcgttttttcca

SEQ ID NO: 167542 - DNA, 994 bp, Homo sapiens
  Payload ID: 12958
  Gene Symbol: POLR2H
  Gene Name: polymerase (RNA) II (DNA directed) polypeptide H
  Uniprot ID: P52434
  ENST ID: ENST00000438240
  CDS Start-End: 394-738
agcccgcgccggctccctgcggatgcccgggtcggagaggggcgcccgggaggggcgggtctactggcacgtggaggggccggcccgggttcgcggttccccgtgcccaggcaggaggggctgcagacgcctgagctccgtaggggttggggctgggggctgcggagctgtctacatcggactcctccgggtcagcccgttaggagccgcctcccctctgcccctccgaagagacgagcggcccagacaggcctgggaaggcccctctgccccgtcaggggtgaaaagcaaagctggaaggattcggagagggttggggccgtcttcctcatccttccttttctcggggctcccgtggtgtctcgactgcattgtgagagtgaatctttcaagatggatctaatcttagatgtaaacattcaaatttaccctgtagacttgggtgacaagtttcggttggtcatagctagtaccttgtatgaagatggtaccctggatgatggtgaatacaaccccactgatgataggccttccagggctgaccagtttgagtatgtaatgtatggaaaagtgtacaggattgagggagatgaaacttctactgaagcagcaacacgcctctctgcgtacgtgtcctatgggggcctgctcatgaggctgcagggggatgccaacaacctgcatggattcgaggtggactccagagtttatctcctgatgaagaagctagccttctgaacctcgcctgaagccagcctctctgccaagtcactcaggtcatgggcattgttcaagcctgagtggcagccgctcttgctcacctgttgaggaagggctggctcactgtccaccgtggcggcatctttaactggcctccactcaatgggaaactgactcgcctgtgaaagacacagtgggagagctgaaaatgaatcagaagctttatgtatatgatttttaaattaaactttactttttcagactgcccctcccc

SEQ ID NO: 167543 - DNA, 791 bp, Homo sapiens
  Payload ID: 12958
  Gene Symbol: POLR2H
  Gene Name: polymerase (RNA) II (DNA directed) polypeptide H
  Uniprot ID: P52434
  ENST ID: ENST00000452961
  CDS Start-End: 208-552
ctctccggtcttgtccacgctagggggtgcacgtactcccaactgtggtcgcgctctcaccccttctgctgctctcgtggccccctcgcgatggcgggcatcctgtttgaggatattttcgatgtgaaggatattgacccggagggcaagaagtttgaccgaggtaagtaagtgtctcgactgcattgtgagagtgaatctttcaagatggatctaatcttagatgtaaacattcaaatttaccctgtagacttgggtgacaagtttcggttggtcatagctagtaccttgtatgaagatggtaccctggatgatggtgaatacaaccccactgatgataggccttccagggctgaccagtttgagtatgtaatgtatggaaaagtgtacaggattgagggagatgaaacttctactgaagcagcaacacgcctctctgcgtacgtgtcctatgggggcctgctcatgaggctgcagggggatgccaacaacctgcatggattcgaggtggactccagagtttatctcctgatgaagaagctagccttctgaacctcgcctgaagccagcctctctgccaagtcactcaggtcatgggcattgttcaagcctgagtggcagccgctcttgctcacctgttgaggaagggctggctcactgtccaccgtggcggcatctttaactggcctccactcaatgggaaactgactcgcctgtgaaagacacagtgggagagctgaaaatgaatcagaagctttatgtatatgatttttaaattaaactttactttt

SEQ ID NO: 167544 - DNA, 836 bp, Homo sapiens
  Payload ID: 12958
  Gene Symbol: POLR2H
  Gene Name: polymerase (RNA) II (DNA directed) polypeptide H
  ENST ID: ENST00000412877
  CDS Start-End: 802-836
ggcccagccaggctggggtccgcgcggggcctcccgagaggcggcaaggggcgctgggaaggcgcaagcccgcgccggctccctgcggatgcccgggtcggagaggggcgcccgggaggggcgggtctactggcacgtggaggggccggcccgggttcgcggttccccgtgcccaggcaggaggggctgcagacgcctgagctccgtaggggttggggctgggggctgcggagctgtctacatcggactcctccgggtcagcccgttaggagccgcctcccctctgcccctccgaagagacgagcggcccagacaggcctgggaaggcccctctgccccgtcaggggtgaaaagcaaagctggaaggattcggagagggttggggccgtcttcctcatccttccttttctcggggctcccgtgggcccccacgcattccagtcttcggaacccggcctctgaagagggcgcagtagggccccagcggagcgcgagaacccgctctacagcctattgcttccccgccctgggcagagccacctggacatgagacccgccctcaatgccgaagcctctcggaagcaatctttcgggacggaagttaagtagccccgagcgggaggctgtggcggaagtggtcgcgttaccgcttgtttgtgcgcatgcgccactctcgtctggccgccgcgctttcaggaggtgcttttggttctctccggtcttgtccacgctagggggtgcacgtactcccaactgtggtcgcgctctcaccccttctgctgctctcgtggccccctcgcgatggcgggcatcctgtttgaggatattttcgatgt

SEQ ID NO: 167545 - DNA, 823 bp, Homo sapiens
  Payload ID: 12958
  Gene Symbol: POLR2H
  Gene Name: polymerase (RNA) II (DNA directed) polypeptide H
  ENST ID: ENST00000455712
  CDS Start-End: 378-823
gaagagctggtatccaagggacagggcagtgccaggctgaaggggcacggaggggatccgtgtccaggagaaggcagtggagggggaacgcgcagcactaagctggagggagccacctggacatgagacccgccctcaatgccgaagcctctcggaagcaatctttcgggacggaagttaagtagccccgagcgggaggctgtggcggaagtggtcgcgttaccgcttgtttgtgcgcatgcgccactctcgtctggccgccgcgctttcaggaggtgcttttggttctctccggtcttgtccacgctagggggtgcacgtactcccaactgtggtcgcgctctcaccccttctgctgctctcgtggccccctcgcgatggcgggcatcctgtttgaggatattttcgatgtgaaggatattgacccggagggcaagaagtttgaccgagtgtctcgactgcattgtgagagtgaatctttcaagatggatctaatcttagatgtaaacattcaaatttaccctgtagacttgggtgacaagtttcggttggtcatagctagtaccttgtatgaagatggtaccctggatgatggtgaatacaaccccactgatgataggccttccagggctgaccagtttgagtatgtaatgtatggaaaagtgtacaggattgagggagatgaaacttctactgaagcagcaacacgcctctctgcgtacgtgtcctatgggggcctgctcatgaggctgcagggggatgccaacaacctgcatggattcgaggtggactccagagtttatctcctgatgaagaagctagc

SEQ ID NO: 167546 - DNA, 1159 bp, Homo sapiens
  Payload ID: 12958
  Gene Symbol: POLR2H
  Gene Name: polymerase (RNA) II (DNA directed) polypeptide H
  Uniprot ID: P52434
  ENST ID: ENST00000430783
  CDS Start-End: 492-860
tctgctccacctgccctcggcgcggactgtgccctcggcgggcacgcggaccggcggggtagggctagggcccggcttctctgggccaaggatcaaggtccctgcctgggttaggcccccacgcattccagtcttcggaacccggcctctgaagagggcgcagtagggccccagcggagcgcgagaacccgctctacagcctattgcttccccgccctgggcagagccacctggacatgagacccgccctcaatgccgaagcctctcggaagcaatctttcgggacggaagttaagtagccccgagcgggaggctgtggcggaagtggtcgcgttaccgcttgtttgtgcgcatgcgccactctcgtctggccgccgcgctttcaggaggtgcttttggttctctccggtcttgtccacgctagggggtgcacgtactcccaactgtggtcgcgctctcaccccttctgctgctctcgtggccccctcgcgatggcgggcatcctgtttgaggatattttcgatgtgaaggatattgacccggagggcaagaagtttgaccgagtgtctcgactgcattgtgagagtgaatctttcaagatggatctaatcttagatgtaaacattcaaatttaccctgtagacttgggtgacaagtttcggttggtcatagctagtaccttgtatgaagatggtaccctggatgatggtgaatacaaccccactgatgataggccttccagctctgcgtacgtgtcctatgggggcctgctcatgaggctgcagggggatgccaacaacctgcatggattcgaggtggactccagagtttatctcctgatgaagaagctagccttctgaacctcgcctgaagccagcctctctgccaagtcactcaggtcatgggcattgttcaagcctgagtggcagccgctcttgctcacctgttgaggaagggctggctcactgtccaccgtggcggcatctttaactggcctccactcaatgggaaactgactcgcctgtgaaagacacagtgggagagctgaaaatgaatcagaagctttatgtatatgatttttaaattaaactttactttttcagactgcccctcccctttttgtaaaaagtccatttactgtaaaatcgttttttccagt

SEQ ID NO: 167547 - DNA, 878 bp, Homo sapiens
  Payload ID: 12958
  Gene Symbol: POLR2H
  Gene Name: polymerase (RNA) II (DNA directed) polypeptide H
  Uniprot ID: P52434
  ENST ID: ENST00000429568
  CDS Start-End: 60-587
cgtactcccaactgtggtcgcgctctcaccccttctgctgctctcgtggccccctcgcgatggcgggcatcctgtttgaggatattttcgatgtgaaggatattgacccggagggcaagaagtttgaccgagtgtctcgactgcattgtgagagtgaatctttcaagatggatctaatcttagatgtaaacattcaaatttaccctgtagacttgggtgacaagtttcggttggtcatagctagtaccttgtatgaagatggtaccctggatgatggtgaatacaaccccactgatgataggccttccagggctgaccagtttgagtatgtaatgtatggaaaagtgtacaggattgagggagatgaaacttctactgaagcagcaacacgcctgctgagattgagagctgctgagtggcagtgctccagaatcacgggatggggccttctgtttcagctctgcgtacgtgtcctatgggggcctgctcatgaggctgcagggggatgccaacaacctgcatggattcgaggtggactccagagtttatctcctgatgaagaagctagccttctgaacctcgcctgaagccagcctctctgccaagtcactcaggtcatgggcattgttcaagcctgagtggcagccgctcttgctcacctgttgaggaagggctggctcactgtccaccgtggcggcatctttaactggcctccactcaatgggaaactgactcgcctgtgaaagacacagtgggagagctgaaaatgaatcagaagctttatgtatatgatttttaaattaaactttactttttcagactgcccctcccctttttgtaaaaagtccatttactgtaaaatcgttttttccagtttg

SEQ ID NO: 167548 - DNA, 913 bp, Homo sapiens
  Payload ID: 12959
  Gene Symbol: POLR2I
  Gene Name: polymerase (RNA) II (DNA directed) polypeptide I, 14.5kDa
  Uniprot ID: P36954
  ENST ID: ENST00000221859
  CDS Start-End: 491-868
aatccagaggggccttccatagttcacggttcttccaatagcggcccgggaaaggaccagaacaggcggcgaagactgaagcccggaggtaggagtggcaagagctcgcccagtccgcgaagggtaaactcgcgcatgcgcactggccttcaaccaagccaagcgccttggcttctgtcctggatgctcagtgttttgcggtttacgatgcgcatcgttttcccggctctggcaccagatccatactattctgtaaactgaggcggcgatgcccaaaaattggaagcaattactctaagatatcaaaagattgaagcaagccatgaaacctctgcgcggagagagccgagcccgaggcggcggggagccagcacgtgtgcgcagctccgccctcttttggcgaagcacctaggcctggcccctcccgcgacctgtagcgcggcggagcaagcgcggaaggctgggagggctgcgcgggctgcgcgtcgccatggagcccgacgggacttacgagccgggcttcgtgggtattcgcttctgccaggaatgtaacaacatgctgtaccccaaggaagacaaggagaaccgcattctgctctacgcgtgccggaactgtgattaccagcaggaggccgacaacagctgcatctatgtcaacaagatcacgcacgaagtggacgaactgacccagattatcgccgacgtgtcccaggaccccacgttgccgcggaccgaggaccacccgtgccaaaagtgcggccacaaggaggctgtgttcttccagtcacacagtgcgcgggccgaggacgccatgcgcctttactacgtgtgcacagccccacactgcggccaccgctggaccgagtgacctcctctctcccccgagtgtaataaacaccagattccatgcgtg

SEQ ID NO: 167549 - DNA, 368 bp, Homo sapiens
  Payload ID: 12959
  Gene Symbol: POLR2I
  Gene Name: polymerase (RNA) II (DNA directed) polypeptide I, 14.5kDa
  ENST ID: ENST00000585842
  CDS Start-End: 5-145
cgccatggagcccgacgggacttacgagccgggcttcgtgggtattcgcttctgccaggaatgtgccggaactgtgattaccagcaggaggccgacaacagctgcatctatgtcaacaagatcacgcacgaagtggacgaactgacccagattatcgccgacgtgtcccaggaccccacgttgccgcggaccgaggaccacccgtgccaaaagtgcggccacaaggaggctgtgttcttccagtcacacagtgcgcgggccgaggacgccatgcgcctttactacgtgtgcacagccccacactgcggccaccgctggaccgagtgacctcctctctcccccgagtgtaataaacaccagattccatg

SEQ ID NO: 167550 - DNA, 493 bp, Homo sapiens
  Payload ID: 12959
  Gene Symbol: POLR2I
  Gene Name: polymerase (RNA) II (DNA directed) polypeptide I, 14.5kDa
  ENST ID: ENST00000592962
  CDS Start-End: 51-317
ggcggagcaagcgcggaaggctgggagggctgcgcgggctgcgcgtcgccatggagcccgacgggacttacgagccgggcttcgtgggtattcgcttctgccaggaatgtaacaacatgctgtaccccaaggaagacaaggagaaccgcattctgctctacgcgtgccggaactgtgattaccagcaggaggccgacaacagctgcatctatgtcaacaagatcacgcacgaagtggacgaactgacccagattatcgccgacgtgtcccaggaccccacgttgccgcggaccgaggaccacccgtgccaaaagtgagcgttcagctggtactggggaggtgcggccacaaggaggctgtgttcttccagtcacacagtgcgcgggccgaggacgccatgcgcctttactacgtgtgcacagccccacactgcggccaccgctggaccgagtgacctcctctctcccccgagtgtaataaacaccagattcca

SEQ ID NO: 167551 - DNA, 744 bp, Homo sapiens
  Payload ID: 12959
  Gene Symbol: POLR2I
  Gene Name: polymerase (RNA) II (DNA directed) polypeptide I, 14.5kDa
  ENST ID: ENST00000586439
  CDS Start-End: 358-531
gcatgcgcactggccttcaaccaagccaagcgccttggcttctgtcctggatgctcagtgttttgcggtttacgatgcgcatcgttttcccggctctggcaccagatccatactattctgtaaactgaggcggcgatgcccaaaaattggaagcaattactctaagatatcaaaagattgaagcaagccatgaaacctctgcgcggagagagccgagcccgaggcggcggggagccagcacgtgtgcgcagctccgccctcttttggcgaagcacctaggcctggcccctcccgcgacctgtagcgcggcggagcaagcgcggaaggctgggagggctgcgcgggctgcgcgtcgccatggagcccgacgggacttacgagccgggcttcgtggtaacaacatgctgtaccccaaggaagacaaggagaaccgcattctgctctacgcgtgccggaactgtgattaccagcaggaggccgacaacagctgcatctatgtcaacaagatcacgcacgaagtggacgaactgacccagattatcgccgacgtgtcccaggaccccacgttgccgcggaccgaggaccacccgtgccaaaagtgcggccacaaggaggctgtgttcttccagtcacacagtgcgcgggccgaggacgccatgcgcctttactacgtgtgcacagccccacactgcggccaccgctggaccgagtgacctcctctctcccccgagtgtaataaacacc

SEQ ID NO: 167552 - DNA, 932 bp, Homo sapiens
  Payload ID: 12960
  Gene Symbol: POLR2J
  Gene Name: polymerase (RNA) II (DNA directed) polypeptide J, 13.3kDa
  Uniprot ID: P52435
  ENST ID: ENST00000292614
  CDS Start-End: 48-401
gcggcggcggcggacccttggggtctggacgcaacggcggcgggagcatgaacgcccctccagccttcgagtcgttcttgctcttcgagggcgagaagaagatcaccattaacaaggacaccaaggtacccaatgcctgtttattcaccatcaacaaagaagaccacacactgggaaacatcattaaatcacaactcctaaaagacccgcaagtgctatttgctggctacaaagtcccccaccccttggagcacaagatcatcatccgagtgcagaccacgccggactacagcccccaggaagcctttaccaacgccatcaccgacctcatcagtgagctgtccctgctggaggagcgctttcgggtggccataaaagacaagcaggaaggaattgagtaggggccagagggggctctgctcggcctgtgagccccgttcctacctgtgcctgaccctccgctccaggtaccacaccgaggagagcggccggtcccagccatggcccgccttgtggccacccctcaccctgacaccgacgtgtcctgtacatagattaggttttatattcctaataaagtatagcgggagagacctggatgtggacttgagcagcggtgacttcgcaagcaaatggattgtcaggcttgatgcaggcagatgacctgtttcaggggcgtccggctggcagggatgaattcattctggaccaaagatccggggtccaggggctgctgcgggggctgtgctgagccggagagaagtgtgcaaacccatgagctcccaagagtctctgctctagaagcctcaactcctgggcctgcctgtcagtcaaagcaggaacacttcttcctgcataactcgaaacacctttccacaggcttcttgtccacagtagagtttaataaaaatattcactgaaagacccccccc

SEQ ID NO: 167553 - DNA, 784 bp, Homo sapiens
  Payload ID: 12960
  Gene Symbol: POLR2J
  Gene Name: polymerase (RNA) II (DNA directed) polypeptide J, 13.3kDa
  ENST ID: ENST00000393794
  CDS Start-End: 47-523
cggcggcggcggacccttggggtctggacgcaacggcggcgggagcatgaacgcccctccagccttcgagtcgttcttgctcttcgagggcgagaagatcaccattaacaaggacaccaaggtacccaatgcctgtttattcaccatcaacaaagaagaccacacactgggaaacatcattaaatcacaactcctaaaagacccgcaagtgctatttgctggctacaaagtcccccaccccttggagcacaagatcatcatccgagtgcagaccacgccggactacagcccccaggaagcctttaccaacgccatcaccgacctcatcagtgagctgtccctgctggaggagcgctttcgggtgagggcggggcctggaggggcagacggggtgggctggacactggcccgtgtgcccaggcctgggacagccctggcctgtttcttcggaggtcctgggggagaggcggcagtgatggaagagcagggacttccaccacaggctccaggacatgtggactgaggggctgtggagtctgggcctgtggctcccgtctgccccatgggacttctgtagtgctgcagggtccctcgggtgctgtgggccagatcggggcggggacctactgtcctttgggggtgctcttctacgtcccttgttggtgattggcaaggcctggtccttccaggtctctgggaggcagctcacccccgggtggcccacacctgttcctggcagggcgcatgggaatctagaacagtttagaggggaaagagccacagc

SEQ ID NO: 167554 - DNA, 348 bp, Homo sapiens
  Payload ID: 12961
  Gene Symbol: POLR2J2
  Gene Name: polymerase (RNA) II (DNA directed) polypeptide J2
  Uniprot ID: Q9GZM3
  ENST ID: ENST00000333432
  CDS Start-End: 1-348
atgaacgcccctccagccttcgagtcgttcttgctcttcgagggcgagaagatcaccattaacaaggacaccaaggtacccaaggcctgcttattcaccatcaacaaagaagaccacacactgggaaacatcattaaatcacaactcctaaaagacccgcaagtgctatttgctggctacaaagtcccccaccccttggagcacaagatcatcatccgagtgcagaccacgccggactacagcccccaggaagcctttaccaacgccatcaccgacctcatcagtgagctgtccctgctggaggagcgcttccggacgtgcctgcttccccttcgccttctgccgtga

SEQ ID NO: 167555 - DNA, 2065 bp, Homo sapiens
  Payload ID: 12961
  Gene Symbol: POLR2J2
  Gene Name: polymerase (RNA) II (DNA directed) polypeptide J2
  ENST ID: ENST00000358438
  CDS Start-End: 29-505
ggggtctggacgcaacggcggcgggagcatgaacgcccctccagccttcgagtcgttcttgctcttcgagggcgagaagatcaccattaacaaggacaccaaggtacccaaggcctgcttattcaccatcaacaaagaagaccacacactgggaaacatcattaaatcacaactcctaaaagacccgcaagtgctatttgctggctacaaagtcccccaccccttggagcacaagatcatcatccgagtgcagaccacgccggactacagcccccaggaagcctttaccaacgccatcaccgacctcatcagtgagctgtccctgctggaggagcgcttccgggtgagggcggggcctggaggggcagacggggtgggctggacactggcccgtgtgcccaggcctgggacagccctggcctgtttcttcggaggtcctcagggagaggcggcggtgatggaagaacagggacttccaccacaggctccaggacatgtggactgaggggctgtggagtctgggcctgtggctcccgtctgccccatgggacttctgtagtgctgcagggtccctcgggtgctgtgggccagatccgggcggggacctactgtcctttgggggtgctcttctacgtcccttgtcggtgattggcaaggcctggtccttccaggcctctgggaggcagctcaccccagggtggcccacacctgttcctagcagggcgcctgggaatctagaacagtttagaggggaaagagccacagcaaagaaaagccgaggcagggtgatcacgaggtcaggagttcaagaccagcctggcaaacatggtgaagccctgtttctactaaaaatacaaaaattagctaggcatggtggcatgtgctgtagtcccagctactcgggaggctgaggcaggagaatcgcttgaacccgggaggcggaggttgcagtgagccgagattgtgccactgcactccagcctaggtaacagagcaggactccatctcagtcaatcaatcaatcaatcaatctcagcggttgaactacccttgacatggttcagctctgtatccacacccaaatctcatgtcaaattgtaattcccagtgttgtgggagggacctggtgggaggtgattggctcatgggggccgacttcccccttgctgttctcgtgatattgagtgagcgcttgtgggatctggttgtttaaaagcgtgcagccctcccacttcactctctctgtctctcctgctccaacatggccagacgtgcctgcttccccttcgccttctgccgtgattgtcagtttcctgaggcctccccagccacgcttcctgtacagcctgcagaactgtgagtcaattaaacctcttttcttcataaattacccagtttctcatagttctttatagcagtgtgaaaacagactaatggacccttctggttgaaggaatgcagccattctgcttgtttgactatgtcctttctattcatctctatttcctgggaggtgtttatccaagtgcaataggaggtattggtgaccgcacagtcccctcagtgttctgctagtaaatagttgaaggttgatcattgatcttctgcgttttcagtctggcatggaaaagcccctgtgcaactggtaaagatatcaataagcaccaggaggtatctaaatccaccaggagccataggcatcacgttgacgtccatttaccagtcttccctggcaagattcttctgaattgtgctgccttggccaaaagaggtatgggaggggctgggcgcagtggcttgtgcctgtaatcccaacattttgggaaaccaattcaggtggatcgttagaggtcaggggttcaagaccatcctggccgacatggtgacatcccatctctactaaaaatacaataagttagctgggtttggtgttgggtgcctgtaatcccagctactcgagaggctgaggcaggataatcgcttgaacctgggaggaggaggtggcagtgagctgagatcgtgccattgcactccagcgtgggcaacaagagtgaaacgtcgtctc

SEQ ID NO: 167556 - DNA, 1598 bp, Homo sapiens
  Payload ID: 12962
  Gene Symbol: POLR2J3
  Gene Name: polymerase (RNA) II (DNA directed) polypeptide J3
  Uniprot ID: Q9H1A7
  ENST ID: ENST00000379340
  CDS Start-End: 19-366
cgcaacggcggcgggagcatgaacgcccctccagccttcgagtcgttcttgctcttcgagggcgagaagatcaccattaacaaggacaccaaggtacccaatgcctgtttattcaccatcaacaaagaagaccacacactgggaaacatcattaaatcacaactcctaaaagacccgcaagtgctatttgctggctacaaagtcccccaccccttggagcacaagatcatcatccgagtgcagaccacgccggactacagcccccaggaagcctttaccaacgccatcaccgacctcatcagtgagctgtccctgctggaggagcgcttccggacgtgcctgcttccccttcgccttctgccgtgattgtcagtttcctgaggcctccccagccacgcttcctgtacagcctgcagaactctgccccagagcacatcagctatgtgccccagctctcaaacgacaccttggcggggaggctcaccctgtccaccttcacgctggagcagcctctaggccagttcagcagccacaacatctctgacttggataccatctggctggtggtggccctcagcaacgccacccagagcttcacggccccacggacaaaccaggacatccctgctcctgccaacttctcccagaggggctactatctcacactgagggccaaccgggtgctgtaccagaccagaggccagctccatgtcctccgcgtcggcaatgatacccactgccaaccaacaaaaattggctgcaaccatcccctaccaggacccggcccctacagggtgaagttcctggtgatgaatgacgaaggacccgtggctgaaacaaagtggtccagcgacactcgcctgcagcaagcccaggcacttcgggctgtccccggcccccagagcccgggcaccgtggtcatcatcgccatcctgtctatcctcctggccgtcctcctcacggtcctcctggctgtgctcatatacacctgcttcaacagctgcaggagcacttccctatcaggcccagaggaggcagggagtgtgagaagatacaccacgcacctcgcgttcagcactcctgccgagggggcttcctgaggggttccagaggggcccacgtgtccctccacctcctccctggcccaggctgcagagcctgagctgggacacgccctgaagcttctggaccctgagagagattgtttcttttctttactatttttttttttttttttgagacggagtctcactctgtcgccaggctggcgcgatcttggctcactgcaacctctgcctcacgggttcaagcgattttcctgcttcagcctcctgagtagctgggactacaggcacacgccaccatgcccagctcatttttgtatttttagtagagatggggtttcaccatgttggccaggatggcctccgtctcttgaccttgtgatccgcccgactcggcctcccaaaatgctgggattacaggcgtgagccatcaagtctggtgagagagattgtttctagatgagggtgggggcgggtgtccttagcccaaagcttgtgccagtctctatcagaaataaatgcccccaaaacctc

SEQ ID NO: 167557 - DNA, 2456 bp, Homo sapiens
  Payload ID: 12962
  Gene Symbol: POLR2J3
  Gene Name: polymerase (RNA) II (DNA directed) polypeptide J3
  ENST ID: ENST00000464525
  CDS Start-End: 40-426
ggcggacacttggggtctggacgcaacggcggcgggagcatgaacgcccctccagccttcgagtcgttcttgctcttcgagggcgagaaacaactcctaaaagacccgcaagtgctatttgctggctacaaagtcccccaccccttggagcacaagatcatcatccgagtgcagaccacgccggactacagcccccaggaagcctttaccaacgccatcaccgacctcatcagtgagctgtccctgctggaggagcgcttccgggtgagggcggggcctggaggggcagacggggtgggctggacactggcccgtgtgcccaggcctgggacagccctggcctgtttcttcggaggtcctcagggagaggcggcggtgatggaagaacagggacttccaccacaggctccaggacatgtggactgaggggctgtggagtctgggcctgtggctcccgtctgccccatgggacttctgtagtgctgcagggtccctcgggtgctgtgggccagatccgggcggggacctactgtcctttgggggtgctcttctacgtcccttgtcggtgattggcaaggcctggtccttccaggcctctgggaggcagctcaccccagggtggcccacacctgttcctagcagggcgcctgggaatctagaacagtttagaggggaaagagccacagcaaagaaaagccgaggcagggtgatcacgaggtcaggagttcaagaccagcctggcaaacatggtgaagccctgtttctactaaaaatacaaaaattagctaggcatggtggcatgtgctgtagtcccagctactcgggaggctgaggcaggagaatcgcttgaacccgggaggcggaggttgcagtgagccgagattgtgccactgcactccagcctaggtaacagagcaggactccatctcagtcaatcaatcaatcaatcaatctcagcggttgaactacccttgacatggttcagctctgtatccacacccaaatgtcatgtcaaattgtaattcccagtgttgtgggagggacctggtgggaggtgattggctcatgggggccgacttcccccttgctgttctcgtgatattgagtgagcgcttgtgggatctggttgtttaaaagcgtgcagccctcccacttcactctctctgtctctcctgctccaacatggccagacgtgcctgcttccccttcgccttctgccgtgattgtcagtttcctgaggcctccccagccacgcttcctgtacagcctgcagaactctgccccagagcacatcagctatgtgccccagctctcaaacgacaccttggcggggaggctcaccctgtccaccttcacgctggagcagcctctaggccagttcagcagccacaacatctctgacttggataccatctggctggtggtggccctcagcaacgccacccagagcttcacggccccacggacaaaccaggacatccctgctcctgccaacttctcccagaggggctactatctcacactgagggccaaccgggtgctgtaccagaccagaggccagctccatgtcctccgcgtcggcaatgatacccactgccaaccaacaaaaattggctgcaaccatcccctaccaggacccggcccctacagggtgaagttcctggtgatgaatgacgaaggacccgtggctgaaacaaagtggtccagcgacactcgcctgcagcaagcccaggcacttcgggctgtccccggcccccagagcccgggcaccgtggtcatcatcgccatcctgtctatcctcctggccgtcctcctcacggtcctcctggctgtgctcatatacacctgcttcaacagctgcaggagcacttccctatcaggcccagaggaggcagggagtgtgagaagatacaccacgcacctcgcgttcagcactcctgccgagggggcttcctgaggggttccagaggggcccacgtgtccctccacctcctccctggcccaggctgcagagcctgagctgggacacgccctgaagcttctggaccctgagagagattgtttcttttctttactatttttttttttttttttgagacggagtctcactctgtcgccaggctggcgcgatcttggctcactgcaacctctgcctcacgggttcaagcgattttcctgcttcagcctcctgagtagctgggactacaggcacacgccaccatgcccagctcatttttgtatttttagtagagatggggtttcaccatgttggccaggatggcctccgtctcttgaccttgtgatccgcccgactcggcctcccaaaatgctgggattacaggcgtgagccatcaagtctggtgagagagattgtttctagatgagggtgggggcgggtgtccttagcccaaagcttgtgccagtctctatcagaaataaatgcccccaaaacctcc

SEQ ID NO: 167558 - DNA, 2553 bp, Homo sapiens
  Payload ID: 12962
  Gene Symbol: POLR2J3
  Gene Name: polymerase (RNA) II (DNA directed) polypeptide J3
  ENST ID: ENST00000489144
  CDS Start-End: 47-523
cggcggtggcggacacttggggtctggacgcaacggcggcgggagcatgaacgcccctccagccttcgagtcgttcttgctcttcgagggcgagaagatcaccattaacaaggacaccaaggtacccaatgcctgtttattcaccatcaacaaagaagaccacacactgggaaacatcattaaatcacaactcctaaaagacccgcaagtgctatttgctggctacaaagtcccccaccccttggagcacaagatcatcatccgagtgcagaccacgccggactacagcccccaggaagcctttaccaacgccatcaccgacctcatcagtgagctgtccctgctggaggagcgcttccgggtgagggcggggcctggaggggcagacggggtgggctggacactggcccgtgtgcccaggcctgggacagccctggcctgtttcttcggaggtcctcagggagaggcggcggtgatggaagaacagggacttccaccacaggctccaggacatgtggactgaggggctgtggagtctgggcctgtggctcccgtctgccccatgggacttctgtagtgctgcagggtccctcgggtgctgtgggccagatccgggcggggacctactgtcctttgggggtgctcttctacgtcccttgtcggtgattggcaaggcctggtccttccaggcctctgggaggcagctcaccccagggtggcccacacctgttcctagcagggcgcctgggaatctagaacagtttagaggggaaagagccacagcaaagaaaagccgaggcagggtgatcacgaggtcaggagttcaagaccagcctggcaaacatggtgaagccctgtttctactaaaaatacaaaaattagctaggcatggtggcatgtgctgtagtcccagctactcgggaggctgaggcaggagaatcgcttgaacccgggaggcggaggttgcagtgagccgagattgtgccactgcactccagcctaggtaacagagcaggactccatctcagtcaatcaatcaatcaatcaatctcagcggttgaactacccttgacatggttcagctctgtatccacacccaaatgtcatgtcaaattgtaattcccagtgttgtgggagggacctggtgggaggtgattggctcatgggggccgacttcccccttgctgttctcgtgatattgagtgagcgcttgtgggatctggttgtttaaaagcgtgcagccctcccacttcactctctctgtctctcctgctccaacatggccagacgtgcctgcttccccttcgccttctgccgtgattgtcagtttcctgaggcctccccagccacgcttcctgtacagcctgcagaactctgccccagagcacatcagctatgtgccccagctctcaaacgacaccttggcggggaggctcaccctgtccaccttcacgctggagcagcctctaggccagttcagcagccacaacatctctgacttggataccatctggctggtggtggccctcagcaacgccacccagagcttcacggccccacggacaaaccaggacatccctgctcctgccaacttctcccagaggggctactatctcacactgagggccaaccgggtgctgtaccagaccagaggccagctccatgtcctccgcgtcggcaatgatacccactgccaaccaacaaaaattggctgcaaccatcccctaccaggacccggcccctacagggtgaagttcctggtgatgaatgacgaaggacccgtggctgaaacaaagtggtccagcgacactcgcctgcagcaagcccaggcacttcgggctgtccccggcccccagagcccgggcaccgtggtcatcatcgccatcctgtctatcctcctggccgtcctcctcacggtcctcctggctgtgctcatatacacctgcttcaacagctgcaggagcacttccctatcaggcccagaggaggcagggagtgtgagaagatacaccacgcacctcgcgttcagcactcctgccgagggggcttcctgaggggttccagaggggcccacgtgtccctccacctcctccctggcccaggctgcagagcctgagctgggacacgccctgaagcttctggaccctgagagagattgtttcttttctttactatttttttttttttttttgagacggagtctcactctgtcgccaggctggcgcgatcttggctcactgcaacctctgcctcacgggttcaagcgattttcctgcttcagcctcctgagtagctgggactacaggcacacgccaccatgcccagctcatttttgtatttttagtagagatggggtttcaccatgttggccaggatggcctccgtctcttgaccttgtgatccgcccgactcggcctcccaaaatgctgggattacaggcgtgagccatcaagtctggtgagagagattgtttctagatgagggtgggggcgggtgtccttagcccaaagcttgtgccagtctctatcagaaataaatgcccccaaaacctcc

SEQ ID NO: 167559 - DNA, 1532 bp, Homo sapiens
  Payload ID: 12962
  Gene Symbol: POLR2J3
  Gene Name: polymerase (RNA) II (DNA directed) polypeptide J3
  ENST ID: ENST00000486319
  CDS Start-End: 129-479
acagggggcgatgagccgatccttgcgcgggtttgccccgccggagtaatccggaagaggcctcttattagggctctggtggcggcggtggcggacacttggggtctggacgcaacggcggcgggagcatgaacgcccctccagccttcgagtcgttcttgctcttcgagggcgagaagatcaccattaacaaggacaccaaggtacccaatgcctgtttattcaccatcaacaaagaagaccacacactgggaaacatcattaaatcacgtgcctgcttccccttcgccttctgccgtgattgtcagtttcctgaggcctccccagccacgcttcctgtacagcctgcagaactctgccccagagcacatcagctatgtgccccagctctcaaacgacaccttggcggggaggctcaccctgtccaccttcacgctggagcagcctctaggccagttcagcagccacaacatctctgacttggataccatctggctggtggtggccctcagcaacgccacccagagcttcacggccccacggacaaaccaggacatccctgctcctgccaacttctcccagaggggctactatctcacactgagggccaaccgggtgctgtaccagaccagaggccagctccatgtcctccgcgtcggcaatgatacccactgccaaccaacaaaaattggctgcaaccatcccctaccaggacccggcccctacagggtgaagttcctggtgatgaatgacgaaggacccgtggctgaaacaaagtggtccagcgacactcgcctgcagcaagcccaggcacttcgggctgtccccggcccccagagcccgggcaccgtggtcatcatcgccatcctgtctatcctcctggccgtcctcctcacggtcctcctggctgtgctcatatacacctgcttcaacagctgcaggagcacttccctatcaggcccagaggaggcagggagtgtgagaagatacaccacgcacctcgcgttcagcactcctgccgagggggcttcctgaggggttccagaggggcccacgtgtccctccacctcctccctggcccaggctgcagagcctgagctgggacacgccctgaagcttctggaccctgagagagattgtttcttttctttactatttttttttttttttttgagacggagtctcactctgtcgccaggctggcgcgatcttggctcactgcaacctctgcctcacgggttcaagcgattttcctgcttcagcctcctgagtagctgggactacaggcacacgccaccatgcccagctcatttttgtatttttagtagagatggggtttcaccatgttggccaggatggcctccgtctcttgaccttgtgatccgcccgactcggcctcccaaaatgctgggattacaggcgtgagccatcaagtctggtgagagagattgtttctagatgagggtgggggcgggtgtccttagcccaaagcttgtgccagtctctatcagaaataaatgcccccaaaacct

SEQ ID NO: 167560 - DNA, 958 bp, Homo sapiens
  Payload ID: 12962
  Gene Symbol: POLR2J3
  Gene Name: polymerase (RNA) II (DNA directed) polypeptide J3
  ENST ID: ENST00000513506
  CDS Start-End: 136-958
cagcccaacagggggcgatgagccgatccttgcgcgggtttgccccgccggagtaatccggaagaggcctcttattagggctctggtggcggcggtggcggacacttggggtctggacgcaacggcggcgggagcatgaacgcccctccagccttcgagtcgttcttgctcttcgagggcgagaagatcaccattaacaaggacaccaaggtacccaatgcctgtttattcaccatcaacaaagaagaccacacactgggaaacatcattaaatcacgtgcctgcttccccttcgccttctgccgtgattgtcagtttcctgaggcctccccagccacgcttcctgtacagcctgcagaacttctggcatggaaaagcccctgtgcaactggtaaagatatcaataagcaccaggaggtatctaaatccaccaggagccataggcatcacgttgacatccatttaccagtcttccctggcaagattcttctgaattgtgctgccttggccaaaagagctgccccagagcacatcagctatgtgccccagctctcaaacgacaccttggcggggaggctcaccctgtccaccttcacgctggagcagcctctaggccagttcagcagccacaacatctctgacttggataccatctggctggtggtggccctcagcaacgccacccagagcttcacggccccacggacaaaccaggacatccctgctcctgccaacttctcccagaggggctactatctcacactgagggccaaccgggtgctgtaccagaccagaggccagctccatgtcctccgcgtcggcaatgatacccactgccaaccaacaaaaattggctgcaaccatcccctaccaggacccggcccctacagggtgaagttcctggtgatgaatgacgaaggacccgtggctgaaacaaagtggtccagcgacactcgcc

SEQ ID NO: 167561 - DNA, 546 bp, Homo sapiens
  Payload ID: 12962
  Gene Symbol: POLR2J3
  Gene Name: polymerase (RNA) II (DNA directed) polypeptide J3
  ENST ID: ENST00000513438
  CDS Start-End: 63-284
attagggctctggtggcggcggtggcggacacttggggtctggacgcaacggcggcgggagcatgaacgcccctccagccttcgagtcgttcttgctcttcgagggcgagaagatcaccattaacaaggacaccaaggtacccaatgcctgtttattcaccatcaacaaagaagaccacacactgggaaacatcattaaatcgctggagtgcaatggcacgatcttgctcactgcaacctccgcctcccgggttcaagtgattctcctgcttcagccttcctagtagctgggactacaggcccacgccacgatgcccggctaatttttgtgtttttagtagagacggggattcactgtgttggccaggctggtctcgaactcctgacctcaggtgatccacctgctggcttcccaaagtgctgggattagagacgtgagctactgcgcccggccttacattcaccattaagtgcacattctgtaaatgaacgagcagcagattccagcacagtaggcctgtttgttattcatgctgagggacattg

SEQ ID NO: 167562 - DNA, 4630 bp, Homo sapiens
  Payload ID: 12962
  Gene Symbol: POLR2J3
  Gene Name: polymerase (RNA) II (DNA directed) polypeptide J3
  ENST ID: ENST00000511313
  CDS Start-End: 63-293
attagggctctggtggcggcggtggcggacacttggggtctggacgcaacggcggcgggagcatgaacgcccctccagccttcgagtcgttcttgctcttcgagggcgagaagatcaccattaacaaggacaccaaggtacccaatgcctgtttattcaccatcaacaaagaagaccacacactgggaaacatcattaaatcacgtgcctgcttccccttcgccttctgccgtgattgtcagtttcctgaggcctccccagccacgcttcctgtacagcctgcagaactgtgagtcaattaaacctcttttcttcataaattacccagtttctcatagttctttatagcagtgtgaaaacagactaatggacccttctggttgaaggaatgcagccattctgcttgtttgactatgtcctttctattcatctctatttcctgggaggtgtttatccaagtgcaataggaggtattggtgaccgcacagtcccctcagtgttctgctagtaaatagttgaaggttgatcattgatcttctgcgttttcagtctggcatggaaaagcccctgtgcaactggtaaagatatcaataagcaccaggaggtatctaaatccaccaggagccataggcatcacgttgacatccatttaccagtcttccctggcaagattcttctgaattgtgctgccttggccaaaagaggtatgggaggggctgggcgcagtggcttgtgcctgtaatcccaacattttgggaaaccaattcaggtggatcgttagaggtcaggggttcaagaccatcctggccaacatggtgacatcccatctctactaaaaatacaataagttagctgggtttggtgttgggtgcctgtaatcccagctactcgagaggctgaggcaggataatcgcttgaacctgggaggaggaggtggcagtgagctgagatcgtgccattgcactccagcgtgggcaacaagagtgaaacgtcgtctcaaaaaataaaaaaaaggtccgggcttgatggctcacacctgtaatcccagcactttgggaggccaagacgggtggatcacgaggtcaggagttcaagaccagcctggcctagatggtgaaaccctgtctctactaaaactacaaatattagctgggcatggtggcatgcacctgtaatctcagctactcagaagtctgatgcaggagaattgctaaaacccaggagggagaggttgcagtgagccgagattgcaccactgcactctagcctgggcgacagagcaagactccgtctcgaaagaaagaaagaaagaaaggaaattccccagggaagtacctcggctgatttcataaacaggtaccgaaggaagcagaggcatgtggaggacttccccacctcatgcagctatttgggccatggcgtctgaaatttattatttcagagtcacccctttgatgaccttggcagtgaactgcagtcatctgtttaggcctttccatggcccacgtcaatgccgttatttctgtttgttgcacatttgatttccttgttgttggcatttagaaggccccctgcttcccagatcacaccacgggcatggaccacagagattgcatcttgtgagtctgtagaaatggtcaaggccttgtcctctcttaggtccagagctcaggtgaatgcagattttcccggccatctgtgctgaagtccctgtggggaggctcctggctggtttcctgtaggtagacagctacacgtcctgcccttcattggcttcttttcatgaagctcctgccatctacaaaacatgtctcccttcttgaatcacatctctgttattgaaactctagaagtcaaccgggcatggtggctatgcctataatcccagcattttgggatgccaaggcgggtggatcacctgaggtcaggagttcaagaccagcctgaccaacatggcgaaaccccgtctctaatacaaatacaaaaattagccaagcatggtggtcactgtactccagcctgggtgacagagcaagactccgtctcaaaaaaaaaaaagagaaagaaagtatcatgcttttctgcattctgtgaattgttttagtgagttatcgaacttgagggcatggtgggaacctccaaatttgcagccagttggtgagaagtacatgtggtctgaggacacccaagcctgcaggtgtgtctaaagcgagggcagcctagtggggactggtggccttaacctgtggcatttgaggtaacatcagggagttgacatcagaattgcatcacataggctgggcgcggtggctcacgcctgtaatcctagcactttgggaggccaaggcgggcagatcacgaggtcaggagatcgagaccatcctggctaagacagtgaaatcccgtctctactaaaaattcaaaaaattagccaggcatggtggcgggcgcctgtagtcccagctactcgggaggctgaggcaggagaatggcgtgaacccaggaggcagagcttgcattgagccaagatcacgccaccgcactccagcctgggtgacagagcgagactccatcccccccaaaaagaaaaaagacaaaaaaaaaattgtgtcacacaggccagatgcagtggctcatgcttataatcccagcaatttgaaaggcaaggtaagaggatcgcttgagcttgagtctgaggccgcagtgagctatgaccacaccactgcaccccagtctgggtgacagcgcaagaccccaactccaaaaaggaaaaagaaaaatcacaaggaattgcatgtcagagtgcctgtctttcacagctttaactgctgcaggaacgaactttttttttttttttttttttgagagggggtgaggagacacaatctctgctagtgattctcctgcctcagcctcccaaatagctgggattataggcgtgcaccaccacgcctgcctaatttttgtatttttagtagagacagggtttcaccatgttggccaggctggtctcaaactcctgctgggatcatgggcgtgagccaccacgcccggccacctttagagttttcttaccacctggttttcctctctcaatatctttctctcatttcctgccttaaaactctagcttggcatctgggcgcagtagctcatgcctgtaatcccagcactttgggaggccgaggtaggtggatcacttgaagtcaggagttcgagaccagcctggccaacatggtgaaaccttgtctctactatttttacaaaagttagtcggacgtacagacgggtgcctgtagtcccagctacttgggaggctgaggcaggagaatttgtttgaacccagaggtgaaagttgcagggagccgaggttgtgccactgcactccagcctgggagacagagcaagactctgtctccaaaacaaacaaacaaacaaaaaaaccctgtagcttgggatcagccttctcttctattgtttttctttaaaaaataaaaattaaaaatagatgtagatgctatgttgctgaggctggcctcaaactcctggcctcaggtgatcctcccgccatgacctccaaaaccacagggattgtaggtgtgagcactgcacccagccttatgtttttttctacataaaaaacagcacaggattatcttccagagctaataaatatgttcaaataaccacaaccccattaaggaaaaatatcactgggcagcaaataatcaatccagaccaatatgatcacaattgctgtgaaggtgagaaaagttcatttttattatgtttccccaagagacgcactctattgttctcttgaaaacacacagctcatgtcctcctttagaacacacatcctctttaaagtaacatacaaacatgccaaaacaaggtaaaaaattacatctgaattctcacatttcaaatatatatgaaatatcaaataaaaatttatttttacaagaatttaggggaactactacatagctataaatgtaatatatatgttaactaagtatcatagataaaaaccatgctcccttcagcagcacgtgtaataatagatacaaagattgaaaggtaaaagatttaggatgaaaagaatcctctcttaaaaaggaaaacaaaattatatgtatgtgtatataacagttataatatccatcacacagctttatagaaacagcatctattcaaaaataccagtatttccaaaatatttaaaataatatttaaagtaataataatatttaaataaataaatatatttaataaatatttaaataaataaaataatatttaaataattctatacccatgtttttcaaaataaaccaataaaatagatagtatatattagacgtgttagtatatatatctgaggcatgttaaaaatcacaactgaattctcacaattcagtcacaaacctaaacagcaaataaaaatttctatcaccagaattatgtttttttctggtggggaactaccaatagctataaatagaagagattattatggaagtatcatagataaaaagagtgctcgcttcaggagcacatgtaataatacagaaacaaatttaaagataataaaatatttaggataaaaagaattgtctcttaaaaa

SEQ ID NO: 167563 - DNA, 1030 bp, Homo sapiens
  Payload ID: 12962
  Gene Symbol: POLR2J3
  Gene Name: polymerase (RNA) II (DNA directed) polypeptide J3
  ENST ID: ENST00000508848
  CDS Start-End: 33-380
acttggggtctggacgcaacggcggcgggagcatgaacgcccctccagccttcgagtcgttcttgctcttcgagggcgagaagatcaccattaacaaggacaccaaggtacccaatgcctgtttattcaccatcaacaaagaagaccacacactgggaaacatcattaaatcacaactcctaaaagacccgcaagtgctatttgctggctacaaagtcccccaccccttggagcacaagatcatcatccgagtgcagaccacgccggactacagcccccaggaagcctttaccaacgccatcaccgacctcatcagtgagctgtccctgctggaggagcgcttccggacgtgcctgcttccccttcgccttctgccgtgattgtcagtttcctgaggcctccccagccacgcttcctgtacagcctgcagaacttctggcatggaaaagcccctgtgcaactggtaaagatatcaataagcaccaggaggtatctaaatccaccaggagccataggcatcacgttgacatccatttaccagtcttccctggcaagattcttctgaattgtgctgccttggccaaaagagctgccccagagcacatcagctatgtgccccagctctcaaacgacaccttggcggggaggctcaccctgtccaccttcacgctggagcagcctctaggccagttcagcagccacaacatctctgacttggataccatctggctggtggtggccctcagcaacgccacccagagcttcacggccccacggacaaaccaggacatccctgctcctgccaacttctcccagaggggctactatctcacactgagggccaaccgggtgctgtaccagaccagaggccagctccatgtcctccgcgtcggcaatgatacccactgccaaccaacaaaaattggctgcaaccatcccctaccaggacccggcccctacagggtgaagttcctggtgatgaatgacgaaggacccgtggctgaaacaaagtggtccagcgacactcgcc

SEQ ID NO: 167564 - DNA, 532 bp, Homo sapiens
  Payload ID: 12962
  Gene Symbol: POLR2J3
  Gene Name: polymerase (RNA) II (DNA directed) polypeptide J3
  ENST ID: ENST00000507355
  CDS Start-End: 63-293
attagggctctggtggcggcggtggcggacacttggggtctggacgcaacggcggcgggagcatgaacgcccctccagccttcgagtcgttcttgctcttcgagggcgagaagatcaccattaacaaggacaccaaggtacccaatgcctgtttattcaccatcaacaaagaagaccacacactgggaaacatcattaaatcacgtgcctgcttccccttcgccttctgccgtgattgtcagtttcctgaggcctccccagccacgcttcctgtacagcctgcagaactatgatccgcccaccttggccacccaaagtgctgggattacaggtgtgaaccactgcgcccggccagaagtttttcttgtgagttgaggtgaacatctgaatcccctcggggaactgagactacagacaggggagcctctggggctgcagacactgcagacggacggacagacagatggacaacagctggaggcttggcccggccatagggctctctgcgggacagtcccagctgctagtgtcg

SEQ ID NO: 167565 - DNA, 544 bp, Homo sapiens
  Payload ID: 12962
  Gene Symbol: POLR2J3
  Gene Name: polymerase (RNA) II (DNA directed) polypeptide J3
  ENST ID: ENST00000608621
  CDS Start-End: 63-410
attagggctctggtggcggcggtggcggacacttggggtctggacgcaacggcggcgggagcatgaacgcccctccagccttcgagtcgttcttgctcttcgagggcgagaagatcaccattaacaaggacaccaaggtacccaatgcctgtttattcaccatcaacaaagaagaccacacactgggaaacatcattaaatcacaactcctaaaagacccgcaagtgctatttgctggctacaaagtcccccaccccttggagcacaagatcatcatccgagtgcagaccacgccggactacagcccccaggaagcctttaccaacgccatcaccgacctcatcagtgagctgtccctgctggaggagcgcttccggacgtgcctgcttccccttcgccttctgccgtgattgtcagtttcctgaggcctccccagccacgcttcctgtacagcctgcagaactgaggacaacgtgatcactgtattcagctccatcaagaatggtccaggttcttctagatgatctgcacaaatggttcctct

SEQ ID NO: 167566 - DNA, 2096 bp, Homo sapiens
  Payload ID: 12962
  Gene Symbol: POLR2J3
  Gene Name: polymerase (RNA) II (DNA directed) polypeptide J3
  ENST ID: ENST00000613744
  CDS Start-End: 60-536
agggctctggtggcggcggtggcggacacttggggtctggacgcaacggcggcgggagcatgaacgcccctccagccttcgagtcgttcttgctcttcgagggcgagaagatcaccattaacaaggacaccaaggtacccaatgcctgtttattcaccatcaacaaagaagaccacacactgggaaacatcattaaatcacaactcctaaaagacccgcaagtgctatttgctggctacaaagtcccccaccccttggagcacaagatcatcatccgagtgcagaccacgccggactacagcccccaggaagcctttaccaacgccatcaccgacctcatcagtgagctgtccctgctggaggagcgcttccgggtgagggcggggcctggaggggcagacggggtgggctggacactggcccgtgtgcccaggcctgggacagccctggcctgtttcttcggaggtcctcagggagaggcggcggtgatggaagaacagggacttccaccacaggctccaggacatgtggactgaggggctgtggagtctgggcctgtggctcccgtctgccccatgggacttctgtagtgctgcagggtccctcgggtgctgtgggccagatccgggcggggacctactgtcctttgggggtgctcttctacgtcccttgtcggtgattggcaaggcctggtccttccaggcctctgggaggcagctcaccccagggtggcccacacctgttcctagcagggcgcctgggaatctagaacagtttagaggggaaagagccacagcaaagaaaagccgaggcagggtgatcacgaggtcaggagttcaagaccagcctggcaaacatggtgaagccctgtttctactaaaaatacaaaaattagctaggcatggtggcatgtgctgtagtcccagctactcgggaggctgaggcaggagaatcgcttgaacccgggaggcggaggttgcagtgagccgagattgtgccactgcactccagcctaggtaacagagcaggactccatctcagtcaatcaatcaatcaatcaatctcagcggttgaactacccttgacatggttcagctctgtatccacacccaaatgtcatgtcaaattgtaattcccagtgttgtgggagggacctggtgggaggtgattggctcatgggggccgacttcccccttgctgttctcgtgatattgagtgagcgcttgtgggatctggttgtttaaaagcgtgcagccctcccacttcactctctctgtctctcctgctccaacatggccagacgtgcctgcttccccttcgccttctgccgtgattgtcagtttcctgaggcctccccagccacgcttcctgtacagcctgcagaactgtgagtcaattaaacctcttttcttcataaattacccagtttctcatagttctttatagcagtgtgaaaacagactaatggacccttctggttgaaggaatgcagccattctgcttgtttgactatgtcctttctattcatctctatttcctgggaggtgtttatccaagtgcaataggaggtattggtgaccgcacagtcccctcagtgttctgctagtaaatagttgaaggttgatcattgatcttctgcgttttcagtctggcatggaaaagcccctgtgcaactggtaaagatatcaataagcaccaggaggtatctaaatccaccaggagccataggcatcacgttgacatccatttaccagtcttccctggcaagattcttctgaattgtgctgccttggccaaaagaggtatgggaggggctgggcgcagtggcttgtgcctgtaatcccaacattttgggaaaccaattcaggtggatcgttagaggtcaggggttcaagaccatcctggccaacatggtgacatcccatctctactaaaaatacaataagttagctgggtttggtgttgggtgcctgtaatcccagctactcgagaggctgaggcaggataatcgcttgaacctgggaggaggaggtggcagtgagctgagatcgtgccattgcactccagcgtgggcaacaagagtgaaacgtcgtctc

SEQ ID NO: 167567 - DNA, 348 bp, Homo sapiens
  Payload ID: 12962
  Gene Symbol: POLR2J3
  Gene Name: polymerase (RNA) II (DNA directed) polypeptide J3
  ENST ID: ENST00000621093
  CDS Start-End: 1-348
atgaacgcccctccagccttcgagtcgttcttgctcttcgagggcgagaagatcaccattaacaaggacaccaaggtacccaatgcctgtttattcaccatcaacaaagaagaccacacactgggaaacatcattaaatcacaactcctaaaagacccgcaagtgctatttgctggctacaaagtcccccaccccttggagcacaagatcatcatccgagtgcagaccacgccggactacagcccccaggaagcctttaccaacgccatcaccgacctcatcagtgagctgtccctgctggaggagcgcttccggacgtgcctgcttccccttcgccttctgccgtga

SEQ ID NO: 167568 - DNA, 998 bp, Homo sapiens
  Payload ID: 12963
  Gene Symbol: POLR2K
  Gene Name: polymerase (RNA) II (DNA directed) polypeptide K, 7.0kDa
  Uniprot ID: P53803
  ENST ID: ENST00000353107
  CDS Start-End: 136-312
ggagtaagagagagagaaagagagacagcactgtgcgtcatgtaccagcgccggaagttggtctcgacacctggactagccgggttgtatttggaaacgcggagtgagtttttccgtgctgtgtaggggctaacaatggacacccagaaggacgttcaacctccaaagcagcaaccaatgatatatatctgtggagagtgtcacacagaaaatgaaataaaatctagggatccaatcagatgcagagaatgtggatacagaataatgtacaagaaaaggactaaaagattggtcgtttttgatgctcgatgaatgctgggaattcagaggaatgtcttcacttatacttggatttgctctcttcccatttctgattgttgtatagctttcgattttgcttacagtagttcccccttatcttcgggagatacattccaaggcccccagtgaactcctgaaacctcaaacagtaccaaacctttatacactgttttttccatatatatatacctatgataaagtataatgtataaattaagcatagcaagagattaataataatgtaatagaacaatgataacatactataataaaagttatgtgaatgtggttggtctctcttgctttcaaaatatcttcttgtacagtactcacctattttagaatgtggttgactacaggtaaccaaaaccacagaaagggaaactttggatgaggggggcactactgtacttaggaatacaactatatacatatgattttatttttaagaccatattatatttgggtatctactaatattttgtataaagcaattttttgttccattacgtgactttttgttttattgtatatgtaatttaacacacaataaagggtaaagttgcttccccaaaccacacttttaatcaaaacctagaatcatctgcagtccttgttaaaaatgcaggtttctagaaccctctgaagttctgattaaataaatttattgcaaacca

SEQ ID NO: 167569 - DNA, 543 bp, Homo sapiens
  Payload ID: 12963
  Gene Symbol: POLR2K
  Gene Name: polymerase (RNA) II (DNA directed) polypeptide K, 7.0kDa
  ENST ID: ENST00000522439
  CDS Start-End: 97-300
atgtaccagcgccggaagttggtctcgacacctggactagccgggttgtatttggaaacgcggagtgagtttttccgtgctgtgtaggggctaacaatggacacccagaaggacgttcaacctccaaagcagcaaccaatgatatatatctgtggagagtgtcacacagaaaatgaaataaaatctagggatccaatcagatgcagagaatgtggatacagaataatgtacaagaaaaggactaaaagatgtatccttttaacgatgctttctaaatatgagttaggaggaaatgaataatgctggggttgataaagattaatttctggttaaaatgataactttctggattacagtacttaaaaaacaaacatgattagcattttcatggaccaatgcataggctctaaataatctaaataatgctagttgattttggttctcataaatttattttttagggattctgtgcagtcaagcttgaggatagggatacattctgagaattgtgtccttaagcaatttcatcattcctacagaaac

SEQ ID NO: 167570 - DNA, 892 bp, Homo sapiens
  Payload ID: 12964
  Gene Symbol: POLR2L
  Gene Name: polymerase (RNA) II (DNA directed) polypeptide L, 7.6kDa
  Uniprot ID: P62875
  ENST ID: ENST00000322028
  CDS Start-End: 38-241
ccgggccgggccgggcagtctgggacgcgccgccgccatgatcatccctgtacgctgcttcacttgtggcaagatcgtcggcaacaagtgggaggcttacctggggctgctgcaggccgagtacaccgagggggatgcgctggatgccctgggcctgaagcgctactgctgccgccggatgctgctggcccacgtggacctgatcgagaagctgctcaattatgcacccctggagaagtgaccacgctggaacccacccacccgctgtgctgaccatgggccctgagcgtcctgccccgaattcacgaggctgaggcatccgggagctggcgtaatgcctggccgcagtgtgtgtgtatccgataccccactctggaaggaaccatccagtaaaggtctttcagaaccactaaggtcccagccctcactaggatgtcaggagccaggtctaggcccagctttcacactgtggcagcccagtgaagcagactgggccatgaactctcctagccctggggccagcctgttccacaggcacccctgcaggaggcgctgccaggagagccttccatctcggggctctttgaggttccctccttctgggtgttcttcaggctgagcagagaggctcctgtaccctctctctcggaatctgaagagccagatttaggccgggcaaaggggctcacccctataatcccaggactttgggaggccaaggcaggaggatcacttgagtccagaaattcaagacccgcctgggcatcataatgagaccccatctctacaacaaaatttaataaattagctgggcacagtgttcacacctgtagtcccggccactcggggctgaggcaggaggatcactggaacctgggaggttgccactgca

SEQ ID NO: 167571 - DNA, 585 bp, Homo sapiens
  Payload ID: 12964
  Gene Symbol: POLR2L
  Gene Name: polymerase (RNA) II (DNA directed) polypeptide L, 7.6kDa
  Uniprot ID: P62875
  ENST ID: ENST00000534030
  CDS Start-End: 22-225
agtctgggacgcgccgccgccatgatcatccctgtacgctgcttcacttgtggcaagatcgtcggcaacaagtgggaggcttacctggggctgctgcaggccgagtacaccgagggggatgcgctggatgccctgggcctgaagcgctactgctgccgccggatgctgctggcccacgtggacctgatcgagaagctgctcaattatgcacccctggagaagtgaccacgctggaacccacccacccgctgtgctgaccatgggccctgagcgtcctgccccgaattcacgaggctgaggcatccgggagctggcgtaatgcctggccgcagtgtatgttggaggcatggtctcgctgcccacaaagagccaccaccgtcttgcagcagctgtctgggaccacacggccaccggcctcctgtgagcggatccactcactgtctcgccagtcctgtgagttgttgctgccacagcagtggaactgcatcaagaacaaggctggggttgagacctggggccagaggctcctgcagaggtccagggaggccctggggatgcacgcgccctcccagcaccacccaccca

SEQ ID NO: 167572 - DNA, 4199 bp, Homo sapiens
  Payload ID: 12965
  Gene Symbol: POLR2M
  Gene Name: polymerase (RNA) II (DNA directed) polypeptide M
  Uniprot ID: P0CAP2
  ENST ID: ENST00000299638
  CDS Start-End: 215-1321
aacgctcctgcggacgcccccttctcccagtccgtgtttgtttccggaatttcaataaagctcgattcggctcgaagaagaccccgttcttccgggaaaatggcgactcccgctcgtgccccggagtcaccgccgtccgcggatccggcgctagtagcggggcctgccgaggaagccgagtgcccgccgccgcgccagcctcagcccgcgcagaatgtgctcgctgccccgcggcttcgagccccaagctcccgaggacttggcgcagcggagtttggtggagctgcgggaaatgttgaagcgccaggagagacttttgcgcaacgaaaaattcatttgcaaattgcccgacaaaggtaaaaagatctttgactcttttgccaaactgaaagctgccattgcagaatgtgaagaagttagaagaaaaagtgaactgtttaaccctgttagtttagactgtaagctaaggcaaaaagcaattgcagaagttgatgtgggtacagataaggcccagaattctgacccgatacttgatacttcatcactagttcctggatgttcctctgtagataacatcaagtcatctcaaacctcacaaaaccagggacttggacgtcctactcttgaaggtgatgaagagacttcagaggttgagtacacagtgaataagggcccagcttccagcaatagagacagggtaccaccttcatctgaagctagtgagcatcacccgcggcatcgtgtttcaagtcaagcggaagatacttccagcagctttgacaacctgtttattgacaggttacagaggatcaccattgcggaccaaggtgaacaacagtcagaagaaaacgcaagtactaagaacttgacaggcctttccagtgggactgagaagaaacctcattacatggaagtgctagaaatgcgagccaaaaacccagtgccccagctgcgtaaatttaaaaccaatgtgttaccttttcgacaaaatgattcatctagtcattgccagaagagtgggtctcctatttcctcagaagagcggcggcgcagggataagcagcatcttgatgacatcacagcagctcggcttctaccacttcaccatatgcccacgcagctgctctccatagaagaatccttggcacttcagaaacagcagaaacagaattatgaggagatgcaagcaaagctcgcagcgcaaaaattagctgaaagactgaatattaaaatgcggagttataatccagaaggggagtcttcagggagataccgagaagtaagggatgaagatgacgattggtcctctgatgaattctgaagataatctcctaaatcactgacgttgagatgtcatcatcttacatcagactttctaactagtatcaagatcagtgtcagatattgttgagggaagtaattttataaagttacacaaaggtagttataaaaaaagcccagtttgtctttcagaaggtgactttcatgtgcttgaaaagtttaatatttgaatattgtgtttaaccacatggtattaaaattttgcaatatattgtgtattggtctgatattttagtatatagtagaacatactttttttttctttaagccaaatgaaaagaggtaactttgcttttttcctttttcttacctatcaaatagcatttattacatgtctttcagtgaaatacttagttgttccaggcacctaaaatcaattaggaagacatagttcccttcttttttgggtaatgaagggagcagtctaaagaattgtatgcatgtttgcatggggttattgagacattggatgtgaaatacctaggaagacatgtatggagaatgcttaacaaatgctcttctcctttttctgtcttcccttaggaagaacgttatctctcttctgattaggaaggacttcccttttgagtagatgctggaaagtggaggttttttttgttggtttgtttgtttggttttgtgtttttttttgagatggggtcttgctctgtcgcccaggctggagtgcagtggcaggatctcggctcactgcaatctaggtggaggtctttttaaataacctcatgttacttcaggcaaatctggtacaggagaagcccaagctaactgagctgggtgaaggcttgtgcatcacctggcttgagttccttgctgtcacagatgataggttcatgtacacaacattaatgtttgataaggaaagcattttttttttgttaaaattgaattgtcagtactttacttttttccccccaaataggtatatatagactgcagaagcttcagtcccatatataaacgttcatgtcattttagaggattatatggttgtctccagagaaattaacttacattatcaaaaaattctttgtctaatatattggagtctttaaaagtgttgaagaataaaatattaattagaacaacttcaaatgctaaggtgatgttttaccgggacttaattaaatacaactttttcctttcgaaaaagactgttcacatttgcttccaggtgtaattattgctttcattccttacccccctcaagcaaatgtgaaaagtatactgacctaagattctcattagttttagttcttaaaacgaatagtaaatgatttcacagcgtaaaatttgatgttatttctggaagctggatgatatggaagagttcatgtgcctggacacacagttccctgtaatcctgccatctagggagataaactctgttaacattttgatgttgtgtttttgcttatttttctatgcatagttatgcatttatattctcaaaaatgaaatcataatgtacattgctttgtagtctgctctatatattgtcaatatgttcccatattaaatattttgctttttagacagctgtaggatattttatttcatgggtataccataactttaagatttatttcctattcagcaatttgattatgtattataatgtaatctgtaaatagtgatatgattaacatcttaatcacatccatagaaaatgacttatttccagaagataccgctctaaaaatgaaattgttaggtgaaagtgtttttgagaatttttatatatattactcactgcagagatcatgttcatttacattcccattagcaatatatccaatgctcagaattgaaaattactacttaaaatctttgcaaattgaataattacagaaaagggctacatttaaaatttgtatttgtttttcttacttagtgaaggttgtgttttttttcatattcattggccatgctatattcattcttttgagaattgctcattcatattttttctgttgcttgcttggagaatttgctctttttttggcatataagttcttaagaatgtccgtcctttgtcatatattgtaactttttttagccttatttgtcatttaacatagtttgtggtatttcagtatagaagttgttttctttaggagtctacctttgtgtatgtgcttgaaagtatttttgtaatccaagaatggataaatgtccttattttcttctagtattttcttatttcacttttacacctatctttaaaaggaatttaaattttgtttatatacattaactaaatcagtacaagtttggggtgaaaaggaaatttttaatccatctcaaatgtatttggttatattatataaggtagggatttgattttatttcgaagaatttaccaattggttcagtatgtgaaaccaccatttcccctctgattagtaatgctatttttatagaatattaaattcttatgtgtcttttgtgtcttaggccaatttctgggccttctgggttttttctacactgtcaataattatcgctttaattggtgttaatatttggtagtacacaggttctcccttgttcttttaaattttgtgaaatataacttacaaataagtacttaaaacagagcttaatgggtaaagcaacagctgtgtaatcacaaactagatgcagaggaggtcttgccagcactccaaaatctctgtgtgtcccctcttgacactcactgtttcccccagagctaactatcctgacgtatggtaattctccctctgtccttttaagaattattttaccagttatgtgtataacaatatggtttacattttgctcacttttgacttatataaaaatagaataatactata

SEQ ID NO: 167573 - DNA, 3629 bp, Homo sapiens
  Payload ID: 12965
  Gene Symbol: POLR2M
  Gene Name: polymerase (RNA) II (DNA directed) polypeptide M
  Uniprot ID: P0CAP2
  ENST ID: ENST00000380557
  CDS Start-End: 119-754
aaaatggcgactcccgctcgtgccccggagtcaccgccgtccgcggatccggcgctagtagcggggcctgccgaggaagccgagtgcccgccgccgcgccagcctcagcccgcgcagaatgtgctcgctgccccgcggcttcgagccccaagctcccgaggacttggcgcagcggagtttggtggagctgcgggaaatgttgaagcgccaggagagacttttgcgcaacgagttacagaggatcaccattgcggaccaaggtgaacaacagtcagaagaaaacgcaagtactaagaacttgacaggcctttccagtgggactgagaagaaacctcattacatggaagtgctagaaatgcgagccaaaaacccagtgccccagctgcgtaaatttaaaaccaatgtgttaccttttcgacaaaatgattcatctagtcattgccagaagagtgggtctcctatttcctcagaagagcggcggcgcagggataagcagcatcttgatgacatcacagcagctcggcttctaccacttcaccatatgcccacgcagctgctctccatagaagaatccttggcacttcagaaacagcagaaacagaattatgaggagatgcaagcaaagctcgcagcgcaaaaattagctgaaagactgaatattaaaatgcggagttataatccagaaggggagtcttcagggagataccgagaagtaagggatgaagatgacgattggtcctctgatgaattctgaagataatctcctaaatcactgacgttgagatgtcatcatcttacatcagactttctaactagtatcaagatcagtgtcagatattgttgagggaagtaattttataaagttacacaaaggtagttataaaaaaagcccagtttgtctttcagaaggtgactttcatgtgcttgaaaagtttaatatttgaatattgtgtttaaccacatggtattaaaattttgcaatatattgtgtattggtctgatattttagtatatagtagaacatactttttttttctttaagccaaatgaaaagaggtaactttgcttttttcctttttcttacctatcaaatagcatttattacatgtctttcagtgaaatacttagttgttccaggcacctaaaatcaattaggaagacatagttcccttcttttttgggtaatgaagggagcagtctaaagaattgtatgcatgtttgcatggggttattgagacattggatgtgaaatacctaggaagacatgtatggagaatgcttaacaaatgctcttctcctttttctgtcttcccttaggaagaacgttatctctcttctgattaggaaggacttcccttttgagtagatgctggaaagtggaggttttttttgttggtttgtttgtttggttttgtgtttttttttgagatggggtcttgctctgtcgcccaggctggagtgcagtggcaggatctcggctcactgcaatctaggtggaggtctttttaaataacctcatgttacttcaggcaaatctggtacaggagaagcccaagctaactgagctgggtgaaggcttgtgcatcacctggcttgagttccttgctgtcacagatgataggttcatgtacacaacattaatgtttgataaggaaagcattttttttttgttaaaattgaattgtcagtactttacttttttccccccaaataggtatatatagactgcagaagcttcagtcccatatataaacgttcatgtcattttagaggattatatggttgtctccagagaaattaacttacattatcaaaaaattctttgtctaatatattggagtctttaaaagtgttgaagaataaaatattaattagaacaacttcaaatgctaaggtgatgttttaccgggacttaattaaatacaactttttcctttcgaaaaagactgttcacatttgcttccaggtgtaattattgctttcattccttacccccctcaagcaaatgtgaaaagtatactgacctaagattctcattagttttagttcttaaaacgaatagtaaatgatttcacagcgtaaaatttgatgttatttctggaagctggatgatatggaagagttcatgtgcctggacacacagttccctgtaatcctgccatctagggagataaactctgttaacattttgatgttgtgtttttgcttatttttctatgcatagttatgcatttatattctcaaaaatgaaatcataatgtacattgctttgtagtctgctctatatattgtcaatatgttcccatattaaatattttgctttttagacagctgtaggatattttatttcatgggtataccataactttaagatttatttcctattcagcaatttgattatgtattataatgtaatctgtaaatagtgatatgattaacatcttaatcacatccatagaaaatgacttatttccagaagataccgctctaaaaatgaaattgttaggtgaaagtgtttttgagaatttttatatatattactcactgcagagatcatgttcatttacattcccattagcaatatatccaatgctcagaattgaaaattactacttaaaatctttgcaaattgaataattacagaaaagggctacatttaaaatttgtatttgtttttcttacttagtgaaggttgtgttttttttcatattcattggccatgctatattcattcttttgagaattgctcattcatattttttctgttgcttgcttggagaatttgctctttttttggcatataagttcttaagaatgtccgtcctttgtcatatattgtaactttttttagccttatttgtcatttaacatagtttgtggtatttcagtatagaagttgttttctttaggagtctacctttgtgtatgtgcttgaaagtatttttgtaatccaagaatggataaatgtccttattttcttctagtattttcttatttcacttttacacctatctttaaaaggaatttaaattttgtttatatacattaactaaatcagtacaagtttggggtgaaaaggaaatttttaatccatctcaaatgtatttggttatattatataaggtagggatttgattttatttcgaagaatttaccaattggttcagtatgtgaaaccaccatttcccctctgattagtaatgctatttttatagaatattaaattcttatgtgtcttttgtgtcttaggccaatttctgggccttctgggttttttctacactgtcaataattatcgctttaattggtgttaatatttggtagtacacaggttctcccttgttcttttaaattttgtgaaatataacttacaaataagtacttaaaacagagcttaatgggtaaagcaacagctgtgtaatcacaaactagatgcagaggaggtcttgccagcactccaaaatctctgtgtgtcccctcttgacactcactgtttcccccagagctaactatcctgacgtatggtaattctccctctgtccttttaagaattattttaccagttatgtgtataacaatatggtttacattttgctcacttttgacttatataaaaatagaataatact

SEQ ID NO: 167574 - DNA, 2896 bp, Homo sapiens
  Payload ID: 12965
  Gene Symbol: POLR2M
  Gene Name: polymerase (RNA) II (DNA directed) polypeptide M
  Uniprot ID: P0CAP2
  ENST ID: ENST00000482852
  CDS Start-End: 132-1223
ccgttcttccgggaaaatggcgactcccgctcgtgccccggagtcaccgccgtccgcggatccggcgctagtagcggggcctgccgaggaagccgagtgcccgccgccgcgccagcctcagcccgcgcagaatgtgctcgctgccccgcggcttcgagccccaagctcccgaggacttggcgcagcggagtttggtggagctgcgggaaatgttgaagcgccaggagagacttttgcgcaacgaaaaattcatttgcaaattgcccgacaaaggtaaaaagatctttgactcttttgccaaactgaaagctgccattgcagaatgtgaagaagttagaagaaaaagtgaactgtttaaccctgttagtttagactgtaagctaaggcaaaaagcaattgcagaagttgatgtgggtacagataaggcccagaattctgacccgatacttgatacttcatcactagttcctggatgttcctctgtagataacatcaagtcatctcaaacctcacaaaaccagggacttggacgtcctactcttgaaggtgatgaagagacttcagaggttgagtacacagtgaataagggcccagcttccagcaatagagacagggtaccaccttcatctgaagctagtgagcatcacccgcggcatcgtgtttcaagtcaagcggaagatacttccagcagctttgacaacctgtttattgacaggttacagaggatcaccattgcggaccaaggtgaacaacagtcagaagaaaacgcaagtactaagaacttgacaggcctttccagtgggactgagaagaaacctcattacatggaagtgctagaaatgcgagccaaaaacccagtgccccagctgcgtaaatttaaaaccaatgtgttaccttttcgacaaaatgattcatctagtcattgccagaagagtgggtctcctatttcctcagaagagcggcggcgcagggataagcagcatcttgatgacatcacagcagctcggcttctaccacttcaccatatgcccacgcagctgctctccatagaagaatccttggcacttcagaaacagcagaaacagaattatgaggaaagaccgttttacagccctcagtaccgcagttccatgaacttgctcagcttggcagccgcagctaaggacacccgtggtagtaaaagcgggaagatgggctccctggctcttcttaccaaactctgattgtttggagcagtttgaccatcatttagccaggaagacaccagaaggatggcgtgctgagagtgctagaagggagactgctgtccccacaatggctgcagccccattcctttttccaagctgcctgggtgaacattccaggatcctgacattctgtggaaattgatgagtgcttgctcaaaggtcgatgatgtgctacagatggcatcacctgttagagacagagctttctcaagaggagctttgatttcctttacttcccgaactgctatttcacagtctctcagtagatgtcagcagcacagcaaacatctcactgcccatcatggaagcaggaaaccgaggctccagagagctgggtatctttccaaggccttgacactgggaggtgatgagtcacggttggctctaaagcccaagctcttttcttcacaccttgatgccgtctagcctgtccatggaccaattagagccagtgaccaacaggtatatcaaaatgacatccctcctggatggcacatcctccccagacagcctgcccattccctggctctgacaggctagcaaatccctgataacctcggaatgcctcaagttgtgtcaatgaagggcattgagactttgatgttggacagatgccccatgatggatgggcactggctgatacagtttcccacggtgactcagaagtgcgaaggagaaaggagggctgaggtgccagctccaggcaggccaggcaccccagatgtcagcacctgcccgactgcctctgacataccctcagacataccttttggcatgtggagccccaggtgcctttcttcatgtccagataggaagactcatcttaaggggtgtggcagcaactgagcatgtgtaccaccacctgagctgtagttcttgtttctgtaagagaaaatgctcccacattatcctactacactctagacctcaaaggtgaggcagagcgtgagtcaagggatctgaaatgaaagcagttgtagtgaaaagcccatgaaatatagcgctcaagggtagctgagtcttgcaggctgtaatttatgctgtttcctgctttgagaatgtatcccaaccttttggttactagaaagcctcaatttgaatagtaaaagacctgaattctgggtcctctaacttctcttcatgtgtggctcagtctaacctgtagtttaagactcagacaccatgccttccaggaagccttccttgatgtctccaattctacattaattcctccagtatgagcttccacagtaacttaatcttaccctgaggtgtctatatcaaactgcttcctcacttgagggaaggcaccaggtcttgtttacatttttgctctatatcactacaacacaagagagaatgtgataaaggttgtaacagacccagaaaaaccactctaggagctctgagaagggtagttcatgtaaatacacacacatatacatatagttcatgtaaatatatgtatgtatacacacacacacacacacacacacagccttcatcaaggaagagattgctcttaggatgttttcagattcaagatgctgtaaaatttgtattgatgattgcttttctttctatcccttgtaatttctacacttacagctcattgttcttctcatagcattaaagtcttcagcatctgg

SEQ ID NO: 167575 - DNA, 1648 bp, Homo sapiens
  Payload ID: 12965
  Gene Symbol: POLR2M
  Gene Name: polymerase (RNA) II (DNA directed) polypeptide M
  ENST ID: ENST00000494490
  CDS Start-End: 149-265
tcggctcgaagaagaccccgttcttccgggaaaatggcgactcccgctcgtgccccggagtcaccgccgtccgcggatccggcgctagtagcggggcctgccgaggaagccgagtgcccgccgccgcgccagcctcagcccgcgcagaatgtgctcgctgccccgcggcttcgagccccaagctcccgaggacttggcgcagcggagtttggtggagctgcgggaaatgttgaagcgccaggagagacttttgcgcaacgagtaagctggggtcccgcggagtctccgccaggctccttcagctcgagctccctgggcgctcccctcccctcccgcactctgttcccttccctggaaggtgactttgactcagtcacattcgcttcagtcctacgggcgagtggacggagggcttgctgcggcagagccgtgcctcttcctggccaggcacaaaattcatttgcaaattgcccgacaaaggtaaaaagatctttgactcttttgccaaactgaaagctgccattgcagaatgtgaagaagttagaagaaaaagtgaactgtttaaccctgttagtttagactgtaagctaaggcaaaaagcaattgcagaagttgatgtgggtacagataaggcccagaattctgacccgatacttgatacttcatcactagttcctggatgttcctctgtagataacatcaagtcatctcaaacctcacaaaaccagggacttggacgtcctactcttgaaggtgatgaagagacttcagaggttgagtacacagtgaataagggcccagcttccagcaatagagacagggtaccaccttcatctgaagctagtgagcatcacccgcggcatcgtgtttcaagtcaagcggaagatacttccagcagctttgacaacctgtttattgacaggttacagaggatcaccattgcggaccaaggtgaacaacagtcagaagaaaacgcaagtactaagaacttgacaggcctttccagtgggactgagaagaaacctcattacatggaagtgctagaaatgcgagccaaaaacccagtgccccagctgcgtaaatttaaaaccaatgtgttaccttttcgacaaaatgattcatctagtcattgccagaagagtgggtctcctatttcctcagaagagcggcggcgcagggataagcagcatcttgatgacatcacagcagctcggcttctaccacttcaccatatgcccacgcagctgctctccatagaagaatccttggcacttcagaaacagcagaaacagaattatgaggagatgcaagcaaagctcgcagcgcaaaaattagctgaaagactgaatattaaaatgcggagttataatccagaaggggagtcttcagggagataccgagaagtaagggatgaagatgacgattggtcctctgatgaattctgaagataatctcctaaatcactgacgttgagatgtcatcatcttacatcagactttctaactagtatcaagatcagtgtcagatattgttgagggaagtaattttataaagttacacaaaggtagttataaaaaaagcccagtttgtctttcagaaggtgactttcatgtgcttgaaaagtttaatatttgaatattgtgtttaa

SEQ ID NO: 167576 - DNA, 910 bp, Homo sapiens
  Payload ID: 12965
  Gene Symbol: POLR2M
  Gene Name: polymerase (RNA) II (DNA directed) polypeptide M
  ENST ID: ENST00000464277
  CDS Start-End: 141-257
aagaagaccccgttcttccgggaaaatggcgactcccgctcgtgccccggagtcaccgccgtccgcggatccggcgctagtagcggggcctgccgaggaagccgagtgcccgccgccgcgccagcctcagcccgcgcagaatgtgctcgctgccccgcggcttcgagccccaagctcccgaggacttggcgcagcggagtttggtggagctgcgggaaatgttgaagcgccaggagagacttttgcgcaacgagtaagctggggtcccgcggagtctccgccaggctccttcagctcgagctccctgggcgctcccctcccctcccgcactctgttcccttccctggaaggtgactttgactcagtcacattcgcttcagtcctacgggcgagtggacggagggcttgctgcggcagagccgtgcctcttcctggccagaaaattcatttgcaaattgcccgacaaaggtaaaaagatctttgactcttttgccaaactgaaagctgccattgcagaatgtgaagaagttagaagaaaaagtgaactgtttaaccctgttagtttagactgtaagctaaggcaaaaagcaattgcagaagttgatgtgggtacagataaggcccagaattctgacccgatacttgatacttcatcactagttcctggatgttcctctgtagataacatcaagtcatctcaaacctcacaaaaccagggacttggacgtcctactcttgaaggtgatgaagagacttcagaggttgagtacacagtgaataagggcccagcttccagcaatagagacagggtaccaccttcatctgaagctagtgagcatcacccgcggcatcgtgtttcaagtcaagcggaagatacttccagcagctttgacaacctgtttattgacag

SEQ ID NO: 167577 - DNA, 6640 bp, Homo sapiens
  Payload ID: 12966
  Gene Symbol: POLR3A
  Gene Name: polymerase (RNA) III (DNA directed) polypeptide A, 155kDa
  Uniprot ID: O14802
  ENST ID: ENST00000372371
  CDS Start-End: 139-4311
gggacactctacggtggccgagaggatgccgcagatgtgttagcggcgagtccagaagcagccccaggaggtgctgggggcatcgtttctctaatctggcctcccgagtgccaaggaggcgtcccggcagcggtcatcatggtgaaggagcagttccgggagacggatgtggccaagaaaataagccacatctgttttggaatgaagtcacctgaggagatgcgccagcaggcgcacatccaagttgtgagtaagaacctgtacagccaggacaaccaacatgcccccttgctatatggggtgctcgaccataggatgggtacgagtgagaaggatcgtccatgtgaaacctgtgggaaaaacttggctgactgtctaggccactatgggtatatcgacctggagttgccgtgttttcatgtagggtacttcagagcagtcataggcatcttacagatgatctgcaaaacctgctgccacatcatgctgtcccaagaggagaagaagcagtttctggactatctaaagaggcccggcctgacctaccttcagaagcgaggactgaaaaagaaaatctctgacaagtgccggaagaaaaacatctgccatcactgtggcgcttttaatggtaccgtaaagaagtgtggactgctgaaaataattcatgagaaatacaagaccaacaaaaaagtggtggatcccattgtatcaaatttccttcagtcttttgaaacagccattgaacataataaagaagtggagcctctgctgggaagggcacaggaaaacttgaatcccttagtagttctgaatttatttaaacgaatcccagctgaagatgttcctctacttctgatgaacccagaagccggaaagccgtctgatttgattctcacacgacttttggtgcctcctttgtgtatcagaccctccgttgtgagtgatttgaagtctggcaccaatgaagatgatctgacaatgaaactgacagaaatcattttcctaaacgatgttattaaaaagcatcggatctcaggagccaagacccagatgatcatggaggactgggatttcctgcagctgcagtgtgccctctacattaacagtgagctctcgggcattcccctcaacatggcacccaagaagtggaccagaggcttcgtccaacgcctgaagggaaaacagggtcgatttagaggaaatctctcaggaaagagagtggatttttctggcagaacagtcatctcgcccgaccccaacctccggattgatgaggtagctgtgccagttcatgtggccaaaattctaacttttcctgagaaggtaaacaaagcaaacatcaatttcttgaggaaactggttcaaaacggccctgaggttcacccaggagcaaacttcattcagcagagacatacgcagatgaaaaggtttttgaaatacggaaatcgagaaaagatggctcaagagctcaagtatggtgacatcgtagagagacacctcatcgatggagatgtggtgctgttcaatcggcagccctcgctgcacaaattgagcattatggctcatctggccagggtcaagccccaccggaccttcagatttaatgagtgtgtctgtacaccctataatgctgactttgatggtgatgaaatgaaccttcatcttcctcaaacagaagaagctaaagcagaggcccttgttctgatggggactaaagcaaatcttgtaaccccgaggaatggggaaccgctgattgctgctattcaggattttctaacaggtgcctatctcctcactctcaaggacactttctttgatcgagccaaggcttgccaaatcattgcttcaatactggttggcaaggatgagaaaattaaagttcgcctcccaccgcctacaatcctaaagcctgtcaccctgtggacgggaaagcagatcttcagtgtcatcctcaggcctagcgatgacaatccagtgagggccaacctgcgaaccaagggcaagcagtactgtggcaaaggggaagatctctgtgccaatgattcctatgttacaatccagaacagtgagttgatgagtggcagcatggacaaaggaaccctagggtcaggatccaagaacaatattttttacattttgctgcgagactggggacagaatgaagctgcagatgccatgtcacggctcgccaggctggctcctgtctacctgtctaaccgtggtttctcaattgggatcggtgatgtcacacctggccaaggactgctgaaggccaagtatgagttgctgaatgccggctacaagaaatgtgatgagtacatcgaagccctgaacacgggcaagctgcagcagcagcctggctgcactgctgaggagaccctggaggcactgatcctgaaggagctgtctgtgatccgtgaccacgctggcagtgcctgcctccgggagctggacaagagcaacagccccctcaccatggctctgtgcggctccaaaggttccttcattaacatatcacagatgattgcctgtgtgggacagcaggccatcagtggctctcgagtgccagacggctttgaaaacaggtccttgcctcattttgaaaaacactcaaagctcccagctgccaaaggctttgtggctaatagcttttattccggtttgacaccaactgagtttttcttccacacaatggccggccgggaaggtctagtcgacacggctgtaaagacagctgaaacgggatacatgcagcgaaggcttgtcaaatctcttgaagatctttgctcccagtatgatctgacagtccgaagctctactggcgatattatccagttcatttatggaggagatggcttagatcctgcagctatggagggaaaagatgaacctttggagtttaaaagggttctggacaacatcaaagcagtcttcccgtgtcccagtgagcctgctctcagcaaaaacgagctgatcctgaccacagagtccatcatgaagaagagtgagttcctctgctgccaggacagcttcctgcaggaaataaaaaaattcattaagggggtctctgagaagatcaagaaaaccagagataaatatggcatcaatgataacggcacaacagagccccgtgtgctgtaccagctggaccgcatcacccccacccaagtagaaaagtttctggagacctgtagggacaagtacatgagggcacagatggagccaggttctgcagtgggtgctctgtgtgcccagagcattggtgagccaggcacccagatgaccctgaagactttccactttgcaggtgtggcctccatgaacatcaccctgggcgtgccccggattaaagagatcatcaacgcttccaaggccatcagcactccaattatcacagcacagctagacaaggatgacgacgcggattatgctcgcctcgtgaaagggagaattgagaaaaccctcttgggagagatttccgagtatattgaagaagtgtttcttcctgatgactgctttattctcgtcaagctctccctggaacggattaggcttctgagactggaagtgaacgctgagacagtgagatattccatctgcacatccaagctccgtgtgaagcccggtgatgtggctgttcatggtgaggctgtggtgtgtgtcacccccagagagaacagcaagagctccatgtactacgtgctgcagttcctgaaagaggatctccccaaggtggtggtgcagggcattccagaggtgtccagagctgtcatccacattgacgagcagagtggaaaggagaagtacaagcttctggtggaaggtgataacctgcgggcagtcatggccacacacggtgtgaagggcacccgaaccacctccaataacacctatgaggtggagaaaactctgggcatcgaggccgcccggacaacgatcatcaatgaaatccagtacaccatggtgaaccacggcatgagcatcgacaggaggcacgtgatgctgctctccgacctcatgacctacaagggtgaagtcctgggcatcactaggtttggcctggccaagatgaaggagagtgtgctgatgctggcctcctttgagaagacggctgaccatctctttgacgctgcctacttcgggcagaaggactctgtgtgtggggtgtctgagtgcatcatcatgggaatcccaatgaacattggaaccgggctcttcaagctgcttcacaaggctgacagggacccgaaccctcccaagaggcccctgatcttcgacacaaatgaattccacatcccccttgtcacatagtccaaagaaagaggggaccatgcctgaccttgactccttgtcctgtctccagctgatgtataaagagttttgtgctccctgggacgggggtcctgaggtccccacctatgccagcaatcagagaagccctcttggcatccccaggagcagcttctcctctgatagggtgcagctcacaccagtgaccctgactgtgccacgctgctcgggagagctgagggttttattgtttgcttgcttgaaacctaatctatagacggccccacagctcgtgcacacactgcttccctggacttaaagcccagccaggtgtcatggtccatcccagctcactgcatacatccatcggctccccatggtgtcttcacacctgacgatgagccaggcctgagccccacacaggccagggcacattcttggattttccattccttggtcatgctggaatctctcaatgtgacatacttatgtaaatattgttactattatttatttgttccatttgagggatttggaatttttgttattttagttttatttttgaaaccaagcatctatagaaaccaagaaagtcagcatgtaagcgtcactggaaaaactggtttaagcaaatagagccgtctgggatttgtaactgaggtgcaactgtcatgaggcccaggcagctctgtaacatcttctatagatgcccctggctaccctgttgttttcatctacctcagacccctatcatggggctctaccctgtgacaagagccaaacccattctccatggcctatggaagcctcactggagtttggggcctgctgcaatggggatgagatggttttttgtagaattatacttacgttccttggatgatctctagttgattttttaagttctgagttgatgctgttaaggtacccggggtagccattggttcttggatctgtgttagaatgagtgctttcccttcctactgatgtgattgtggattaggaattcgtgaccgagtgatttttggccagtggttgggtttaaaattctattaaaatttgtagtttgggctgggtgctgtggctcatacctataatcccagcactttgggaggccgaggggggcagatcacttgagcccaggagttcgagagcagcctgggcaacatgacgaaaccccgtctctacagagaatacaaaaattagccaggcatggtggcccatgcctgtagtacctgctattggtaaggctgaggtggaaggttcacttgagcctgggaggtggaggttgtagtgagccaagatcgtgccactacactccagcctgggcaacaaagcaagaccttgtctcaaaaaaaaaaaagaaaaaaattaagcgtaaaaaaaaattagtttttataaaaaattatagtttgaccttttgatttccctgcatctacaaggtagacctattaacttctcttggggtatcagtgatgtggaaaaaaaatgccatttttcttaatgtttaacccccctttatctttgaattgagctagagcctggtttaggacaaaggattaagtttgttaatgaacactaattcagggcttctacttgagaccccaccgagatcaccagttctcatgtaacctgggaagagccataaaggggtaccccccaccccaactgccttcctggaagcatgcctgggaagtaagctgtaggcctgatccgagccaggaccactgggatccgtgcaaaggccaggggagggtagaattgaatcataggagtgaactccggcacctgttgtcttctgcgggtgacgcacactttaaatggaagagaggttgtggctataacttgtggctgggaataataaagatggcaccgccaaggagcctcaccttgcgtgagtgagtactcagttgggcgctgcagggtctggagtctgtgtgagacgtgtgtgattgtgatgggtgcgaatcagcgtatagcacttgagaacaaggcagaccttggagcagaatggttatgtgaaggatcacatcacccatgggtagggggggaagtcatacgtcctggaggtgctggtcctcctcctggaactgccagccttgctaggactatcaacatcaacagcattgcctggtaaaccctactgtttgtgctccccactgtgtcccatgactggtgttaaaattctccctactttgatcatctgccctgcccaggccttgggctttatgccagcacagagctcaaaggccaggtagcagcacatcctcaagcatgagagctcaaagggttacatttgagtctctgtacctgcttggaagaaataaaaatacgtgtgaattccatctca

SEQ ID NO: 167578 - DNA, 1022 bp, Homo sapiens
  Payload ID: 12966
  Gene Symbol: POLR3A
  Gene Name: polymerase (RNA) III (DNA directed) polypeptide A, 155kDa
  ENST ID: ENST00000473588
  CDS Start-End: 1-599
acatcaatttcttgaggaaactggttcaaaacggccctgaggttcacccaggagcaaacttcattcagcagagacatacgcagatgaaaaggtttttgaaatacggaaatcgagaaaagatggctcaagagctcaagtatggtgacatcgtagagagacacctcatcgatggagatgtggtgctgttcaatcggcagccctcgctgcacaaattgagcattatggctcatctggccagggtcaagccccaccggaccttcagatttaatgagtgtgtctgtacaccctataatgctgactttgatggtgatgaaatgaaccttcatcttcctcaaacagaagaagctaaagcagaggcccttgttctgatggggactaaagcaaatcttgtaaccccgaggaatggggaaccgctgattgctgctattcaggattttctaacaggtgcctatctcctcactctcaaggacactttctttgatcgagccaaggcttgccaaatcattgcttcaatactggttggcaaggatgagaaaattaaagttcgcctcccaccgcctacaatcctaaagatgttacaatccagaacagtgagttgatgagtggcagcatggacaaaggaaccctagggtcaggatccaagaacaatattttttacattttgctgcgagactggggacagaatgaagctgcagatgccatgtcacggctcgccaggctggctcctgtctacctgtctaaccgtggtttctcaattgggatcggtgatgtcacacctggccaaggactgctgaaggccaagtatgagttgctgaatgccggctacaagaaatgtgatgagtacatcgaagccctgaacacgggcaagctgcagcagcagcctggctgcactgctgaggagaccctggaggcactgatcctgaaggagctgtctgtgatccgtgaccacgctggcagtgcctgcctccgggagctggacaagagcaacagccccctcaccatggctctgtgcggctccaaag

SEQ ID NO: 167579 - DNA, 1668 bp, Homo sapiens
  Payload ID: 12966
  Gene Symbol: POLR3A
  Gene Name: polymerase (RNA) III (DNA directed) polypeptide A, 155kDa
  ENST ID: ENST00000616246
  CDS Start-End: 392-880
ctgcagtgggtgctctgtgtgcccagagcattggtgagccaggcacccagatgaccctgaagactttccactttgcaggtgtggcctccatgaacatcaccctgggcgtgccccggattaaagagatcatcaacgcttccaaggccatcagcactccaattatcacagcacagctagacaaggatgacgacgcggattatgctcgcctcatgactgctttattctcgtcaagctctccctggaacggattaggcttctgagactggaagtgaacgctgagacagtgagatattccatctgcacatccaagctccgtgtgaagcccggtgatgtggctgttcatggtgaggctgtggtgtgtgtcacccccagagagaacagcaagagctccatgtactacgtgctgcagttcctgaaagaggatctccccaaggtggtggtgcagggcattccagaggtgtccagagctgtcatccacattgacgagcagagtggaaaggagaagtacaagcttctggtggaaggtgataacctgcgggcagtcatggccacacacggtgtgaagggcacccgaaccacctccaataacacctatgaggtggagaaaactctgggcatcgaggccgcccggacaacgatcatcaatgaaatccagtacaccatggtgaaccacggcatgagcatcgacaggaggcacgtgatgctgctctccgacctcatgacctacaagggtgaagtcctgggcatcactaggtttggcctggccaagatgaaggagagtgtgctgatgctggcctcctttgagaagacggctgaccatctctttgacgctgcctacttcgggcagaaggactctgtgtgtgcctggccccaaccctgagacctgtatgaaggtggatagtccacactcagaaaagagaagcaggatggtagtcatggaagctggaatctgccaaggagtatggaacaactcaccagccaaatgaactcgtcctaaaaatatggatctaatttttttaaaaaagaaaaggccaagtgcagtggctcacacccataatcccagcatcccagcacttgggaggccgaggtagatggatcacttgaggtcaggagttcgagatcagcctggccaacatggtgacaccccatctctactaaagatacaaaaattagccaggcatggtggcatgtgcctgtagtcccagctactcgggaggctgaagcatgagaatcgcttggacctgggaggcagaggctgcggtgagccaaaattgcgccaatgcactccagcctgggtgacagaagaagaccctgtttcagggggaaaaaaaagaaaaagaaaggaaagggaaaaaacatgaagagagcccagtgtatccagacccgagtctcatcaccttctcaggaagctttttgggttgtccaggccttaagtaggcctgtgcttccaaacttcatttctgggaggagtgccagtgggctggggaagtcggaggctagaagaagcctgttcttgtaccttgcagtctgttccaccaccgaggaacaggcctgacccgagtggcctgcagtaaagctccgagtcagggagcatggtataatcacctgacactggtgttacaggtaaatcacaatctctccccatagacaacatgatcttcctcatgt

SEQ ID NO: 167580 - DNA, 4273 bp, Homo sapiens
  Payload ID: 12967
  Gene Symbol: POLR3B
  Gene Name: polymerase (RNA) III (DNA directed) polypeptide B
  Uniprot ID: Q9NW08
  ENST ID: ENST00000228347
  CDS Start-End: 223-3624
accagagggcgtactttccttactcggcctcggccacatccgggttccaccgcagattcgggcagggagcgggcggaacctttctaccgcgtctctagctaacacgcacggcggggacagtttaggcctccgcgcaccgttcgccgggagtcttgcagtttgcttggtgcagggaaggcgggcgcggaggttctatctgtttcttcctccttcgtgagcagcatggacgtgctagcggaggagtttgggaacctgactccggagcagctggcggcgccgatcccgactgtagaggaaaaatggaggctgcttccagcatttttaaaggtgaaaggccttgtgaaacagcatatagattcatttaactatttcattaatgtagagataaagaagataatgaaagccaatgaaaaggttacaagtgacgctgaccctatgtggtacttaaaatatcttaatatctatgttgggcttcctgatgttgaagaaagcttcaatgtaactagaccagtgtcccctcatgagtgccgtttgagagacatgacatactctgcccctattacagtggatattgaatatacccgaggcagccagaggatcatccgcaatgccttacctatcggcagaatgcccataatgctacgtagttcaaactgtgttcttacaggaaaaacgccagcagaatttgccaaactgaacgaatgtcccttagatccaggtggctacttcattgttaaaggagtagaaaaagttattcttatccaagagcagctgtctaagaacaggatcatcgtggaggctgatagaaaaggggctgttggagcttcagttaccagctctacccatgagaaaaaaagcagaaccaatatggctgtgaaacaaggacgattttatttgaggcataatactttgtcagaagatatacccattgtcatcatatttaaggccatgggtgttgagagtgaccaggaaattgtgcagatgattggaacagaggagcacgtgatggctgcatttgggcccagtctggaagagtgccagaaagctcagattttcacacagatgcaggcattaaaatatatagggaacaaagtaagaaggcaaaggatgtggggaggtggaccaaagaaaaccaaaatagaagaagcaagagagctcctggcttccaccattctgacccatgtcccagttaaggaattcaatttccgagccaaatgtatctatactgcagtgatggtgcgaagagttattctggcccaaggagataataaagttgacgacagagattattatggtaacaagcgactggaattggcaggacagcttttatctcttctttttgaagacttgttcaaaaaatttaattctgaaatgaaaaagattgccgaccaggtgattcctaagcaaagagcagcccagtttgatgttgtcaaacacatgcgccaagaccagatcaccaatggcatggtgaatgctatttctaccggaaattggtctttaaagagatttaaaatggaccgccagggtgtaacccaagtgctgtctcgcttgtcatatatatccgcactgggcatgatgacaagaatctcttcccagtttgaaaaaacgagaaaagtgagtggtcctcgctccctccagccatctcagtggggaatgctgtgtccttcggacactcctgaaggagaggcatgtggtttggttaaaaacttggcccttatgacacacatcacaactgatatggaagatggacccattgttaaattagccagtaacttgggagtagaagatgtgaatttattatgtggggaagagctctcttacccaaatgtgtttcttgtctttcttaatggtaacatcttaggtgtcattcgagaccacaaaaagctagtgaatacatttcgactcatgagaagagcaggatatatcaatgaatttgtttccatctcaacaaatcttacagatcgatgtgtctatatttcttctgatgggggaaggctatgcagaccctacataattgtcaagaaacagaagccagcagtcacaaataaacatatggaagagctggcccaagggtacaggaattttgaagatttcttacatgagagtctggttgaatatttagatgtgaatgaagaaaatgattgtaacattgcactgtacgaacacacaattaataaagacaccacccacttggagattgaacccttcactcttctcggcgtgtgtgctggacttatcccataccctcaccataaccagtcaccgagaaacacttatcagtgtgccatggggaaacaagccatgggtactataggatacaaccagcgaaacagaattgatactctcatgtatctactagcatatccacaaaaacccatggttaagacaaaaaccattgaattgatagaatttgagaaactgccagctggacagaatgcaacagttgctgtgatgagctatagtggctatgatattgaagatgctcttgttttaaacaaggcctctttagacagaggctttgggcgttgccttgtatataaaaatgctaaatgtacgttgaaacgatacaccaatcagacttttgataaagtgatggggcccatgttggatgctgctacaaggaaacctatctggcgacatgaaatcttagatgcagatggtatttgttctccaggtgagaaagtagaaaacaaacaagtgcttgtaaataagtccatgcccacagtgactcagattcctttggaaggaagtaatgtaccacagcaaccacagtacaaagatgtacccataacctacaaaggagcaacagactcatatattgaaaaagtgatgatatcttcaaatgctgaagatgcttttctgatcaaaatgctgctgagacagacaaggcgtccagaaattggagacaaattcagcagtcgtcatgggcaaaaaggtgtttgtggcttgatcgtcccccaggaagacatgccattttgtgattctggcatctgtccggacatcatcatgaacccacacggcttcccatcacgaatgacggtggggaagctcattgagctgctggctggcaaggccggtgtgctggacggcagattccactacggcactgcgtttggaggcagtaaagtgaaggatgtgtgtgaggacctcgttcgccatggttataactacttggggaaagactatgttacatccggcatcacaggtgagcccttagaagcatacatctattttggccccgtgtactatcagaagctgaaacacatggtgctagataaaatgcatgcccgggcccggggcccacgagccgtccttaccaggcaacccactgaaggacggtctcgtgatggtggcttgcgtctcggggaaatggaacgtgactgtttaatcggttatggagccagtatgcttttgctagagagactaatgatttcaagtgatgcctttgaggttgatgtctgtgggcagtgtggacttctggggtattctggctggtgccattactgcaagtcatcctgccacgtgtcttccctccgtattccgtatgcctgcaagctgctcttccaggaactacagtctatgaacatcatccccaggttaaaactgtccaagtacaatgaatgaggatggaaaaaatgattattaaagagaacaagtgatacatccaatgcaacggaaagcagaagggatttaggactacgtctcctcctgtgaagaattcccttgcgtattctctctctaaaacaaccaaaaaaaaatggagaggctttttatatactctaagactggctaaacaaccttgatcattgagcctcgagccatgggagagatgctgaccatgtggactgcaaggctgcttgattcacagatggatgtgacctaaaggataaataagctattacttatgtgctgatctcttgacattcactcattagaagaccttactccttcaagcaaatgtttggggtcaaatttaccatatcttctggctaaccatattcaagattcttctgaaacttggaggatgtaaagaatccatttgatttggtcagcctggcttttgtcgtggtggctggctcggataaattttcccaacaattaaatcttgcctttacacacccaaactttgtaattttagtcttggtgaaatataatgaatttgttcctaccttgtcaagcaagaatgtcgtcttctcctatggactcaattgctattattttaaacctgcatgattgtaccatgcaatactattcgttaaatatctgaatctaa

SEQ ID NO: 167581 - DNA, 4118 bp, Homo sapiens
  Payload ID: 12967
  Gene Symbol: POLR3B
  Gene Name: polymerase (RNA) III (DNA directed) polypeptide B
  Uniprot ID: Q9NW08
  ENST ID: ENST00000539066
  CDS Start-End: 244-3471
agagcgtcgcgcttgcgagtcttttttccagagccggcctccgcgtgcgcgagtgaaggctgatcccagaggagctgtcagccgctgcgggggccgagaagccccgctgctggctctagggttggagctcttccagcataggaaaaatggaggctgcttccagcatttttaaaggtgaaaggccttgtgaaacagcatatagattcatttaactatttcattaatgtagagataaagaagataatgaaagccaatgaaaaggttacaagtgacgctgaccctatgtggtacttaaaatatcttaatatctatgttgggcttcctgatgttgaagaaagcttcaatgtaactagaccagtgtcccctcatgagtgccgtttgagagacatgacatactctgcccctattacagtggatattgaatatacccgaggcagccagaggatcatccgcaatgccttacctatcggcagaatgcccataatgctacgtagttcaaactgtgttcttacaggaaaaacgccagcagaatttgccaaactgaacgaatgtcccttagatccaggtggctacttcattgttaaaggagtagaaaaagttattcttatccaagagcagctgtctaagaacaggatcatcgtggaggctgatagaaaaggggctgttggagcttcagttaccagctctacccatgagaaaaaaagcagaaccaatatggctgtgaaacaaggacgattttatttgaggcataatactttgtcagaagatatacccattgtcatcatatttaaggccatgggtgttgagagtgaccaggaaattgtgcagatgattggaacagaggagcacgtgatggctgcatttgggcccagtctggaagagtgccagaaagctcagattttcacacagatgcaggcattaaaatatatagggaacaaagtaagaaggcaaaggatgtggggaggtggaccaaagaaaaccaaaatagaagaagcaagagagctcctggcttccaccattctgacccatgtcccagttaaggaattcaatttccgagccaaatgtatctatactgcagtgatggtgcgaagagttattctggcccaaggagataataaagttgacgacagagattattatggtaacaagcgactggaattggcaggacagcttttatctcttctttttgaagacttgttcaaaaaatttaattctgaaatgaaaaagattgccgaccaggtgattcctaagcaaagagcagcccagtttgatgttgtcaaacacatgcgccaagaccagatcaccaatggcatggtgaatgctatttctaccggaaattggtctttaaagagatttaaaatggaccgccagggtgtaacccaagtgctgtctcgcttgtcatatatatccgcactgggcatgatgacaagaatctcttcccagtttgaaaaaacgagaaaagtgagtggtcctcgctccctccagccatctcagtggggaatgctgtgtccttcggacactcctgaaggagaggcatgtggtttggttaaaaacttggcccttatgacacacatcacaactgatatggaagatggacccattgttaaattagccagtaacttgggagtagaagatgtgaatttattatgtggggaagagctctcttacccaaatgtgtttcttgtctttcttaatggtaacatcttaggtgtcattcgagaccacaaaaagctagtgaatacatttcgactcatgagaagagcaggatatatcaatgaatttgtttccatctcaacaaatcttacagatcgatgtgtctatatttcttctgatgggggaaggctatgcagaccctacataattgtcaagaaacagaagccagcagtcacaaataaacatatggaagagctggcccaagggtacaggaattttgaagatttcttacatgagagtctggttgaatatttagatgtgaatgaagaaaatgattgtaacattgcactgtacgaacacacaattaataaagacaccacccacttggagattgaacccttcactcttctcggcgtgtgtgctggacttatcccataccctcaccataaccagtcaccgagaaacacttatcagtgtgccatggggaaacaagccatgggtactataggatacaaccagcgaaacagaattgatactctcatgtatctactagcatatccacaaaaacccatggttaagacaaaaaccattgaattgatagaatttgagaaactgccagctggacagaatgcaacagttgctgtgatgagctatagtggctatgatattgaagatgctcttgttttaaacaaggcctctttagacagaggctttgggcgttgccttgtatataaaaatgctaaatgtacgttgaaacgatacaccaatcagacttttgataaagtgatggggcccatgttggatgctgctacaaggaaacctatctggcgacatgaaatcttagatgcagatggtatttgttctccaggtgagaaagtagaaaacaaacaagtgcttgtaaataagtccatgcccacagtgactcagattcctttggaaggaagtaatgtaccacagcaaccacagtacaaagatgtacccataacctacaaaggagcaacagactcatatattgaaaaagtgatgatatcttcaaatgctgaagatgcttttctgatcaaaatgctgctgagacagacaaggcgtccagaaattggagacaaattcagcagtcgtcatgggcaaaaaggtgtttgtggcttgatcgtcccccaggaagacatgccattttgtgattctggcatctgtccggacatcatcatgaacccacacggcttcccatcacgaatgacggtggggaagctcattgagctgctggctggcaaggccggtgtgctggacggcagattccactacggcactgcgtttggaggcagtaaagtgaaggatgtgtgtgaggacctcgttcgccatggttataactacttggggaaagactatgttacatccggcatcacaggtgagcccttagaagcatacatctattttggccccgtgtactatcagaagctgaaacacatggtgctagataaaatgcatgcccgggcccggggcccacgagccgtccttaccaggcaacccactgaaggacggtctcgtgatggtggcttgcgtctcggggaaatggaacgtgactgtttaatcggttatggagccagtatgcttttgctagagagactaatgatttcaagtgatgcctttgaggttgatgtctgtgggcagtgtggacttctggggtattctggctggtgccattactgcaagtcatcctgccacgtgtcttccctccgtattccgtatgcctgcaagctgctcttccaggaactacagtctatgaacatcatccccaggttaaaactgtccaagtacaatgaatgaggatggaaaaaatgattattaaagagaacaagtgatacatccaatgcaacggaaagcagaagggatttaggactacgtctcctcctgtgaagaattcccttgcgtattctctctctaaaacaaccaaaaaaaaatggagaggctttttatatactctaagactggctaaacaaccttgatcattgagcctcgagccatgggagagatgctgaccatgtggactgcaaggctgcttgattcacagatggatgtgacctaaaggataaataagctattacttatgtgctgatctcttgacattcactcattagaagaccttactccttcaagcaaatgtttggggtcaaatttaccatatcttctggctaaccatattcaagattcttctgaaacttggaggatgtaaagaatccatttgatttggtcagcctggcttttgtcgtggtggctggctcggataaattttcccaacaattaaatcttgcctttacacacccaaactttgtaattttagtcttggtgaaatataatgaatttgttcctaccttgtcaagcaagaatgtcgtcttctcctatggactcaattgctattattttaaacctgcatgattgtaccatgcaatactattcgttaaatatctgaatct

SEQ ID NO: 167582 - DNA, 580 bp, Homo sapiens
  Payload ID: 12967
  Gene Symbol: POLR3B
  Gene Name: polymerase (RNA) III (DNA directed) polypeptide B
  ENST ID: ENST00000549569
  CDS Start-End: 72-580
aaactgtcactgcgctagtaggagtgtgaggatgaccagaggtcactctcatcaccatcttggttttggccatgggtgttgagagtgaccaggaaattgtgcagatgattggaacagaggagcacgtgatggctgcatttgggcccagtctggaagagtgccagaaagctcagattttcacacagatgcaggcattaaaatatatagggaacaaagtaagaaggcaaaggatgtggggaggtggaccaaagaaaaccaaaatagaagaagcaagagagctcctggcttccaccattctgacccatgtcccagttaaggaattcaatttccgagccaaatgtatctatactgcagtgatggtgcgaagagttattctggcccaaggagataataaagttgacgacagagattattatggtaacaagcgactggaattggcaggacagcttttatctcttctttttgaagacttgttcaaaaaatttaattctgaaatgaaaaagattgccgaccaggtgattcctaagcaaagagcagcccagtttgatgttgtcaaacacatgcgccaagaccagatcac

SEQ ID NO: 167583 - DNA, 1851 bp, Homo sapiens
  Payload ID: 12968
  Gene Symbol: POLR3C
  Gene Name: polymerase (RNA) III (DNA directed) polypeptide C (62kD)
  Uniprot ID: Q9BUI4
  ENST ID: ENST00000334163
  CDS Start-End: 162-1766
gtcttcttcggtggcgatccgcgtcctagaaagggcggtgggctccacctcggcctagaaggccagcgggagccgtaggaagccgtcgcgggaagctcagccgaattggagttggagcccccggattgcgctgaccctgagctctcagactccccagtacaatgactcaagcagaaattaagctctgttctttgttgctgcaagagcattttggagagattgtagaaaaaattggagtccatctgataagaaccggcagccagccactaagagtaattgcccatgacacaggaacatcactggatcaggtgaagaaagccctgtgtgtcctcgtccaacataacctggtgagttatcaagtgcacaaacgtggtgtggtggagtatgaagcccagtgcagccgggtattgcgaatgcttagatatccccggtacatctatactaccaaaactctgtacagtgacactggagagctgattgttgaggagcttctgttgaacggcaaactgacaatgtcagctgttgtgaagaaagtggcagaccggctcacagagaccatggaggatggcaagaccatggactatgctgaagtatcaaacacatttgtgcgactggcagacacacactttgtacaacgctgcccttcggtacctaccactgagaattcagaccctgggccaccaccacctgcccccacacttgtcattaatgaaaaggacatgtacctggttcctaaactcagcttgatagggaaaggtaaaaggaggagatcatctgatgaagatgctgctggggagcccaaggccaagagaccaaaatatactacagataacaaggagcccattccagatgatgggatttattggcaggccaaccttgacagattccaccaacacttccgtgaccaagccattgtgagcgcagttgctaacaggatggaccagacaagcagcgagattgtgcgaaccatgctccgaatgagtgagattaccacttcctctagtgctcccttcacccagccattgtcttccaatgagatcttcagatccctacctgttggctataacatctctaagcaagttcttgatcagtatctcactctgctggcagatgatccactagagtttgttggaaagtctggcgacagtggtggaggaatgtatgtcatcaacctccataaggcattagcatccctagccacagccactctggagtccgtcgtacaggagagatttgggtctcgctgtgctagaatattccgtctagttttgcagaagaaacacatagagcagaagcaagtggaagactttgcaatgattcctgcaaaggaggcaaaggatatgctatataagatgctctcagaaaatttcatgtcactccaggaaattcccaaaacaccagaccatgccccatccaggaccttctatttatatactgtgaacatcctgtcagctgcccgaatgttgttgcacaggtgctacaagagcatagccaacttgatagaaaggaggcaatttgaaaccaaagagaataagcgtctactagaaaaatctcagagggtagaagccatcattgcatctatgcaggctactggtgcagaggaagcacagttacaagaaatagaggagatgatcacagctcctgaacgtcagcagctagagaccctgaaacgtaatgtcaacaagttggatgccagtgagatccaggtggacgaaaccatcttcctgctggagtcttacattgagtgcaccatgaagagacagtgatccagaagaagcatcttcctcagaagatctggggggatggaaagcaaaataaaggaggtgcctggatgcattatttgcagtggga

SEQ ID NO: 167584 - DNA, 1590 bp, Homo sapiens
  Payload ID: 12968
  Gene Symbol: POLR3C
  Gene Name: polymerase (RNA) III (DNA directed) polypeptide C (62kD)
  ENST ID: ENST00000369294
  CDS Start-End: 215-1450
cggaagccgccgaaactctggggtagagtggcacgcgctttttgcttttccgcgtcttcttcggtggcgatccgcgtcctagaaagggcggtgggctccacctcggcctagaaggccagcgggagccgtaggaagccgtcgcgggaagctcagccgaattggagttggagcccccggattgcgctgaccctgagctctcagactccccagtacaatgactcaagcagaaattaagctctgttctttgttgctgcaagagcattttggagagattgtagaaaaaattggagtccatctgataagaaccggcagccagccactaagagtaattgcccatgacacaggaacatcactggatcaggtgaagaaagccctgtgtgtcctcgtccaacataacctggtgagttatcaagtgcacaaacgtggtgtggtggagtatgaagcccagtgcagccgggtattgcgaatgcttagatatccccggtacatctatactaccaaaactctgtacagtgacactggagagctgattgttgaggagcttctgttgaacggcaaactgacaatgtcagctgttgtgaagaaagtggcagaccggctcacagagaccatggaggatggcaagaccatggactatgctgaagtatcaaacacatttgtgcgactggcagacacacactttgtacaacgctgcccttcggtacctaccactgagaattcagaccctgggccaccaccacctgcccccacacttgtcattaatgaaaaggacatgtacctggttcctaaactcagcttgatagggaaaggtaaaaggaggagatcatctgatgaagatgctgctggggagcccaaggccaagagaccaaaatatactacagataacaaggagcccattccagatgatgggatttattggcaggccaaccttgacagattccaccaacacttccgtgaccaagccattgtgagcgcagttgctaacaggatggaccagacaagcagcgagattgtgcgaaccatgctccgaatgagtgagattaccacttcctctagtgctcccttcacccagccattgtcttccaatgagatcttcagatccctacctgttggctataacatctctaagcaagttcttgatcagtatctcactctgctggcagatgatccactagagtttgttggaaagtctggcgacagtggtggaggaatgtatgtcatcaacctccataaggcattagcatccctagccacagccactctggagtccgtcgtacaggagagatttgggtctcgctgtgctagaatattccgtctagttttgcagaagaaacacatagagcagaagcaagtggaagactttgcaatgattcctgcaaaggaggcaaaggatatgctatataagatgctctcagaaaatttcatgtcactccaggttggatgccagtgagatccaggtggacgaaaccatcttcctgctggagtcttacattgagtgcaccatgaagagacagtgatccagaagaagcatcttcctcagaagatctggggggatggaaagcaaaataaaggaggtgcctggatgcatta

SEQ ID NO: 167585 - DNA, 1931 bp, Homo sapiens
  Payload ID: 12969
  Gene Symbol: POLR3D
  Gene Name: polymerase (RNA) III (DNA directed) polypeptide D, 44kDa
  Uniprot ID: P05423
  ENST ID: ENST00000306433
  CDS Start-End: 86-1282
aagatggcggcgcccaggccctgccacgcagacttccgcccggcgcggagaccgaaggctggcggctggtcgcgttgcaggcaacatgtcggaaggaaacgccgccggcgagcccagcacgccgggagggccccgacctctcctgactggggcccgggggctcatcgggcggcggccggcgcctcccctcacccccggccgccttccctccatccgttccagggacctcaccctcgggggagtcaagaagaaaaccttcaccccaaatatcatcagtcggaagatcaaggaagagcccaaggaagaagtaactgtcaagaaggagaagcgtgaaagggacagagaccgacaacgagaggggcatggacgagggcgaggccgtccagaagtgatccagtctcactccatctttgagcagggcccagctgaaatgatgaagaaaaaagggaactgggataagacagtggatgtgtcagacatgggaccttctcatatcatcaacatcaaaaaagagaagagagagacagacgaagaaactaaacagatcttgcgtatgctggagaaggacgatttcctcgatgaccccggcctgaggaacgacactcgaaatatgcctgtgcagctgccgctggctcactcaggatggctttttaaggaagaaaatgacgaaccagatgttaaaccttggctggctggccccaaggaagaggacatggaggtggacatacctgctgtgaaagtgaaagaggagccacgagatgaggaggaagaggccaagatgaaggctcctcccaaagcagccaggaagactccaggcctcccgaaggatgtatctgtggcagagctgctgagggagctgagcctcaccaaggaagaggaactgctgtttctgcagctgccagacaccctccctggccagccacccacccaggacatcaagcctatcaagacagaggtgcagggcgaggacggacaggtggtgctcatcaagcaggagaaagaccgagaagccaaattggcagagaatgcttgtaccctggctgacctgacagagggtcaggttggcaagctactcatccgcaagtctggaagggtgcaactcctcttgggcaaggtgactctggacgtgaccatgggaactgcctgctccttcctgcaggagctggtgtccgtgggccttggagacagtaggacaggggagatgacagtcctgggacacgtgaagcacaaacttgtatgttcccctgattttgaatccctcttggatcacaaacaccggtaaaatgagcaggtggaggaggacggcgcctgtgcccacggctgctgcctgctccagacattttgttcttgaatctgtgagacccagaaggggcccactgagcccactcactccagcctttggcaaccattgttccaggtcccccagggcttcctcccacagcagctgtgaatggcacagtgaccttcctgcagcgtggagatggcacatccttgctgctggggacttggccctgctatttatttttgtatttatgtcttaatctcttccactgatgcatcctccaagggtagatggggagggtctgtgtgaaggggccggcttctcttggtgcctgctgggttgcaggggcaggaagcgtgtggactgcagcttctgctggtgctccccccgtcctcctggaggcagtataggagagagagcaaggattgagtctgagacttaagcactcggtcccagcttgccagttcctggttctgtgtccttggacaaactacctaacctttctgagcctcctatacctcatccgacacaaatggggatgatacctacctccagggttggcgtgaggattcatgggctattatagatgaaaactgcacaaggccagaaccagcaggcactcaataaacgttcatgtcctttttctcta

SEQ ID NO: 167586 - DNA, 5494 bp, Homo sapiens
  Payload ID: 12969
  Gene Symbol: POLR3D
  Gene Name: polymerase (RNA) III (DNA directed) polypeptide D, 44kDa
  Uniprot ID: P05423
  ENST ID: ENST00000397802
  CDS Start-End: 216-1412
ggttcctgggcggggttcctggagagggcgtgtcgcgagccaaaggctctcacctgggtggtcccgggagtctcgccacgtgggaggggaggagctgagaggccactggagggacgcaccgactgggggaccggaaagcaagggggtggggttccgccagggtccgcgtgtcagtcccctctggtgatctcgtcgccccttctctcccaggcaacatgtcggaaggaaacgccgccggcgagcccagcacgccgggagggccccgacctctcctgactggggcccgggggctcatcgggcggcggccggcgcctcccctcacccccggccgccttccctccatccgttccagggacctcaccctcgggggagtcaagaagaaaaccttcaccccaaatatcatcagtcggaagatcaaggaagagcccaaggaagaagtaactgtcaagaaggagaagcgtgaaagggacagagaccgacaacgagaggggcatggacgagggcgaggccgtccagaagtgatccagtctcactccatctttgagcagggcccagctgaaatgatgaagaaaaaagggaactgggataagacagtggatgtgtcagacatgggaccttctcatatcatcaacatcaaaaaagagaagagagagacagacgaagaaactaaacagatcttgcgtatgctggagaaggacgatttcctcgatgaccccggcctgaggaacgacactcgaaatatgcctgtgcagctgccgctggctcactcaggatggctttttaaggaagaaaatgacgaaccagatgttaaaccttggctggctggccccaaggaagaggacatggaggtggacatacctgctgtgaaagtgaaagaggagccacgagatgaggaggaagaggccaagatgaaggctcctcccaaagcagccaggaagactccaggcctcccgaaggatgtatctgtggcagagctgctgagggagctgagcctcaccaaggaagaggaactgctgtttctgcagctgccagacaccctccctggccagccacccacccaggacatcaagcctatcaagacagaggtgcagggcgaggacggacaggtggtgctcatcaagcaggagaaagaccgagaagccaaattggcagagaatgcttgtaccctggctgacctgacagagggtcaggttggcaagctactcatccgcaagtctggaagggtgcaactcctcttgggcaaggtgactctggacgtgaccatgggaactgcctgctccttcctgcaggagctggtgtccgtgggccttggagacagtaggacaggggagatgacagtcctgggacacgtgaagcacaaacttgtatgttcccctgattttgaatccctcttggatcacaaacaccggtaaaatgagcaggtggaggaggacggcgcctgtgcccacggctgctgcctgctccagacattttgttcttgaatctgtgagacccagaaggggcccactgagcccactcactccagcctttggcaaccattgttccaggtcccccagggcttcctcccacagcagctgtgaatggcacagtgaccttcctgcagcgtggagatggcacatccttgctgctggggacttggccctgctatttatttttgtatttatgtcttaatctcttccactgatgcatcctccaagggtagatggggagggtctgtgtgaaggggccggcttctcttggtgcctgctgggttgcaggggcaggaagcgtgtggactgcagcttctgctggtgctccccccgtcctcctggaggcagtataggagagagagcaaggattgagtctgagacttaagcactcggtcccagcttgccagttcctggttctgtgtccttggacaaactacctaacctttctgagcctcctatacctcatccgacacaaatggggatgatacctacctccagggttggcgtgaggattcatgggctattatagatgaaaactgcacaaggccagaaccagcaggcactcaataaacgttcatgtcctttttctctacctgagtctattttcaaacaaaatagagattctaaatctcccagaagcagcgactagagctgctcccgtccccactcttgccccttcctgctttatatcccgtcctcaccctgggcctgatgccctaaatttatggtgtcagattgttctatgcctttttctcctggctcctgttagccaggtgcctcctgtgtgagttactgtaatagctgcaggtaatagaaaggaagaagtcagagacccctcccagcaccctacaaaagcctttgggggacatgttgggcccaggacatgttccctgcactctttcctttgcagttagtactcatgtatgagccgaagtcatatattgctaacaaaaaaactaaatccttcataagagaagttagggatgtattgaataatggcctctttgacacttggccgatgatgcccacttcaaaaactttgggtttcagaggcctgcccgtctcctgtcctagcactgccagagccacctactcagtgttacttttttgggtctgtgatcctgttccctttaccaggtcattgtactgtgttgtccctggaggaacagcttctcctcttgtcttgacagtagggctggggttttccctggttcagctggggagacgtttgcaggttagaaaaaggtctcatgcggcagcgtgtgtggctgttagacgctgatggcacaacttccctttgctggcgtcgtggcacctggcctctgggacagtatgaaccataggggctcaggaagaaccgcttcccctccacccccatccctgattcctagtggccccttagattttgggtacatcttccttcaggctcaccttccttcttttcaaagttcctcaagcctgttactcatttgtcaaggctgggcttctcctacaaagccctcaacctgcccagccagcagctgtgaggctgactgaatatttggtgaccatatcaccctttctggtgctgaagctcatgtcagctccattggacagtgttattctgggctcttctcactgtagaggactggagcagaaagggttccttggaaacctgtgctgggaagccctgtttggtctaaggctaagctttggttaactctgggctccagccctttcttcctttaaatagctgatgcacggccagcaggtctccattctcatcctctctttctattctgtttctttggttcagaaatactcttctgctttttttggacgaactcaatggcccgatgttagatattgggtatttttcaatcttctgttttctgacccttccaagaaagtttgaggaagaacatgtactgctttcacgttcatttcgcccattcagatgtcttggcttgaaccttatgactccgtatcaaagtcctcacaacctgtctcagatccctgatgcacaaattaggtcttattaataagtgtgggaaaagagaggagagtccaccttcttggtcaggcccctgaggcatgcatttctaccaaggaatatggacagatgacagaggagaagagcccaaagccaaatttatacatgagtgcaagtggatgcaaatttgttgctccctgcatctgtgtatatgctttctgttaaatacagaaagaaggaacaataggcttgcacacttttctaactacatgtttaagtggcagagtccaggctgtcgagtcacggttgggtttgaatctgactccaccagtaactttggttggaaaaaatcacttatcctctttaagcttgattttatttattttattttatgtaagagtgagacagtagtagcttaatagggttgcttttaaattagagtgaacatgaggcatttattcggtgccagacagataactgcctataacaggatgtgatcagcacaagtaacagaaaattagcctgacggtggcttaagcaatgggaatgtttatctcacatagcaaaaagtctgtaaatagatggttctagagttgggtggaagccaaaatgtcatcaggatttccttggaaccgtctgctttgccatcctcagtattgcagaatggctgctcctgcgccaagcatcattctgcaaatgatggtgtccacagccagagtggacagtagtacaggagccttctcattctgcccttatccgggaataaccgtcagcagctccagcaacctcccccctgtctctttatagagtggggccacgtgcccactcttggaccaggccctggcaaagggggatgggtcgactagtgtatcccctggcactgagcacacttgcccttgagctggggttttgttagtagggaggaagctggagtggcagttggatagacaattcatagtagctgctgccatgttcaaaaaatgctgcaatgtaaaatcataaagtattcatctaggcataactttttaaaatattcagtcaccttttattctactaaaatcaattttaacattttagtgtatattattttattttagattcagcaggtacatgagcatgttagttttgttttgttttgttttgttctgttttgttttttgagatggagtctcactctgtcgcccagtggtgtgatcttggcttactgcaactctgtctcccaggttcaagtgatcctcccgcctcagccccccagatagctgggattacaggcacatgccaccacacctggctaatttttgtatttttagtagagacgggagtttcaccatgttggccaggctggtctcaaactcctcacctcaagtgatctacctgcctcagcctcccaagtgctgggattacaggcgtgagccactgcgcccagccacatgtgcgtgtttgtgtatattgcgtactggtggggattgggcttctgtcatacctatcacccaaatagtgaacattgtactcaggtagcatttcaacccttgccccccctcccactcacccccttttggagtgcccagtgtttgctatttccatctttatgtccataggtacccattatttagctcccacttataagtgagaacatgtgctatttgattttctgtttccgaggttaggataattacctcaagctccatccatgtggctgcaaagcacatgatttcattgtattttatgactgctcatgtatattatttcagcctccaaaattttgtatgttatttataatgatataaattatgtggttttatcgtgtactctatctcactcagaaatacatacaattcttcgttcccagctactctggagctgaggtgggaggatcacttgagcccaggagttcaagaccagcctgggcaacatggtgaaaccttgtctctgaaaaataaataatacacacccacatgcacacacatccagttcttccatgttaatgagtatgttgtgtttcacatacttctgaattagccgaaggaattaaaggtagcatcttttaatcctc

SEQ ID NO: 167587 - DNA, 683 bp, Homo sapiens
  Payload ID: 12969
  Gene Symbol: POLR3D
  Gene Name: polymerase (RNA) III (DNA directed) polypeptide D, 44kDa
  ENST ID: ENST00000519237
  CDS Start-End: 61-683
cggctggtcgcgttgcaggtgaggttgtgacgcgcggtgtggagccgcggcccgggcaacatgtcggaaggaaacgccgccggcgagcccagcacgccgggagggccccgacctctcctgactggggcccgggggctcatcgggcggcggccggcgcctcccctcacccccggccgccttccctccatccgttccagggacctcaccctcgggggagtcaagaagaaaaccttcaccccaaatatcatcagtcggaagatcaaggaagagcccaaggaagaagtaactgtcaagaaggagaagcgtgaaagggacagagaccgacaacgagaggggcatggacgagggcgaggccgtccagaagtgatccagtctcactccatctttgagcagggcccagctgaaatgatgaagaaaaaagggaactgggataagacagtggatgtgtcagacatgggaccttctcatatcatcaacatcaaaaaagagaagagagagacagacgaagaaactaaacagatcttgcgtatgctggagaaggacgatttcctcgatgaccccggcctgaggaacgacactcgaaatatgcctgtgcagctgccgctggctcactcaggatggctttttaaggaagaaaatgacgaaccagatgttaaaccttggctggctggccccaaggaaga

SEQ ID NO: 167588 - DNA, 1202 bp, Homo sapiens
  Payload ID: 12969
  Gene Symbol: POLR3D
  Gene Name: polymerase (RNA) III (DNA directed) polypeptide D, 44kDa
  ENST ID: ENST00000518039
  CDS Start-End: 19-390
ccttctctcccaggcaacatgtcggaaggaaacgccgccggcgagcccagcacgccgggagggccccgacctctcctgactggggcccgggggctcatcgggcggcggccggcgcctcccctcacccccggccgccttccctccatccgttccagggacctcaccctcgggggagtcaagaagaaaaccttcaccccaaatatcatcagtcggaagatcaaggaagagcccaaggaagaagtaactgtcaagaaggagaagcgtgaaagggacagagaccgacaacgagaggggcatggacgagggcgaggccgtccagaagtgatccagtctcactccatctttgagcagggcccagctgaaatgatgaagaaaaaagttcctcgatgaccccggcctgaggaacgacactcgaaatatgcctgtgcagctgccgctggctcactcaggatggctttttaaggaagaaaatgacgaaccagatgttaaaccttggctggctggccccaaggaagaggacatggaggtggacatacctgctgtgaaaggaagccaaattggcagagaatgcttgtaccctggctgacctgacagagggtcaggttggcaagctactcatccgcaagtctggaagggtgcaactcctcttgggcaaggtgactctggacgtgaccatgggaactgcctgctccttcctgcaggagctggtgtccgtgggccttggagacagtaggacaggggagatgacagtcctgggacacgtgaagcacaaacttgtatgttcccctgattttgaatccctcttggatcacaaacaccggtaaaatgagcaggtggaggaggacggcgcctgtgcccacggctgctgcctgctccagacattttgttcttgaatctgtgagacccagaaggggcccactgagcccactcactccagcctttggcaaccattgttccaggtcccccagggcttcctcccacagcagctgtgaatggcacagtgaccttcctgcagcgtggagatggcacatccttgctgctggggacttggccctgctatttatttttgtatttatgtcttaatctcttccactgatgcatcctccaagggtagatggggagggtctgtgtgaaggggccggcttctcttggtgcctgctgggttgcaggggcaggaagcgtgtggactgcagcttctgctg

SEQ ID NO: 167589 - DNA, 3697 bp, Homo sapiens
  Payload ID: 12970
  Gene Symbol: POLR3E
  Gene Name: polymerase (RNA) III (DNA directed) polypeptide E (80kD)
  Uniprot ID: Q9NVU0
  ENST ID: ENST00000299853
  CDS Start-End: 168-2294
acgtgtccgccggagtttctccaccagcaacatggccgccgcctgagaggagagccgggccgccgccgtctctgcagcccgcgggtaactgggccgttgccgccgtccgcgctcggcccccgcggagagatcgagctgaaggactgcgcggctggctctcctctagtatggccaatgaagaggatgacccagttgtacaggagatcgatgtgtacttggccaagagtctggcggaaaagctgtatctatttcagtaccctgtgcgtccagcctcgatgacctacgatgacattccgcacctctcagccaagatcaagcccaagcagcagaaggtagagcttgagatggccatcgacaccctgaaccccaactattgccgcagcaaaggggagcagattgcgctgaacgtggacggggcctgcgccgacgagaccagcacgtattcctcgaagctgatggacaagcagaccttctgctcttcccagaccaccagtaacacatcccgttatgccgctgcactctacaggcaaggtgagctccacctgacacctttacatggcatcctgcagctgcggcccagcttctcctacctggataaggctgacgccaagcaccgggagagggaggcggccaacgaggcaggggactcttcacaggatgaggcggaagacgatgttaagcagatcacggtgcggttctcccggccggagtcagagcaggcccgccagcgccgtgtgcagtcctatgagttcctgcagaagaagcacgcagaggagccctgggtccacctgcattactatggcctgagggacagtcgctctgagcatgagcgtcagtacctgctgtgccccggctcaagcggggtggagaacacggagctcgtcaagtcacccagtgagtacctgatgatgctgatgccacccagccaggaggaggagaaagacaagcctgtggcccccagcaacgtcctgtcgatggcccagctgcgcacgctgcccctggccgatcagatcaagatcctgatgaagaatgtgaaggtcatgccttttgccaacttgatgagcctcctgggcccctccatcgattccgtggctgttctgcggggcatccagaaggtggcgatgttggtccaagggaactgggtggtgaagagtgacatcctataccccaaggactcgtccagccctcacagcggcgtgcctgctgaggtgctctgcaggggccgagacttcgttatgtggaagttcacgcagagccgctgggtggttaggaaagaggtggcaaccgtgaccaaactctgcgccgaggatgtgaaggacttcctggagcacatggccgtggtgaggatcaacaaaggctgggagttcattctgccttatgatggggagttcatcaagaagcacccggatgtggtccagcggcagcacatgctgtggacgggtatccaggccaaactggaaaaagtctataatcttgtaaaggaaaccatgccaaagaagccggatgcacaatcagggcctgccgggctggtctgtggggaccagcggatccaagtagccaaaaccaaggcccagcagaaccacgcgttgctggagcgggagctgcagcggcggaaggagcagctgcgggtgcctgcggtcccgcccggtgtgcggatcaaggaggagcccgtgagcgaggagggcgaggaggacgaggagcaggaggcggaggaggagcccatggacacttcccccagcggcctccacagcaagctggccaacgggctgcctctcgggcgggctgcgggcacagacagcttcaacgggcacccgccccagggctgcgccagcacccctgtggctcgggaactgaaggccttcgtggaggccacctttcagagacagtttgtgctcacgctgagcgaactcaagcgcctcttcaatctgcacttggccagcctgccccccggccacacactcttcagcggcatctcggaccgcatgctacaggacacggtgctggccgccggttgcaagcagatactggtgccttttcccccccagactgctgcttccccggatgagcagaaggtgtttgccctctgggagtctggagacatgagtgatcagcatcgacaggttttgcttgaaattttttccaaaaattaccgggtacgccgaaacatgatccagtctcggttgactcaagagtgtggagaagatctcagtaaacaggaggtggataaagtactaaaggactgctgtgtaagctatggtggcatgtggtaccttaaagggacagtacagtcttgacaatagtagcaaactactaacccagcaaatctaagcccaaggaagaagggcggaaccagaagtagggcctcgacttgcttcagacgacacagagcaagaggaactgaccatctcatgacctgtggcattgcacggtgcagtggacagaagggattatcctcagccagtcgcagggtcagcttaagttagttagatcactcccagaagagaccagctgggaccttctttgcagtacaatttgaaattcctgatgtattttgcttattatttggtttcattctcataataaagagagtgtatactgacatgggcaggatgataaaaatcatggtttaatattttcttttgtaaacttaatgccaacaaggtctaagttatgtttacaacatgaagaaaacctcaaagttcttaatttttaaaatgcctagaagacaatatttagtcttggattatctatctgctaagacctccaccaatttcattaaaccaaattgaattattctattcttgggattctgtggccacttcacctttgacaacaacctactttatgtagcagtctcaactgtttacatgaaccatagcaaaaaaatcagaatcaaatccatctccttttaatgtttgcagaaagatgcaaacaaaaccaggtaagtatggaacaatgtgtaagtgaggttatcacactttgatgtaaaaatttctattttgtgtatttttaaaataaatgcaaacactaaactagcatcatggtgctatcttcaaatggttacaggaaggcgatcttgttgggctcagcgttacgtgtatctagagggaacggagctaatggaggaagacagagcagcactgtccactagaaagaggcgagtcacgtacataattttgaaagtttctagcaaccacattagtttaaaaaggtcatgttagcatattatttagctcaaaatatctaaaacatcaacataaggtaaaagtcttcaaaatctggcattttacactttcctcaacactcagtttggactagccacatcataagtgctccgatgccacatggggctatttgcgacagtattggatagcacagccctagaaactgatggaaaaaataagagtaagctaggttggatgacatgtgaattttggtatctagataaggctttcgccatcttttttgtacaacacagtcactaattgtctgaaggtttaaatgacggtctatgctatttccccactccccccaaaataaaacatctaatattttagctatagaatcactaaggcattgatcaaggatgtactttgccaaataagtatttggtaacatcacttaacaagttgatcgtgtattgattctgttaacatatgtgaacctgaaaagtaaagttaccaaaagcgatttggaa

SEQ ID NO: 167590 - DNA, 2469 bp, Homo sapiens
  Payload ID: 12970
  Gene Symbol: POLR3E
  Gene Name: polymerase (RNA) III (DNA directed) polypeptide E (80kD)
  Uniprot ID: Q9NVU0
  ENST ID: ENST00000359210
  CDS Start-End: 144-2144
cagcaacatggccgccgcctgagaggagagccgggccgccgccgtctctgcagcccgcgggtaactgggccgttgccgccgtccgcgctcggcccccgcggagagatcgagctgaaggactgcgcggctggctctcctctagtatggccaatgaagaggatgacccagttgtacaggagatcgatgtgtacttggccaagagtctggcggaaaagctgtatctatttcagtaccctgtgcgtccagcctcgatgacctacgatgacattccgcacctctcagccaagatcaagcccaagcagcagaaggtagagcttgagatggccatcgacaccctgaaccccaactattgccgcagcaaaggggagcagattgcgctgaacgtggacggggcctgcgccgacgagaccagcacgtattcctcgaagctgatggacaagcagaccttctgctcttcccagaccaccagtaacacatcccgttatgccgctgcactctacaggcaaggtgagctccacctgacacctttacatggcatcctgcagctgcggcccagcttctcctacctggataaggctgacgccaagcaccgggagagggaggcggccaacgaggcaggggactcttcacaggatgaggcggaagacgatgttaagcagatcacggtgcggttctcccggccggagtcagagcaggcccgccagcgccgtgtgcagtcctatgagttcctgcagaagaagcacgcagaggagccctgggtccacctgcattactatggcctgagggacagtcgctctgagcatgagcgtcagtacctgctgtgccccggctcaagcggggtggagaacacggagctcgtcaagtcacccagtgagtacctgatgatgctgatgccacccagccaggaggaggagaaagacaagcctgtggcccccagcaacgtcctgtcgatggcccagctgcgcacgctgcccctggccgatcagatcaagatcctgatgaagaatgtgaaggtcatgccttttgccaacttgatgagcctcctgggcccctccatcgattccgtggctgttctgcggggcatccagaaggtggcgatgttggtccaagggaactgggtggtgaagagtgacatcctataccccaaggactcgtccagccctcacagcggcgtgcctgctgaggtgctctgcaggggccgagacttcgttatgtggaagttcacgcagagccgctgggtggttaggaaagaggtggcaaccgtgaccaaactctgcgccgaggatgtgaaggacttcctggagcacatggccgtggtgaggatcaacaaaggctgggagttcattctgccttatgatggggagttcatcaagaagcacccggatgtggtccagcggcagcacatgctgtggacgggtatccaggccaaactggaaaaagtctataatcttgtaaaggaaaccatgccaaagaagccggatgcacaatcagggcctgccgggctggtctgtggggaccagcggatccaagtagccaaaaccaaggcccagcagaaccacgcgttgctggagcgggagctgcagcggcggaaggagcagctgcgggtgcctgcggtcccgcccggtgtgcggatcaaggaggagcccgtgagcgaggagggcgaggaggacgaggagcaggaggcggaggaggagcccatggacacttcccccagcggcctccacagcaagctggccaacgggctgcctctcgggcgggctgcgggcacagacagcttcaacgggcacccgccccagggctgcgccagcacccctgtggctcgggaactgaaggccttcgtggaggccacctttcagagacagtttgtgctcacgctgagcgaactcaagcgcctcttcaatctgcacttggccagcctgccccccggccacacactcttcagcggcatctcggaccgcatgctacaggacacggtgctggccgccggttgcaagcagatactggtgccttttcccccccagactgctgcttccccggatgagcagaaggtgtttgccctctgggagtctggagacatgagtgatcaggactgctgtgtaagctatggtggcatgtggtaccttaaagggacagtacagtcttgacaatagtagcaaactactaacccagcaaatctaagcccaaggaagaagggcggaaccagaagtagggcctcgacttgcttcagacgacacagagcaagaggaactgaccatctcatgacctgtggcattgcacggtgcagtggacagaagggattatcctcagccagtcgcagggtcagcttaagttagttagatcactcccagaagagaccagctgggaccttctttgcagtacaatttgaaattcctgatgtattttgcttattatttggtttcattctcataataaagagagtgtatactgacatgggcaggatgataaaaa

SEQ ID NO: 167591 - DNA, 2529 bp, Homo sapiens
  Payload ID: 12970
  Gene Symbol: POLR3E
  Gene Name: polymerase (RNA) III (DNA directed) polypeptide E (80kD)
  Uniprot ID: Q9NVU0
  ENST ID: ENST00000418581
  CDS Start-End: 150-2168
ctccaccagcaacatggccgccgcctgagaggagagccgggccgccgccgtctctgcagcccgcgggtaactgggccgttgccgccgtccgcgctcggcccccgcggagagatcgagctgaaggactgcgcggctggctctcctctagtatggccaatgaagaggatgacccagttgtacaggagatcaagcccaagcagcagaaggtagagcttgagatggccatcgacaccctgaaccccaactattgccgcagcaaaggggagcagattgcgctgaacgtggacggggcctgcgccgacgagaccagcacgtattcctcgaagctgatggacaagcagaccttctgctcttcccagaccaccagtaacacatcccgttatgccgctgcactctacaggcaaggtgagctccacctgacacctttacatggcatcctgcagctgcggcccagcttctcctacctggataaggctgacgccaagcaccgggagagggaggcggccaacgaggcaggggactcttcacaggatgaggcggaagacgatgttaagcagatcacggtgcggttctcccggccggagtcagagcaggcccgccagcgccgtgtgcagtcctatgagttcctgcagaagaagcacgcagaggagccctgggtccacctgcattactatggcctgagggacagtcgctctgagcatgagcgtcagtacctgctgtgccccggctcaagcggggtggagaacacggagctcgtcaagtcacccagtgagtacctgatgatgctgatgccacccagccaggaggaggagaaagacaagcctgtggcccccagcaacgtcctgtcgatggcccagctgcgcacgctgcccctggccgatcagatcaagatcctgatgaagaatgtgaaggtcatgccttttgccaacttgatgagcctcctgggcccctccatcgattccgtggctgttctgcggggcatccagaaggtggcgatgttggtccaagggaactgggtggtgaagagtgacatcctataccccaaggactcgtccagccctcacagcggcgtgcctgctgaggtgctctgcaggggccgagacttcgttatgtggaagttcacgcagagccgctgggtggttaggaaagaggtggcaaccgtgaccaaactctgcgccgaggatgtgaaggacttcctggagcacatggccgtggtgaggatcaacaaaggctgggagttcattctgccttatgatggggagttcatcaagaagcacccggatgtggtccagcggcagcacatgctgtggacgggtatccaggccaaactggaaaaagtctataatcttgtaaaggaaaccatgccaaagaagccggatgcacaatcagggcctgccgggctggtctgtggggaccagcggatccaagtagccaaaaccaaggcccagcagaaccacgcgttgctggagcgggagctgcagcggcggaaggagcagctgcgggtgcctgcggtcccgcccggtgtgcggatcaaggaggagcccgtgagcgaggagggcgaggaggacgaggagcaggaggcggaggaggagcccatggacacttcccccagcggcctccacagcaagctggccaacgggctgcctctcgggcgggctgcgggcacagacagcttcaacgggcacccgccccagggctgcgccagcacccctgtggctcgggaactgaaggccttcgtggaggccacctttcagagacagtttgtgctcacgctgagcgaactcaagcgcctcttcaatctgcacttggccagcctgccccccggccacacactcttcagcggcatctcggaccgcatgctacaggacacggtgctggccgccggttgcaagcagatactggtgccttttcccccccagactgctgcttccccggatgagcagaaggtgtttgccctctgggagtctggagacatgagtgatcagcatcgacaggttttgcttgaaattttttccaaaaattaccgggtacgccgaaacatgatccagtctcggttgactcaagagtgtggagaagatctcagtaaacaggaggtggataaagtactaaaggactgctgtgtaagctatggtggcatgtggtaccttaaagggacagtacagtcttgacaatagtagcaaactactaacccagcaaatctaagcccaaggaagaagggcggaaccagaagtagggcctcgacttgcttcagacgacacagagcaagaggaactgaccatctcatgacctgtggcattgcacggtgcagtggacagaagggattatcctcagccagtcgcagggtcagcttaagttagttagatcactcccagaagagaccagctgggaccttctttgcagtacaatttgaaattcctgatgtattttgcttattatttggtttcattctcataataaagagagtgtatactgacatgggcaggatgataaaaatcatggtttaatattttcttttgtaaacttaatgcc

SEQ ID NO: 167592 - DNA, 645 bp, Homo sapiens
  Payload ID: 12970
  Gene Symbol: POLR3E
  Gene Name: polymerase (RNA) III (DNA directed) polypeptide E (80kD)
  ENST ID: ENST00000565551
  CDS Start-End: 1-191
actattgccgcagcaaaggggagcagattgcgctgaacgtggacggggcctgcgccgacgagaccagcacgtattcctcgaagctgatggacaagcagaccttctgctcttcccagaccaccagtaacacatcccgttatgccgctgcactctacaggcaagctgcggcccagcttctcctacctggataaggctgacgccaagcaccgggagagggaggcggccaacgaggcaggggactcttcacaggatgaggcggaagacgatgttaagcagatcacggtgcggttctcccggccggagtcagagcaggcccgccagcgccgtgtgcagtcctatgagttcctgcagaagaagcacgcagaggagccctgggtccacctgcattactatggcctgagggacagtcgctctgagcatgagcgtcagtacctgctgtgccccggctcaagcggggtggagaacacggagctcgtcaagtcacccagtgagtacctgatgatgctgatgccacccagccaggaggaggagaaagacaagcctgtggcccccagcaacgtcctgtcgatggcccagctgcgcacgctgcccctggccgatcagatcaagatcctgatgaagaatgtgaaggtcatgccttttgcc

SEQ ID NO: 167593 - DNA, 565 bp, Homo sapiens
  Payload ID: 12970
  Gene Symbol: POLR3E
  Gene Name: polymerase (RNA) III (DNA directed) polypeptide E (80kD)
  ENST ID: ENST00000565358
  CDS Start-End: 149-565
ggagtttctccaccagcaacatggccgccgcctgagaggagagccgggccgccgccgtctctgcagcccgcgggtaactgggccgttgccgccgtccgcgctcggcccccgcggagagttgaggaaactgaagcactgagaagccttcatggagcttacgttctattgcagaagacaaacaacacctgagcaaatagaccagatcgatgtgtacttggccaagagtctggcggaaaagctgtatctatttcagtaccctgtgcgtccagcctcgatgacctacgatgacattccgcacctctcagccaagatcaagcccaagcagcagaaggtagagcttgagatggccatcgacaccctgaaccccaactattgccgcagcaaaggggagcagattgcgctgaacgtggacggggcctgcgccgacgagaccagcacgtattcctcgaagctgatggacaagcagaccttctgctcttcccagaccaccagtaacacatcccgttatgccgctgcactctacaggcaaggtgagctccacctgacacctttacatggcatcctg

SEQ ID NO: 167594 - DNA, 662 bp, Homo sapiens
  Payload ID: 12970
  Gene Symbol: POLR3E
  Gene Name: polymerase (RNA) III (DNA directed) polypeptide E (80kD)
  ENST ID: ENST00000569757
  CDS Start-End: 392-662
aggcagctctgggagggacacggttggaacggaatttaaacgacctgtgctaggaaaggaagggagagtggaaaacccctatacggagttctctggtcttctggcaggggctgagacggcagtccagcaagggtcacaggcctgacggtatgacctcttccccttcccaccgcaggtgcggttctcccggccggagtcagagcaggcccgccagcgccgtgtgcagtcctatgagttcctgcagaagaagcacgcagaggagccctgggtccacctgcattactatggcctgagggacagtcgctctgagcatgagcgtcagtacctgctgtgccccggctcaagcggggtggagaacacggagctcgtcaagtcacccagtgagtacctgatgatgctgatgccacccagccaggaggaggagaaagacaagcctgtggcccccagcaacgtcctgtcgatggcccagctgcgcacgctgcccctggccgatcagatcaagatcctgatgaagaatgtgaaggtcatgccttttgccaacttgatgagcctcctgggcccctccatcgattccgtggctgttctgcggggcatccagaaggtggcgatgttggtccaagggaactgggtggtgaagagtgacatcctataccccaaggact

SEQ ID NO: 167595 - DNA, 473 bp, Homo sapiens
  Payload ID: 12970
  Gene Symbol: POLR3E
  Gene Name: polymerase (RNA) III (DNA directed) polypeptide E (80kD)
  ENST ID: ENST00000563024
  CDS Start-End: 177-473
agcaacatggccgccgcctgagaggagagccgggccgccgccgtctctgcagcccgcgggtaactgggccgttgccgccgtccgcgctcggcccccgcggagagatcgatgtgtacttggccaagagtctggcggaaaagctgtatctatttcagtaccctgtgcgtccagcctcgatgacctacgatgacattccgcacctctcagccaagatcaagcccaagcagcagaaggtagagcttgagatggccatcgacaccctgaaccccaactattgccgcagcaaaggggagcagattgcgctgaacgtggacggggcctgcgccgacgagaccagcacgtattcctcgaagctgatggacaagcagaccttctgctcttcccagaccaccagtaacacatcccgttatgccgctgcactctacaggcaaggtgagctccacctgacacctttacatggcatcctgcagctg

SEQ ID NO: 167596 - DNA, 2327 bp, Homo sapiens
  Payload ID: 12970
  Gene Symbol: POLR3E
  Gene Name: polymerase (RNA) III (DNA directed) polypeptide E (80kD)
  ENST ID: ENST00000564750
  CDS Start-End: 16-294
tggctctcctctagtatggccaatgaagaggatgacccagttgtacaggagatcgatgtgtacttggccaagagtctggcggaaaagctgtatctatttcagtaccctgtgcgtccagcctcgatgacctacgatgacattccgcacctctcagccaagatcaagcccaagcagcagaagcaaaggggagcagattgcgctgaacgtggacggggcctgcgccgacgagaccagcacgtattcctcgaagctgatggacaagcagaccttctgctcttcccagaccaccagtaacacatcccgttatgccgctgcactctacaggcaaggtgagctccacctgacacctttacatggcatcctgcagctgcggcccagcttctcctacctggataaggctgacgccaagcaccgggagagggaggcggccaacgaggcaggggactcttcacaggatgaggcggaagacgatgttaagcagatcacggtgcggttctcccggccggagtcagagcaggcccgccagcgccgtgtgcagtcctatgagttcctgcagaagaagcacgcagaggagccctgggtccacctgcattactatggcctgagggacagtcgctctgagcatgagcgtcagtacctgctgtgccccggctcaagcggggtggagaacacggagctcgtcaagtcacccagtgagtacctgatgatgctgatgccacccagccaggaggaggagaaagacaagcctgtggcccccagcaacgtcctgtcgatggcccagctgcgcacgctgcccctggccgatcagatcaagatcctgatgaagaatgtgaaggtcatgccttttgccaacttgatgagcctcctgggcccctccatcgattccgtggctgttctgcggggcatccagaaggtggcgatgttggtccaagggaactgggtggtgaagagtgacatcctataccccaaggactcgtccagccctcacagcggcgtgcctgctgaggtgctctgcaggggccgagacttcgttatgtggaagttcacgcagagccgctgggtggttaggaaagaggtggcaaccgtgaccaaactctgcgccgaggatgtgaaggacttcctggagcacatggccgtggtgaggatcaacaaaggctgggagttcattctgccttatgatggggagttcatcaagaagcacccggatgtggtccagcggcagcacatgctgtggacgggtatccaggccaaactggaaaaagtctataatcttgtaaaggaaaccatgccaaagaagccggatgcacaatcagggcctgccgggctggtctgtggggaccagcggatccaagtagccaaaaccaaggcccagcagaaccacgcgttgctggagcgggagctgcagcggcggaaggagcagctgcgggtgcctgcggtcccgcccggtgtgcggatcaaggaggagcccgtgagcgaggagggcgaggaggacgaggagcaggaggcggaggaggagcccatggacacttcccccagcggcctccacagcaagctggccaacgggctgcctctcgggcgggctgcgggcacagacagcttcaacgggcacccgccccagggctgcgccagcacccctgtggctcgggaactgaaggccttcgtggaggccacctttcagagacagtttgtgctcacgctgagcgaactcaagcgcctcttcaatctgcacttggccagcctgccccccggccacacactcttcagcggcatctcggaccgcatgctacaggacacggtgctggccgccggttgcaagcagatactggtgccttttcccccccagactgctgcttccccggatgagcagaaggtgtttgccctctgggagtctggagacatgagtgatcagcatcgacaggttttgcttgaaattttttccaaaaattaccgggtacgccgaaacatgatccagtctcggttgactcaagagtgtggagaagatctcagtaaacaggaggtggataaagtactaaaggactgctgtgtaagctatggtggcatgtggtaccttaaagggacagtacagtcttgacaatagtagcaaactactaacccagcaaatctaagcccaaggaagaagggcggaaccagaagtagggcctcgacttgcttcagacgacacagagcaagaggaactgaccatctcatgacctgtggcattgcacggtgcagtggacagaagggattatcctcagccagtcgcagggtcagcttaagttagttagatcactcccagaagagaccagctgggaccttctttgcagtac

SEQ ID NO: 167597 - DNA, 560 bp, Homo sapiens
  Payload ID: 12970
  Gene Symbol: POLR3E
  Gene Name: polymerase (RNA) III (DNA directed) polypeptide E (80kD)
  ENST ID: ENST00000564883
  CDS Start-End: 231-560
caccagcaacatggccgccgcctgagaggagagccgggccgccgccgtctctgcagcccgcgggtaactgggccgttgccgccgtccgcgctcggcccccgcggagagttgaggaaactgaagcactgagaagccttcatggagcttacgttctattgcagaagacaaacaacacctgagcaaatagaccagatcgagctgaaggactgcgcggctggctctcctctagtatggccaatgaagaggatgacccagttgtacaggagatcgatgtgtacttggccaagagtctggcggaaaagctgtatctatttcagtaccctgtgcgtccagcctcgatgacctacgatgacattccgcacctctcagccaagatcaagcccaagcagcagaaggtagagcttgagatggccatcgacaccctgaaccccaactattgccgcagcaaaggggagcagattgcgctgaacgtggacggggcctgcgccgacgagaccagcacgtattcctcgaagctgatggacaagcagaccttctgctcttcccagaccaccagtaac

SEQ ID NO: 167598 - DNA, 575 bp, Homo sapiens
  Payload ID: 12970
  Gene Symbol: POLR3E
  Gene Name: polymerase (RNA) III (DNA directed) polypeptide E (80kD)
  ENST ID: ENST00000561494
  CDS Start-End: 143-331
agcaacatggccgccgcctgagaggagagccgggccgccgccgtctctgcagcccgcgggtaactgggccgttgccgccgtccgcgctcggcccccgcggagagatcgagctgaaggactgcgcggctggctctcctctagtatggccaatgaagaggatgacccagttgtacaggagatcgatgtgtacttggccaagagtctggcggaaaagctgtatctatttcagatgggaaaactgaaggaacacaggagaggcagaagtgtgcagcagttaaagctggggctctggggtcagaccggattgagatccaactccatcacaccatagctgcgagaccgtggtaccctgtgcgtccagcctcgatgacctacgatgacattccgcacctctcagccaagatcaagcccaagcagcagaaggtagagcttgagatggccatcgacaccctgaaccccaactattgccgcagcaaaggggagcagattgcgctgaacgtggacggggcctgcgccgacgagaccagcacgtattcctcgaagctgatggacaagcagaccttctgctcttccca

SEQ ID NO: 167599 - DNA, 2464 bp, Homo sapiens
  Payload ID: 12970
  Gene Symbol: POLR3E
  Gene Name: polymerase (RNA) III (DNA directed) polypeptide E (80kD)
  Uniprot ID: Q9NVU0
  ENST ID: ENST00000564209
  CDS Start-End: 166-2229
gtgtccgccggagtttctccaccagcaacatggccgccgcctgagaggagagccgggccgccgccgtctctgcagcccgcgggtaactgggccgttgccgccgtccgcgctcggcccccgcggagagatcgagctgaaggactgcgcggctggctctcctctagtatggccaatgaagaggatgacccagttgtacaggagatcgatgtgtacttggccaagagtctggcggaaaagctgtatctatttcagtaccctgtgcgtccagcctcgatgacctacgatgacattccgcacctctcagccaagatcaagcccaagcagcagaaggtagagcttgagatggccatcgacaccctgaaccccaactattgccgcagcaaaggggagcagattgcgctgaacgtggacggggcctgcgccgacgagaccagcacgtattcctcgaagctgatggacaagcagaccttctgctcttcccagaccaccagtaacacatcccgttatgccgctgcactctacaggcaaggtgagctccacctgacacctttacatggcatcctgcagctgcggcccagcttctcctacctggataaggctgacgccaagcaccgggagagggaggcggccaacgaggcaggggactcttcacaggatgaggcggaagacgatgttaagcagatcacggtgcggttctcccggccggagtcagagcaggcccgccagcgccgtgtgcagtcctatgagttcctgcagaagaagcacgcagaggagccctgggtccacctgcattactatggcctgagggacagtcgctctgagcatgagcgtcagtacctgctgtgccccggctcaagcggggtggagaacacggagctcgtcaagtcacccagtgagtacctgatgatgctgatgccacccagccaggaggaggagaaagacaagcctgtggcccccagcaacgtcctgtcgatggcccagctgcgcacgctgcccctggccgatcagatcaagatcctgatgaagaatgtgaaggtcatgccttttgccaacttgatgagcctcctgggcccctccatcgattccgtggctgttctgcggggcatccagaaggtggcgatgttggtccaagggaactgggtggtgaagagtgacatcctataccccaaggactcgtccagccctcacagcggcgtgcctgctgaggtgctctgcaggggccgagacttcgttatgtggaagttcacgcagagccgctgggtggttaggaaagaggtggcaaccgtgaccaaactctgcgccgaggatgtgaaggacttcctggagcacatggccgtggtgaggatcaacaaaggctgggagttcattctgccttatgatggggagttcatcaagaagcacccggatgtggtccagcggcagcacatgctgtggacgggtatccaggccaaactggaaaaagtctataatcttgtaaaggaaaccatgccaaagaagccggatgcacaatcagggcctgccgggctggtctgtggggaccagcggatccaagtagccaaaaccaaggcccagcagaaccacgcgttgctggagcgggagctgcagcggcggaaggagcagctgcgggtgcctgcggtcccgcccggtgtgcggatcaaggaggagcccgtgagcgaggagggcgaggaggacgaggagcaggaggcggaggaggagcccatggacacttcccccagcggcctccacagcaagctggccaacgggctgcctctcgggcgggctgcgggcacagacagcttcaacgggcacccgccccagggctgcgccagcacccctgtggctcgggaactgaaggccttcgtggaggccacctttcagagacagtttgtgctcacgctgagcgaactcaagcgcctcttcaatctgcacttggccagcctgccccccggccacacactcttcagcggcatctcggaccgcatgctacaggacacggtgctggccgccggttgcaagcagatactggtgccttttcccccccagactgctgcttccccggatgagcagaaggtgtttgccctctgggagtctggagacatgagtgatcagtctcggttgactcaagagtgtggagaagatctcagtaaacaggaggtggataaagtactaaaggactgctgtgtaagctatggtggcatgtggtaccttaaagggacagtacagtcttgacaatagtagcaaactactaacccagcaaatctaagcccaaggaagaagggcggaaccagaagtagggcctcgacttgcttcagacgacacagagcaagaggaactgaccatctcatgacctgtggcattgcacggtgcagtggacagaagggattatcctcagccagtcgcagggtcagcttaagttagttagatcactcccagaagagaccagctgggaccttctttgcagtac

SEQ ID NO: 167600 - DNA, 3655 bp, Homo sapiens
  Payload ID: 12970
  Gene Symbol: POLR3E
  Gene Name: polymerase (RNA) III (DNA directed) polypeptide E (80kD)
  ENST ID: ENST00000615879
  CDS Start-End: 236-2254
aagaggaaacgctggggccggcccgctcccccccacgtgtccgccggagtttctccaccagcaacatggccgccgcctgagaggagagccgggccgccgccgtctctgcagcccgcgggtaactgggccgttgccgccgtccgcgctcggcccccgcggagagatcgatgtgtacttggccaagagtctggcggaaaagctgtatctatttcagtaccctgtgcgtccagcctcgatgacctacgatgacattccgcacctctcagccaagatcaagcccaagcagcagaaggtagagcttgagatggccatcgacaccctgaaccccaactattgccgcagcaaaggggagcagattgcgctgaacgtggacggggcctgcgccgacgagaccagcacgtattcctcgaagctgatggacaagcagaccttctgctcttcccagaccaccagtaacacatcccgttatgccgctgcactctacaggcaaggtgagctccacctgacacctttacatggcatcctgcagctgcggcccagcttctcctacctggataaggctgacgccaagcaccgggagagggaggcggccaacgaggcaggggactcttcacaggatgaggcggaagacgatgttaagcagatcacggtgcggttctcccggccggagtcagagcaggcccgccagcgccgtgtgcagtcctatgagttcctgcagaagaagcacgcagaggagccctgggtccacctgcattactatggcctgagggacagtcgctctgagcatgagcgtcagtacctgctgtgccccggctcaagcggggtggagaacacggagctcgtcaagtcacccagtgagtacctgatgatgctgatgccacccagccaggaggaggagaaagacaagcctgtggcccccagcaacgtcctgtcgatggcccagctgcgcacgctgcccctggccgatcagatcaagatcctgatgaagaatgtgaaggtcatgccttttgccaacttgatgagcctcctgggcccctccatcgattccgtggctgttctgcggggcatccagaaggtggcgatgttggtccaagggaactgggtggtgaagagtgacatcctataccccaaggactcgtccagccctcacagcggcgtgcctgctgaggtgctctgcaggggccgagacttcgttatgtggaagttcacgcagagccgctgggtggttaggaaagaggtggcaaccgtgaccaaactctgcgccgaggatgtgaaggacttcctggagcacatggccgtggtgaggatcaacaaaggctgggagttcattctgccttatgatggggagttcatcaagaagcacccggatgtggtccagcggcagcacatgctgtggacgggtatccaggccaaactggaaaaagtctataatcttgtaaaggaaaccatgccaaagaagccggatgcacaatcagggcctgccgggctggtctgtggggaccagcggatccaagtagccaaaaccaaggcccagcagaaccacgcgttgctggagcgggagctgcagcggcggaaggagcagctgcgggtgcctgcggtcccgcccggtgtgcggatcaaggaggagcccgtgagcgaggagggcgaggaggacgaggagcaggaggcggaggaggagcccatggacacttcccccagcggcctccacagcaagctggccaacgggctgcctctcgggcgggctgcgggcacagacagcttcaacgggcacccgccccagggctgcgccagcacccctgtggctcgggaactgaaggccttcgtggaggccacctttcagagacagtttgtgctcacgctgagcgaactcaagcgcctcttcaatctgcacttggccagcctgccccccggccacacactcttcagcggcatctcggaccgcatgctacaggacacggtgctggccgccggttgcaagcagatactggtgccttttcccccccagactgctgcttccccggatgagcagaaggtgtttgccctctgggagtctggagacatgagtgatcagcatcgacaggttttgcttgaaattttttccaaaaattaccgggtacgccgaaacatgatccagtctcggttgactcaagagtgtggagaagatctcagtaaacaggaggtggataaagtactaaaggactgctgtgtaagctatggtggcatgtggtaccttaaagggacagtacagtcttgacaatagtagcaaactactaacccagcaaatctaagcccaaggaagaagggcggaaccagaagtagggcctcgacttgcttcagacgacacagagcaagaggaactgaccatctcatgacctgtggcattgcacggtgcagtggacagaagggattatcctcagccagtcgcagggtcagcttaagttagttagatcactcccagaagagaccagctgggaccttctttgcagtacaatttgaaattcctgatgtattttgcttattatttggtttcattctcataataaagagagtgtatactgacatgggcaggatgataaaaatcatggtttaatattttcttttgtaaacttaatgccaacaaggtctaagttatgtttacaacatgaagaaaacctcaaagttcttaatttttaaaatgcctagaagacaatatttagtcttggattatctatctgctaagacctccaccaatttcattaaaccaaattgaattattctattcttgggattctgtggccacttcacctttgacaacaacctactttatgtagcagtctcaactgtttacatgaaccatagcaaaaaaatcagaatcaaatccatctccttttaatgtttgcagaaagatgcaaacaaaaccaggtaagtatggaacaatgtgtaagtgaggttatcacactttgatgtaaaaatttctattttgtgtatttttaaaataaatgcaaacactaaactagcatcatggtgctatcttcaaatggttacaggaaggcgatcttgttgggctcagcgttacgtgtatctagagggaacggagctaatggaggaagacagagcagcactgtccactagaaagaggcgagtcacgtacataattttgaaagtttctagcaaccacattagtttaaaaaggtcatgttagcatattatttagctcaaaatatctaaaacatcaacataaggtaaaagtcttcaaaatctggcattttacactttcctcaacactcagtttggactagccacatcataagtgctccgatgccacatggggctatttgcgacagtattggatagcacagccctagaaactgatggaaaaaataagagtaagctaggttggatgacatgtgaattttggtatctagataaggctttcgccatcttttttgtacaacacagtcactaattgtctgaaggtttaaatgacggtctatgctatttccccactccccccaaaataaaacatctaatattttagctatagaatcactaaggcattgatcaaggatgtactttgccaaataagtatttggtaacatcacttaacaagttgatcgtgtattgattctgttaacatatgtgaacctgaaaagtaaagttaccaaaagcgatttgg

SEQ ID NO: 167601 - DNA, 2416 bp, Homo sapiens
  Payload ID: 12971
  Gene Symbol: POLR3F
  Gene Name: polymerase (RNA) III (DNA directed) polypeptide F, 39 kDa
  Uniprot ID: Q9H1D9
  ENST ID: ENST00000377603
  CDS Start-End: 381-1331
ccgcagggagcctggtacccgcctggagttcctttcccagtgctttcccataggcatctaagaatattccttcacagagttgccaagtgctaaaagttggtttcccaactcagaatgaaggaaccaggcttgtgcgtccgatgggcattgacattctggaaaacaagaataagaagctgtagcggcgcctgtaagtgggccggagcaggcgcagcttggccacctcccgccgaaaggcaaggaaggaccggctgcgacacgaggaagaaggcccctcggcctcagcagagcgctatcctccactggttccccgggttccccggcttgctaccgggctgctccgtgcatctttccccccaggcgtcaggaactgcgccctcatggcggaggtgaaggtgaaggtgcagccgcctgacgcggatccggtcgaaatagaaaacaggattatagaattatgtcaccagttccctcatggaatcacagaccaagtaattcagaatgaaatgcctcatatagaagcccagcagcgggcagtagccatcaataggttgttgtctatgggtcagttggatctcttaaggagcaatacgggccttttatatagaataaaggactctcagaatgctggtaaaatgaagggatccgataaccaagaaaaactagtatatcaaatcatagaggatgcaggaaataaaggaatatggagcagagatatccgctataaaagtaatttgccattaacagaaatcaacaaaattctgaagaatctggaaagtaaaaagcttatcaaagctgttaagtctgtagcagcctcaaaaaagaaggtgtatatgctctataacctgcagccagaccggtctgtgactggtggagcctggtacagtgaccaggattttgaatctgaatttgtagaggtgcttaaccaacagtgttttaaattcctacagtccaaggcagaaacagcacgagaaagcaaacagaacccaatgatacaaagaaatagttcatttgcctcatcacatgaagtgtggaaatatatctgcgaattgggaatcagtaaggtagagttatccatggaagacattgaaaccatcctgaatacactcatttatgatggaaaagtggagatgacgattattgctgcaaaagaaggcacagttggcagtgtagatggacacatgaaactgtacagggcagtcaatccaatcatccctcccacaggtttggtccgggcaccctgtggactctgcccggtttttgatgactgccacgaaggtggtgagatttcaccatctaactgtatttacatgacagagtggctcgaattttaatagagagctatgaactttattgacattttgcaaatgaagttacttagggagcagataatttaattcatgatggaacacgaaatctccttgaaagcaaacttcacaataatggacgtagacttgctgctatgaaaacatattttttttatttatgaagactaaatttatattggtaaaatagccagtagaatatgaaagaaataaggttagtagtgaaattcattcttcaataaataaaacactttgaaactccggaggaccacatctttcaagacttctgatgggtcaaggaaaaagatgccaacatacccgtatttaccaagtactatgataatggctagagtataaaaatgttctttttaaagttatttattaagttcttcattggaagtttttttttatatctggttcactaccaccattttctgtttcctactttctcagtggtttcattgaaaagaaattagaaggggttaaaggcaggaatagcaaagagtgcaaacttggggtatgactgggggagagtggaacatgccttttccgcacaatattaattcctttttgtatcagaaatgttcttttaggagattatgctaccatacttacttcaaacccaatgactactgtcaaggacatattttcagtacataaatactatcattttcattctaaagaatattttcactgttccttctttcttaaagtcttatgtttcactctttaactcaaatgtattctttgttagaatttaccctagattcttatttaatgtctgcagtagactgaatgtttgtgtgcccccagaattctaatgttgaaatctcatttccaatgtgatggtatttggaggtggggcttttggtaagtgataggtcaggagagtaacagcgctcatgaatgggattagtgcccttatataaagagacccagagagctccatcaccccttctgccatgtgaaagggagaagacaaacatccacgaaccaggaagtgggtcctcaccagaaaacaaatctgtaagcaccttgatcttggacttctcagcctccagaattgtgagaaataaatttctgttgttgataaa

SEQ ID NO: 167602 - DNA, 3285 bp, Homo sapiens
  Payload ID: 12972
  Gene Symbol: POLR3G
  Gene Name: polymerase (RNA) III (DNA directed) polypeptide G (32kD)
  Uniprot ID: O15318
  ENST ID: ENST00000399107
  CDS Start-End: 201-872
actccgcggtcctggtgccgcgtgcaggtcggtgcgcgcttctcccgaggtggaacgggcggcagtcaagcgccggcgttctctgccgtcaccctttccttgccggccggcacttcggctgcagagttttgcccacgcttcgagacttagggagcagtgcctttcagaatttgcccactcatctggtataactggttctgatggctgggaataaaggaagaggacgtgctgcttatacctttaatattgaggctgttggatttagcaaaggtgaaaagttacctgatgtagtgttgaaaccacccccactatttcctgatacagattataaaccagtgccactgaaaacaggagaaggtgaagaatatatgctggctttgaaacaggagttgagagaaacaatgaaaagaatgccttattttattgaaacacctgaagaaagacaagatattgaaaggtatagtaaaagatacatgaaggtatacaaggaagaatggataccagattggagaagacttccaagagagatgatgccaagaaataaatgtaaaaaagcaggcccaaaacccaaaaaggcaaaagacgcaggcaaaggcacaccactcactaatactgaagatgtgttgaaaaaaatggaggaattggaaaaaagaggtgatggtgaaaaatcagatgaggaaaatgaagagaaagaaggaagcaaagagaaaagtaaagaaggtgatgatgacgatgacgatgatgccgcagaacaggaggaatatgatgaagaagagcaagaagaggaaaatgactacattaattcatactttgaagatggagatgattttggcgcagacagtgatgacaacatggatgaggcaacctattaggcatgaaatttttcaaaaaatatttttatgatgcagcttctgaacatttggacagacttgatttgtattttatttctgataaggaataagtacttgtttctgttgttttggacaaatagttgttaccaaaatattcaaaaccactttgagtttacatactagttaccttaaaaattattccctgacactctgacattccttctaaacacctctgccatctctcttatgtactctcatgggtttttttgtatgatttgaatatgaatgtgcctaaagaatttttgctctcttaatctatgtatacatacttgaacaaatcattcttgcttaactgctgatcttttgtaaaactattgctagtcataatggatttctataacctgaaagttgatataatacagcacgtggagcactttaaaaacaaagaaacttgaaaataattttattttttacctttacatggtgtgttctagactactgcattatgactacataaacctacctgagctcttacaagtacagaattgtgagacagaggttttgtgatggaaaacatacacatagggaaaaataccaaactgagcaatataaatttcacagctcacatcttagccagtacaaagaaactttcacatggggtgaatattataatacttgaatttgagacttaatactgtatatgaattaatcatcccactgtaataactgacatcttcaaatagttgggcttatgaaaaatttgactaagacattttattttatactttatgtaaatgtgaaataagttctggtcatataaatatgtagaatgcatgtgtgtgaactctatgaagtgaagtgtggtggccttttatgtttcagagtactcaagtgtacaattgatttatataaaaatgcaaaatgaactcaggtcattttgaaattaatattaatatttttgttgtttaactttaaagctagctcccctaactttatatattttttgggaaaaaatacctaaaaacctcagcctacaaagactctcagaaatgccaaagattttcaaggaaattcatattatatatttcaaaaatgatttatcaatgttatctaccaaaagaaataattttatttttcccctttggggagatattatcctctaatatgagaatcagatccctagattctatttctacctatactattaaactcaaccttgaacctgagcttggttgtttctgtgccttagtttctccactcgtaaacaatttcctataaaaattgtttaaacaccaaccaaaatttaccatatgtattcattctcttgccttaaagatcacttcttaacttacatttggctctcaccctctaaaaatttgtagtttggagagtaactgaaagcacaattttaagaaacatgttttcctcacaaaatatattgtaatctgattttcctatcttgtattcatgcagaaaattggagaaaatgtgtattgtcttgtgccattctgcaatatgaatttctcaggaaaaagatgtttcaatggcaatactttcttaaataattcaagatgggtgtgaggacctatcttattagtttagtgctgtgttaaccatttgtgaattacttcttgtttaaaggaagttgtcaaaaaattttaagattctaaatggaatacacgaataaagtaagccttagaatagaaacctcacaaaaagttgtcatttgcggttgataattaacataggtgttttattctctcaactccttagtaccagagccaaatacaatttagttttcagaaatcttatcaatattgttctatttacctacttataaatctgcagataaccacttgaaccaggcaaatacactgaagataaaggttatttctttttttagctttgaatttgtcatgaccattttagtcttgcagatagcagggcagccccttggggcaaggatttactctgggaggtaccgttaagagccttctttccccctttgaaagatccttttacaatgttaaagtatactagttgcaagaacaagcaggatttgcaggttgctttaccagcatgagtctcatttttctggcttaaaatctgggactgtgaaattattccataggaaagtgaatgttattttgcagaattagcctcttacataaaagtatttgttgaagtgtctttaaaattgctatcatgagcaaaactggttgctgtaatgcttgtttttctgtatttatttacacattaaattcttacaaaacaaaatgtgttcgtttgttttatagtaagatgttttattttgaacttatttaaatgtttatttgttagagaaaactaatttgttaatatagatcttaactagtaactattaagcagggatgtttgttccaaatattcttgaataaacaatcaccacaaacaa

SEQ ID NO: 167603 - DNA, 3251 bp, Homo sapiens
  Payload ID: 12972
  Gene Symbol: POLR3G
  Gene Name: polymerase (RNA) III (DNA directed) polypeptide G (32kD)
  Uniprot ID: O15318
  ENST ID: ENST00000504930
  CDS Start-End: 166-837
aggtcggtgcgcgcttctcccgaggtggaacgggcggcagtcaagcgccggcgttctctgccgtcaccctttccttgccggccggcacttcggctgcagagttttgcccacgcttcgagacttagggagcagaatttgcccactcatctggtataactggttctgatggctgggaataaaggaagaggacgtgctgcttatacctttaatattgaggctgttggatttagcaaaggtgaaaagttacctgatgtagtgttgaaaccacccccactatttcctgatacagattataaaccagtgccactgaaaacaggagaaggtgaagaatatatgctggctttgaaacaggagttgagagaaacaatgaaaagaatgccttattttattgaaacacctgaagaaagacaagatattgaaaggtatagtaaaagatacatgaaggtatacaaggaagaatggataccagattggagaagacttccaagagagatgatgccaagaaataaatgtaaaaaagcaggcccaaaacccaaaaaggcaaaagacgcaggcaaaggcacaccactcactaatactgaagatgtgttgaaaaaaatggaggaattggaaaaaagaggtgatggtgaaaaatcagatgaggaaaatgaagagaaagaaggaagcaaagagaaaagtaaagaaggtgatgatgacgatgacgatgatgccgcagaacaggaggaatatgatgaagaagagcaagaagaggaaaatgactacattaattcatactttgaagatggagatgattttggcgcagacagtgatgacaacatggatgaggcaacctattaggcatgaaatttttcaaaaaatatttttatgatgcagcttctgaacatttggacagacttgatttgtattttatttctgataaggaataagtacttgtttctgttgttttggacaaatagttgttaccaaaatattcaaaaccactttgagtttacatactagttaccttaaaaattattccctgacactctgacattccttctaaacacctctgccatctctcttatgtactctcatgggtttttttgtatgatttgaatatgaatgtgcctaaagaatttttgctctcttaatctatgtatacatacttgaacaaatcattcttgcttaactgctgatcttttgtaaaactattgctagtcataatggatttctataacctgaaagttgatataatacagcacgtggagcactttaaaaacaaagaaacttgaaaataattttattttttacctttacatggtgtgttctagactactgcattatgactacataaacctacctgagctcttacaagtacagaattgtgagacagaggttttgtgatggaaaacatacacatagggaaaaataccaaactgagcaatataaatttcacagctcacatcttagccagtacaaagaaactttcacatggggtgaatattataatacttgaatttgagacttaatactgtatatgaattaatcatcccactgtaataactgacatcttcaaatagttgggcttatgaaaaatttgactaagacattttattttatactttatgtaaatgtgaaataagttctggtcatataaatatgtagaatgcatgtgtgtgaactctatgaagtgaagtgtggtggccttttatgtttcagagtactcaagtgtacaattgatttatataaaaatgcaaaatgaactcaggtcattttgaaattaatattaatatttttgttgtttaactttaaagctagctcccctaactttatatattttttgggaaaaaatacctaaaaacctcagcctacaaagactctcagaaatgccaaagattttcaaggaaattcatattatatatttcaaaaatgatttatcaatgttatctaccaaaagaaataattttatttttcccctttggggagatattatcctctaatatgagaatcagatccctagattctatttctacctatactattaaactcaaccttgaacctgagcttggttgtttctgtgccttagtttctccactcgtaaacaatttcctataaaaattgtttaaacaccaaccaaaatttaccatatgtattcattctcttgccttaaagatcacttcttaacttacatttggctctcaccctctaaaaatttgtagtttggagagtaactgaaagcacaattttaagaaacatgttttcctcacaaaatatattgtaatctgattttcctatcttgtattcatgcagaaaattggagaaaatgtgtattgtcttgtgccattctgcaatatgaatttctcaggaaaaagatgtttcaatggcaatactttcttaaataattcaagatgggtgtgaggacctatcttattagtttagtgctgtgttaaccatttgtgaattacttcttgtttaaaggaagttgtcaaaaaattttaagattctaaatggaatacacgaataaagtaagccttagaatagaaacctcacaaaaagttgtcatttgcggttgataattaacataggtgttttattctctcaactccttagtaccagagccaaatacaatttagttttcagaaatcttatcaatattgttctatttacctacttataaatctgcagataaccacttgaaccaggcaaatacactgaagataaaggttatttctttttttagctttgaatttgtcatgaccattttagtcttgcagatagcagggcagccccttggggcaaggatttactctgggaggtaccgttaagagccttctttccccctttgaaagatccttttacaatgttaaagtatactagttgcaagaacaagcaggatttgcaggttgctttaccagcatgagtctcatttttctggcttaaaatctgggactgtgaaattattccataggaaagtgaatgttattttgcagaattagcctcttacataaaagtatttgttgaagtgtctttaaaattgctatcatgagcaaaactggttgctgtaatgcttgtttttctgtatttatttacacattaaattcttacaaaacaaaatgtgttcgtttgttttatagtaagatgttttattttgaacttatttaaatgtttatttgttagagaaaactaatttgttaatatagatcttaactagtaactattaagcagggatgtttgttccaaatattcttgaataaacaatcaccacaaacaac

SEQ ID NO: 167604 - DNA, 583 bp, Homo sapiens
  Payload ID: 12972
  Gene Symbol: POLR3G
  Gene Name: polymerase (RNA) III (DNA directed) polypeptide G (32kD)
  ENST ID: ENST00000503973
  CDS Start-End: 201-583
actccgcggtcctggtgccgcgtgcaggtcggtgcgcgcttctcccgaggtggaacgggcggcagtcaagcgccggcgttctctgccgtcaccctttccttgccggccggcacttcggctgcagagttttgcccacgcttcgagacttagggagcagtgcctttcagaatttgcccactcatctggtataactggttctgatggctgggaataaaggaagaggacgtgctgcttatacctttaatattgaggctgttggatttagcaaaggtgaaaagttacctgatgtagtgttgaaaccacccccactatttcctgatacagattataaaccagtgccactgaaaacaggagaaggtgaagaatatatgctggctttgaaacaggagttgagagaaacaatgaaaagaatgccttattttattgaaacacctgaagaaagacaagatattgaaaggtatagtaaaagatacatgaaggtatacaaggaagaatggataccagattggagaagacttccaagagagatgatgccaagaaataaatgtaaaaaaggtacattgactaatataatagtaattca

SEQ ID NO: 167605 - DNA, 763 bp, Homo sapiens
  Payload ID: 12972
  Gene Symbol: POLR3G
  Gene Name: polymerase (RNA) III (DNA directed) polypeptide G (32kD)
  ENST ID: ENST00000503373
  CDS Start-End: 102-763
gacttgtgggcgtaccactcgagcgccgacatgctgggcaggggtgcagccaggcgggtgcctttcagaatttgcccactcatctggtataactggttctgatggctgggaataaaggaagaggacgtgctgcttatacctttaatattgaggctgttggatttagcaaaggtgaaaagttacctgatgtagtgttgaaaccacccccactatttcctgatacagattataaaccagtgccactgaaaacaggagaaggtgaagaatatatgctggctttgaaacaggagttgagagaaacaatgaaaagaatgccttattttattgaaacacctgaagaaagacaagatattgaaaggtatagtaaaagatacatgaaggtatacaaggaagaatggataccagattggagaagacttccaagagagatgatgccaagaaataaatgtaaaaaagcaggcccaaaacccaaaaaggcaaaagacgcaggcaaaggcacaccactcactaatactgaagatgtgttgaaaaaaatggaggaattggaaaaaagaggtgatggtgaaaaatcagatgaggaaaatgaagagaaagaaggaagcaaagagaaaagtaaagaaggtgatgatgacgatgacgatgatgccgcagaacaggaggaatatgatgaagaagagcaagaagaggaaaatgactacattaattcatactttgaagatggagatgattttggcgcagacagtgatgacaacatggatgaggc

SEQ ID NO: 167606 - DNA, 339 bp, Homo sapiens
  Payload ID: 12972
  Gene Symbol: POLR3G
  Gene Name: polymerase (RNA) III (DNA directed) polypeptide G (32kD)
  ENST ID: ENST00000512239
  CDS Start-End: 223-339
cacctggattatgttaacagcaagttagcaggccacatcattcagaagatacgggaaattaatattcttgagaagagaggaaattagacactacctgagagggtggggcatccagctcctaatgaaaaacaacttttgataacacggataacacagtactatcaccttcaaagtgtttgtgcctttcagaatttgcccactcatctggtataactggttctgatggctgggaataaaggaagaggacgtgctgcttatacctttaatattgaggctgttggatttagcaaaggtgaaaagttacctgatgtagtgttgaaaccacccccactatttcct

SEQ ID NO: 167607 - DNA, 682 bp, Homo sapiens
  Payload ID: 12972
  Gene Symbol: POLR3G
  Gene Name: polymerase (RNA) III (DNA directed) polypeptide G (32kD)
  ENST ID: ENST00000514483
  CDS Start-End: 170-472
gtgcgcgcttctcccgaggtggaacgggcggcagtcaagcgccggcgttctctgccgtcaccctttccttgccggccggcacttcggctgcagagttttgcccacgcttcgagacttagggagcagtgcctttcagaatttgcccactcatctggtataactggttctgatggctgggaataaaggaagaggacgtgctgcttatacctttaatattgaggctgttggatttagcaaaggtgaaaagttacctgatgtagtgttgaaaccacccccactatttcctgatacagattataaaccagtgccactgaaaacaggagaaggtgaagaatatatgctggctttgaaacaggagttgagagaaacaatgaaaagaatgccttattttattgaaacacctgaagaaagacaagagacgggagtcttgcttttttgctcacactggtctcacattcctggcttcaagtgatcctcccatctcggccttccaaagtgctgaaattacaggcatgagccaccgcacccagcttacctctgtttcctgatatagtgtttaaaaaacacacgcatgttaaaaataaaggtttttctataaaatatatacatttatatgtgcctatataggtttatataatatgtgtatatatgtgcatacataaatttatataatatccatgct

SEQ ID NO: 167608 - DNA, 581 bp, Homo sapiens
  Payload ID: 12972
  Gene Symbol: POLR3G
  Gene Name: polymerase (RNA) III (DNA directed) polypeptide G (32kD)
  ENST ID: ENST00000505345
  CDS Start-End: 304-581
aagcagtggccggcgcgccgcgtcctctttggcctctcggtcctgcaagaggccggaggagtacaggtactccgggaggctgcgcagccccaggcctgtatcgatcaccacgtcctgctcggagccgcgcaccagccagatgttggcacggttgcccgactcgtagaaacgttcttgaatccagaagataccatcgcctagagacttgtgggcgtaccactcgagcgccgacatgctgggcaggggtgcagccaggcgggtgcctttcagaatttgcccactcatctggtataactggttctgatggctgggaataaaggaagaggacgtgctgcttatacctttaatattgaggctgttggatttagcaaaggtgaaaagttacctgatgtagtgttgaaaccacccccactatttcctgatacagattataaaccagtgccactgaaaacaggagaaggtgaagaatatatgctggctttgaaacaggagttgagagaaacaatgaaaagaatgccttattttattgaaacacctgaagaaagacaagatattgaaaggtatagtaaaagatacatgaa

SEQ ID NO: 167609 - DNA, 995 bp, Homo sapiens
  Payload ID: 12972
  Gene Symbol: POLR3G
  Gene Name: polymerase (RNA) III (DNA directed) polypeptide G (32kD)
  ENST ID: ENST00000622335
  CDS Start-End: 156-857
cgaggtggaacgggcggcagtcaagcgccggcgttctctgccgtcaccctttccttgccggccggcacttcggctgcagagttttgcccacgcttcgagacttagggagcagtgcctttcagaatttgcccactcatctggtataactggttctgatggctgggaataaaggaagaggacgtgctgcttatacctttaatattgaggctgttggatttagcaaaggtgaaaagttacctgatgtagtgttgaaaccacccccactatttcctgatacagattataaaccagtgccactgaaaacaggagaaggtgaagaatatatgctggctttgaaacaggagttgagagaaacaatgaaaagaatgccttattttattgaaacacctgaagaaagacaagatattgaaaggtatagtaaaagatacatgaaggtatacaaggaagaatggataccagattggagaagacttccaagagagatgatgccaagaaataaatgtaaaaaagcaggcccaaaacccaaaaaggcaaaagacgcaggcaaaggcacaccactcactaatactgaagatgtgttgaaaaaaatggaggaattggaaaaaagaggtgatggtgaaaaatcagatgaggaaaatgaagagaaagaaggaagcaaagagaaaagtaaagaaggtgatgatgacgatgacgatgatgccgcagaacaggaggaatatgatgaagaagagcaagaagaggaaaatgactacattaattcatactttgaagatggagatgattttggcgcagacgtgatgacaacatggatgaggcaacctattaggcatgaaatttttcaaaaaatatttttatgatgcagcttctgaacatttggacagacttgatttgtattttatttctgataaggaataagtacttgtttctgttgttttggacaaatagttgttaccaaaatattcaaaaccactttgagtttacatactagttacctt

SEQ ID NO: 167610 - DNA, 818 bp, Homo sapiens
  Payload ID: 12973
  Gene Symbol: POLR3GL
  Gene Name: polymerase (RNA) III (DNA directed) polypeptide G (32kD)-like
  ENST ID: ENST00000369313
  CDS Start-End: 108-695
cttgaggaagcccagtacatttcaagttggtcgcggcttgggctccgctttggggaggggcagcaggtttattcactggatctctgaatacccaggccccctccaccatggccagccggggtgggggccggggtcgtggccggggccagttgaccttcaacgtggaggccgtgggcattgggaaaggggatgctttgcccccacccaccctgcagccttctccactcttccctcccttggagttccgcccagtacctttgccctcaggcgaggaaggggaatatgtcctggcactgaagcaagagctacgaggagccatgaggcagctcccctacttcatccggccagctgtccccaagagagattggcggcgtctaccccgggagctaaagatccgagtgcggaagctacagaaggaacggattacaattctgctccccaagaggccccctaagaccacagaagataaggaggaaacaatacagaaactagagaccctggagaagaaggaagaagaagtaacttcagaggaggatgaggagaaagaagaagaagaagagaaggaagaggaggaagaagaagagtatgatgaagaagaacatgaagaggaaactgattacatcatgtcatattttgacaatggagaggactttggtggtgacagtgatgacaatatggacgaggctatatactgaagaaggactctggaccctcgtgtctttctttaggatacagagagtaactgtacctattatttgtttcttcagacaagcaaatcatttggtcagagttcatataatctgtctgttccctggaga

SEQ ID NO: 167611 - DNA, 1165 bp, Homo sapiens
  Payload ID: 12973
  Gene Symbol: POLR3GL
  Gene Name: polymerase (RNA) III (DNA directed) polypeptide G (32kD)-like
  Uniprot ID: Q9BT43
  ENST ID: ENST00000369314
  CDS Start-End: 108-764
cttgaggaagcccagtacatttcaagttggtcgcggcttgggctccgctttggggaggggcagcaggtttattcactggatctctgaatacccaggccccctccaccatggccagccggggtgggggccggggtcgtggccggggccagttgaccttcaacgtggaggccgtgggcattgggaaaggggatgctttgcccccacccaccctgcagccttctccactcttccctcccttggagttccgcccagtacctttgccctcaggcgaggaaggggaatatgtcctggcactgaagcaagagctacgaggagccatgaggcagctcccctacttcatccggccagctgtccccaagagagatgtggagcgttattcagacaaatatcagatgtcaggtccgattgacaatgccatcgattggaaccctgattggcggcgtctaccccgggagctaaagatccgagtgcggaagctacagaaggaacggattacaattctgctccccaagaggccccctaagaccacagaagataaggaggaaacaatacagaaactagagaccctggagaagaaggaagaagaagtaacttcagaggaggatgaggagaaagaagaagaagaagagaaggaagaggaggaagaagaagagtatgatgaagaagaacatgaagaggaaactgattacatcatgtcatattttgacaatggagaggactttggtggtgacagtgatgacaatatggacgaggctatatactgaagaaggactctggaccctcgtgtctttctttaggatacagagagtaactgtacctattatttgtttcttcagacaagcaaatcatttggtcagagttcatataatctgtctgttccctggagatgggaatagaggatgatgacagtttattttctacacttcccctccttccacatttgtatcacctttgctatcttggggaaagtgcaaaggacaaacatctcaattgtatgaagggagaaaggagaattgaaagaagaactggggttgttagagctgagatgactgtacacatacccctgcccaatttatatagctctttgtggagataattaggggtgggagcagtttgaaggagtaagcctggttttatacttttaaataaagtgtttttatctgtc

SEQ ID NO: 167612 - DNA, 1330 bp, Homo sapiens
  Payload ID: 12974
  Gene Symbol: POLR3H
  Gene Name: polymerase (RNA) III (DNA directed) polypeptide H (22.9kD)
  Uniprot ID: Q9Y535
  ENST ID: ENST00000337566
  CDS Start-End: 362-889
aagcgcgagcggctgtgcgcggtgcgtggtgcgtggtgcgtgatacgagcggcggcacgtggcgcgggtgcggggcgtggagtggcgtggcgtggagtggcgtggcgtggcggggtctcgcggcgcgggcgcgcacccggagctgtggacggagagtgcctccctctggcctcagtttcctcatgttgtagtagcggagcatggcccggaccgggcccccgagaccgccccgtgcaacctcaccgccagcctgggggcctcagcgactgggacgggaccaaggggctcggggattctccctgcccccggccctggtgcgtgactgaccctcctgttcccagagcccccagcgcaggccgggatgttcgtcctggtggaaatggtggacaccgtccggatccccccttggcagtttgagaggaagctcaacgactccattgccgaggagctgaacaagaagttggccaacaaggtcgtgtacaacgtgggactctgcatttgtctgtttgatatcaccaaactggaggatgcctatgtattccctggggatggcgcatcacacaccaaagtctctctaggcttcttcgatgacattctcatccccccagagtcactgcagcagccagccaagttcgacgaagcggagcaggtgtgggtgtgggagtacgagacggaggaaggagcacacgacctctacatggacaccggcgaggagatccgcttccgggtggtggacgagagctttgttgacacgtcccccacagggcccagctcagcagatgccaccacttccagtgaggagctgccaaagaaggaggctccgtacacgcttgtgggatccatcagtgagccaggcctgggccttctctcctggtggaccagcaactagccctggggctggacagtggaccctaccagcctgcgggaaggtggtatggccggctgtgaagacaacagcagctgaggccgatgctaaggagatagtgtctcgagctggacagtgaggcaaggccaggagtgcccaccagcttgccccgctcctccaccatctaggccctgctcctccttcactgcagtgatggatccatctgtggctgtggctgttgggcctccactgaccttgactgaaaagacccttcctggaccctggacttgacaacaaacggcacagacaccaatcactcacagaacagtcactggttttggattcttgttttccttgcaagaacaaaaggttctctagaatccttcagccaccaatgaaatgatcaggcaggagaaaaactttagatgggagtcttgtcatcaaaaataaatacagttgcatgga

SEQ ID NO: 167613 - DNA, 4416 bp, Homo sapiens
  Payload ID: 12974
  Gene Symbol: POLR3H
  Gene Name: polymerase (RNA) III (DNA directed) polypeptide H (22.9kD)
  Uniprot ID: Q9Y535
  ENST ID: ENST00000355209
  CDS Start-End: 345-959
cgcggtgcgtggtgcgtggtgcgtgatacgagcggcggcacgtggcgcgggtgcggggcgtggagtggcgtggcgtggagtggcgtggcgtggcggggtctcgcggcgcgggcgcgcacccggagctgtggacggagagtgcctccctctggcctcagtttcctcatgttgtagtagcggagcatggcccggaccgggcccccgagaccgccccgtgcaacctcaccgccagcctgggggcctcagcgactgggacgggaccaaggggctcggggattctccctgcccccggccctggtgcgtgactgaccctcctgttcccagagcccccagcgcaggccgggatgttcgtcctggtggaaatggtggacaccgtccggatccccccttggcagtttgagaggaagctcaacgactccattgccgaggagctgaacaagaagttggccaacaaggtcgtgtacaacgtgggactctgcatttgtctgtttgatatcaccaaactggaggatgcctatgtattccctggggatggcgcatcacacaccaaagtccattttcgctgcgtggtgtttcatccattcctagatgagattctcattgggaagatcaaaggctgcagcccagaaggagtgcacgtctctctaggcttcttcgatgacattctcatccccccagagtcactgcagcagccagccaagttcgacgaagcggagcaggtgtgggtgtgggagtacgagacggaggaaggagcacacgacctctacatggacaccggcgaggagatccgcttccgggtggtggacgagagctttgttgacacgtcccccacagggcccagctcagcagatgccaccacttccagtgaggagctgccaaagaaggaggctccgtacacgcttgtgggatccatcagtgagccaggcctgggccttctctcctggtggaccagcaactagccctggggctggacagtggaccctaccagcctgcgggaaggtggtatggccggctgtgaagacaacagcagctgaggccgatgctaaggagatagtgtctcgagctggacagtgaggcaaggccaggagtgcccaccagcttgccccgctcctccaccatctaggccctgctcctccttcactgcagtgatggatccatctgtggctgtggctgttgggcctccactgaccttgactgaaaagacccttcctggaccctggacttgacaacaaacggcacagacaccaatcactcacagaacagtcactggttttggattcttgttttccttgcaagaacaaaaggttctctagaatccttcagccaccaatgaaatgatcaggcaggagaaaaactttagatgggagtcttgtcatcaaaaataaatacagttgcatggagctgcttaagatctgaaccaaactcaaaataggaagacgggggctaaaaagttattttaagaacccccccaccacaaccacagtcactccgtgggctaagcggggagcaggaagcatgtctggtcacaccatcttggaataggaagccatggctggacggatcggatccactgatggcacacgtggagctgaacttgacgccagcggcggggcggggaggcactgccctcactgttgcagttccttcattctgttgagggcactgccagcgcggaaccactcaatctgcgtctcgttgaaggtgtggttcaggaggatggtctcctgggtcccgttggggtgcttgatgatgcacttcaggggctgcaaggagaaggtgggtgtgggtggaagtggtgggtactgtgtgcccttggccccgcaggggggtcagggagacagggcactgcctggggacctaagaggtcagcaggcaaaccaaatcctaggccagtctgtgcctgatggcccaggtcagacccaggtggcacctacaggggattcctggggcccagagggtcctgcagtgggtgggctgtcccctgagtgccaggtcctggtgagtaaagggaggttggggaggtgtgagggccccgggttgactccaacccccaactctgagaagccactttgctttctctgtggggccacctggagaactgggggcctttccagctggaatgaagcctcctgggagaagctaccctggggccagtgcaggaggggaaacaaggtggctgcccctcaccccaccacctcagggggacccgggcccctaaccttgccaggggtgaagtccttcaggccctgaatggtcagcttgtccacagggtgaatcttgttgtagtcagccgggtcagcgaaggtcagaggcagcaggccctgtttcttcaggttggtctctggaaagcaggcggcattcggtcatcgggggcctgactagcctggagagcttcattttctgaacccatctggggctctgggagatgcccctaatcctgctgcctgggacaatgcccgggcagtgactatggggccctggtctgctccctttcactaggggtgcccctagcaagtgtgcgctggtgctgaggtctgcgaggccttcctgctgcacattcatgatcagaaagaaccccctggcacatgtcctagatctcagcggctcagatctacaagcctggaagcagggcctgcgggaagccgggaagctgagcgtcggatgtgcactgtgtgagcctaagaaggggcaagaggctgacgggcctgtgggctgcagtggacacagcctagaaccaggcccaactcagccacgggcagggagagtgaccttgatcactagggatgggatgaggatggcctgggtacagactccagctcaccgtggatcctggcaaagctcttggtgatgatggcccggcccccaaggtggcgaggctccagagctgcatgctcccggctcgagccctcgccgtagttctcgtctccgatcaccacccacctgatgccatgtttctgtcaggcaagcgggggtaaggttataaggcagaggagggcaccgtcctcacctgtctggccctacctgcctggcctcacccacctggcgcctgggcatcctgaggctcccggtaaaggggctggaggggcccttcctcgcctgctgcctaagggcaagtgaagcctgcgtgaatgagacccaaacgaggccccgaggggacagaggcacgtggttgtttgcagtggcaaagaagacagaagccacccattggtgcttggcagaggcaggtgtgtgtggagggaggttgggtgagacagggacggcctccgggccccacacaagatgcatctgtgaagctcaaggcgcccccttcctgggagcaccctctgccccacccagccaccagggggtgccagagtcctttcacccggctgggccaggacttgggttcagccctggttctgtttgtttctcaaagcagaaaaagtccaatcacctcagaccctctctgcctgctcactgtgaggccccgtgtagccccctctctgagcttttggcctctgacttcctgagtcggcccccttccttgtctttgtctagggccagatatcctaagatatctctcactaactcctcctggtgcagggacccggctgtaccaccggacctgggcctcatgccttctcagccacagggaggggctgcaggcctctcctcccttccacagcagtcccctttgggcttggtcggcctccttcccagtttccactcccctaatgtcctccctgcacctgccttgcaggccccttcaggagtgaccactggcattgcccctatcaactctgacccaccttgtagtagcgggcagtgtcagggacggggccaaactcctgagtgacggcattgcgcacggagttggccttgccgttttcaatgttgatggcaccaatgagcaggttgttggagatgttatccaagtgcccacggaacttgagccaggggccagcagctgagatgtggtcagtggtacacttccctttgaccttgggtggtaagtagagaggacagaggtcagggcatggccctggaggggtggatgacaagccctccagaggcaggcagcaggccccggggcccaggaggggtgacagaggggtgagaggcaggcaagtcttcagacacgtgttctgtggtcctggtgcttccaccctaaggccacatgggctcaggccaggccttcatcccctcaaaggcctctggctgctcagtctcccttatggggcagaggccgcccaaagttgggacaggtcaatgttcgctcacccttcaggcctcagctgcaagatcagccacagacctcatgctggacacaggagcccaggacatgcctgggtcctggctgatgactgattagtctcttctgtcacaggggtgcctggagaccccttaataagcagcataaataaatatctgacacag

SEQ ID NO: 167614 - DNA, 4176 bp, Homo sapiens
  Payload ID: 12974
  Gene Symbol: POLR3H
  Gene Name: polymerase (RNA) III (DNA directed) polypeptide H (22.9kD)
  Uniprot ID: Q9Y535
  ENST ID: ENST00000396504
  CDS Start-End: 83-697
gattcggaatctcgcccgcagtcgcgcaagcgcgagcggctgtgcgcggtgcgtggtgcgtgagcccccagcgcaggccgggatgttcgtcctggtggaaatggtggacaccgtccggatccccccttggcagtttgagaggaagctcaacgactccattgccgaggagctgaacaagaagttggccaacaaggtcgtgtacaacgtgggactctgcatttgtctgtttgatatcaccaaactggaggatgcctatgtattccctggggatggcgcatcacacaccaaagtccattttcgctgcgtggtgtttcatccattcctagatgagattctcattgggaagatcaaaggctgcagcccagaaggagtgcacgtctctctaggcttcttcgatgacattctcatccccccagagtcactgcagcagccagccaagttcgacgaagcggagcaggtgtgggtgtgggagtacgagacggaggaaggagcacacgacctctacatggacaccggcgaggagatccgcttccgggtggtggacgagagctttgttgacacgtcccccacagggcccagctcagcagatgccaccacttccagtgaggagctgccaaagaaggaggctccgtacacgcttgtgggatccatcagtgagccaggcctgggccttctctcctggtggaccagcaactagccctggggctggacagtggaccctaccagcctgcgggaaggtggtatggccggctgtgaagacaacagcagctgaggccgatgctaaggagatagtgtctcgagctggacagtgaggcaaggccaggagtgcccaccagcttgccccgctcctccaccatctaggccctgctcctccttcactgcagtgatggatccatctgtggctgtggctgttgggcctccactgaccttgactgaaaagacccttcctggaccctggacttgacaacaaacggcacagacaccaatcactcacagaacagtcactggttttggattcttgttttccttgcaagaacaaaaggttctctagaatccttcagccaccaatgaaatgatcaggcaggagaaaaactttagatgggagtcttgtcatcaaaaataaatacagttgcatggagctgcttaagatctgaaccaaactcaaaataggaagacgggggctaaaaagttattttaagaacccccccaccacaaccacagtcactccgtgggctaagcggggagcaggaagcatgtctggtcacaccatcttggaataggaagccatggctggacggatcggatccactgatggcacacgtggagctgaacttgacgccagcggcggggcggggaggcactgccctcactgttgcagttccttcattctgttgagggcactgccagcgcggaaccactcaatctgcgtctcgttgaaggtgtggttcaggaggatggtctcctgggtcccgttggggtgcttgatgatgcacttcaggggctgcaaggagaaggtgggtgtgggtggaagtggtgggtactgtgtgcccttggccccgcaggggggtcagggagacagggcactgcctggggacctaagaggtcagcaggcaaaccaaatcctaggccagtctgtgcctgatggcccaggtcagacccaggtggcacctacaggggattcctggggcccagagggtcctgcagtgggtgggctgtcccctgagtgccaggtcctggtgagtaaagggaggttggggaggtgtgagggccccgggttgactccaacccccaactctgagaagccactttgctttctctgtggggccacctggagaactgggggcctttccagctggaatgaagcctcctgggagaagctaccctggggccagtgcaggaggggaaacaaggtggctgcccctcaccccaccacctcagggggacccgggcccctaaccttgccaggggtgaagtccttcaggccctgaatggtcagcttgtccacagggtgaatcttgttgtagtcagccgggtcagcgaaggtcagaggcagcaggccctgtttcttcaggttggtctctggaaagcaggcggcattcggtcatcgggggcctgactagcctggagagcttcattttctgaacccatctggggctctgggagatgcccctaatcctgctgcctgggacaatgcccgggcagtgactatggggccctggtctgctccctttcactaggggtgcccctagcaagtgtgcgctggtgctgaggtctgcgaggccttcctgctgcacattcatgatcagaaagaaccccctggcacatgtcctagatctcagcggctcagatctacaagcctggaagcagggcctgcgggaagccgggaagctgagcgtcggatgtgcactgtgtgagcctaagaaggggcaagaggctgacgggcctgtgggctgcagtggacacagcctagaaccaggcccaactcagccacgggcagggagagtgaccttgatcactagggatgggatgaggatggcctgggtacagactccagctcaccgtggatcctggcaaagctcttggtgatgatggcccggcccccaaggtggcgaggctccagagctgcatgctcccggctcgagccctcgccgtagttctcgtctccgatcaccacccacctgatgccatgtttctgtcaggcaagcgggggtaaggttataaggcagaggagggcaccgtcctcacctgtctggccctacctgcctggcctcacccacctggcgcctgggcatcctgaggctcccggtaaaggggctggaggggcccttcctcgcctgctgcctaagggcaagtgaagcctgcgtgaatgagacccaaacgaggccccgaggggacagaggcacgtggttgtttgcagtggcaaagaagacagaagccacccattggtgcttggcagaggcaggtgtgtgtggagggaggttgggtgagacagggacggcctccgggccccacacaagatgcatctgtgaagctcaaggcgcccccttcctgggagcaccctctgccccacccagccaccagggggtgccagagtcctttcacccggctgggccaggacttgggttcagccctggttctgtttgtttctcaaagcagaaaaagtccaatcacctcagaccctctctgcctgctcactgtgaggccccgtgtagccccctctctgagcttttggcctctgacttcctgagtcggcccccttccttgtctttgtctagggccagatatcctaagatatctctcactaactcctcctggtgcagggacccggctgtaccaccggacctgggcctcatgccttctcagccacagggaggggctgcaggcctctcctcccttccacagcagtcccctttgggcttggtcggcctccttcccagtttccactcccctaatgtcctccctgcacctgccttgcaggccccttcaggagtgaccactggcattgcccctatcaactctgacccaccttgtagtagcgggcagtgtcagggacggggccaaactcctgagtgacggcattgcgcacggagttggccttgccgttttcaatgttgatggcaccaatgagcaggttgttggagatgttatccaagtgcccacggaacttgagccaggggccagcagctgagatgtggtcagtggtacacttccctttgaccttgggtggtaagtagagaggacagaggtcagggcatggccctggaggggtggatgacaagccctccagaggcaggcagcaggccccggggcccaggaggggtgacagaggggtgagaggcaggcaagtcttcagacacgtgttctgtggtcctggtgcttccaccctaaggccacatgggctcaggccaggccttcatcccctcaaaggcctctggctgctcagtctcccttatggggcagaggccgcccaaagttgggacaggtcaatgttcgctcacccttcaggcctcagctgcaagatcagccacagacctcatgctggacacaggagcccaggacatgcctgggtcctggctgatgactgattagtctcttctgtcacaggggtgcctggagaccccttaataagcagcataaataaatatctgacacagattggaggcctctggccacacc

SEQ ID NO: 167615 - DNA, 802 bp, Homo sapiens
  Payload ID: 12974
  Gene Symbol: POLR3H
  Gene Name: polymerase (RNA) III (DNA directed) polypeptide H (22.9kD)
  Uniprot ID: Q9Y535
  ENST ID: ENST00000407461
  CDS Start-End: 117-731
ctctcctcgccctctctctgccccacgctgtgcgcgagcacacaggcagccccgccccgcctcggcggggtgggggtggacagaggtttcttattgagcccccagcgcaggccgggatgttcgtcctggtggaaatggtggacaccgtccggatccccccttggcagtttgagaggaagctcaacgactccattgccgaggagctgaacaagaagttggccaacaaggtcgtgtacaacgtgggactctgcatttgtctgtttgatatcaccaaactggaggatgcctatgtattccctggggatggcgcatcacacaccaaagtccattttcgctgcgtggtgtttcatccattcctagatgagattctcattgggaagatcaaaggctgcagcccagaaggagtgcacgtctctctaggcttcttcgatgacattctcatccccccagagtcactgcagcagccagccaagttcgacgaagcggagcaggtgtgggtgtgggagtacgagacggaggaaggagcacacgacctctacatggacaccggcgaggagatccgcttccgggtggtggacgagagctttgttgacacgtcccccacagggcccagctcagcagatgccaccacttccagtgaggagctgccaaagaaggaggctccgtacacgcttgtgggatccatcagtgagccaggcctgggccttctctcctggtggaccagcaactagccctggggctggacagtggaccctaccagcctgcgggaaggtggtatggccggctgtgaagacaacagcag

SEQ ID NO: 167616 - DNA, 1464 bp, Homo sapiens
  Payload ID: 12974
  Gene Symbol: POLR3H
  Gene Name: polymerase (RNA) III (DNA directed) polypeptide H (22.9kD)
  ENST ID: ENST00000431534
  CDS Start-End: 355-726
agcggctgtgcgcggtgcgtggtgcgtggtgcgtgatacgagcggcggcacgtggcgcgggtgcggggcgtggagtggcgtggcgtggagtggcgtggcgtggcggggtctcgcggcgcgggcgcgcacccggagctgtggacggagagtgcctccctctggcctcagtttcctcatgttgtagtagcggagcatggcccggaccgggcccccgagaccgccccgtgcaacctcaccgccagcctgggggcctcagcgactgggacgggaccaaggggctcggggattctccctgcccccggccctggtgcgtgactgaccctcctgttcccagagcccccagcgcaggccgggatgttcgtcctggtggaaatggtggacaccgtccggatccccccttggcagtttgagaggaagctcaacgactccattgccgaggagctgaacaagaagttggccaacaaggtcgtgtacaacgtgggactctgcatttgtctgtttgatatcaccaaactggaggatgcctatgtattccctggggatggcgcatcacacaccaaagtccattttcgctgcgtggtgtttcatccattcctagatgagattctcattgggaagatcaaaggctgcagcccagaaggagtgcacggtaacagtggccctgacgcctcagacaagacttgggaacactgtgggggcaggagtctctctaggcttcttcgatgacattctcatccccccagagtcactgcagcagccagccaagttcgacgaagcggagcaggtgtgggtgtgggagtacgagacggaggaaggagcacacgacctctacatggacaccggcgaggagatccgcttccgggtggtggacgagagctttgttgacacgtcccccacagggcccagctcagcagatgccaccacttccagtgaggagctgccaaagaaggaggctccgtacacgcttgtgggatccatcagtgagccaggcctgggccttctctcctggtggaccagcaactagccctggggctggacagtggaccctaccagcctgcgggaaggtggtatggccggctgtgaagacaacagcagctgaggccgatgctaaggagatagtgtctcgagctggacagtgaggcaaggccaggagtgcccaccagcttgccccgctcctccaccatctaggccctgctcctccttcactgcagtgatggatccatctgtggctgtggctgttgggcctccactgaccttgactgaaaagacccttcctggaccctggacttgacaacaaacggcacagacaccaatcactcacagaacagtcactggttttggattcttgttttccttgcaagaacaaaaggttctctagaatccttcagccaccaatgaaatgatcaggcaggagaaaaactttagatgggagtcttgtcatcaaaaataaatacagttgcatgg

SEQ ID NO: 167617 - DNA, 553 bp, Homo sapiens
  Payload ID: 12974
  Gene Symbol: POLR3H
  Gene Name: polymerase (RNA) III (DNA directed) polypeptide H (22.9kD)
  ENST ID: ENST00000442616
  CDS Start-End: 54-266
gcgcgagcggctgtgcgcggtgcgtggtgcgtgagcccccagcgcaggccgggatgttcgtcctggtggaaatggtggacaccgtccggatccccccttggcagtttgagaggaagctcaacgactccattgccgaggagctgaacaagaagttggccaacaaggtcgtgtacaacgtgggactctgcatttgtctgtttgatatcaccaaactggaggatgcctatgtattccctggggatggcgcatcacacaccaaagggtgagaggtccatcggctgcctctcctcatgccctgctgatgccagggtccctgccgtcctggggggcatgttggccgactaaatggttgacggcatcgtggaagcctgtgtttgggattaaacctgtctgaggaaggcaagattcgacccggtggccctgtctgtccattttcgctgcgtggtgtttcatccattcctagatgagattctcattgggaagatcaaaggctgcagcccagaaggagtgcacgtctctctaggcttcttcgatgacattctcatccccccag

SEQ ID NO: 167618 - DNA, 1598 bp, Homo sapiens
  Payload ID: 12974
  Gene Symbol: POLR3H
  Gene Name: polymerase (RNA) III (DNA directed) polypeptide H (22.9kD)
  ENST ID: ENST00000432789
  CDS Start-End: 327-809
gtgcgtgatacgagcggcggcacgtggcgcgggtgcggggcgtggagtggcgtggcgtggagtggcgtggcgtggcggggtctcgcggcgcgggcgcgcacccggagctgtggacggagagtgcctccctctggcctcagtttcctcatgttgtagtagcggagcatggcccggaccgggcccccgagaccgccccgtgcaacctcaccgccagcctgggggcctcagcgactgggacgggaccaaggggctcggggattctccctgcccccggccctggtgcgtgactgaccctcctgttcccagagcccccagcgcaggccgggatgttcgtcctggtggaaatggtggacaccgtccggatccccccttggcagtttgagaggaagctcaacgactccattgccgaggagctgaacaagaagttggccaacaaggtactgggcccacggctcgcgggcaggccttggcgtgggagagcgagcgccgcccactggccgcaggcccggcctcggtcatgccaagccctggccgtgggcaagcagcttaatgtctcagaacttttcttcaccgtgaaaggagatattgaaggggatcaaaagaaaatgggcttgaaaaagggagttgtaactggaagtgttagattccacaattctaaattactttgcaattgcaggtcgtgtacaacgtgggactctgcatttgtctgtttgatatcaccaaactggaggatgcctatgtattccctggggatggcgcatcacacaccaaagtccattttcgctgcgtggtgtttcatccattcctagatgagattctcattgggaagatcaaaggctgcagcccagaaggagtgcacgtctctctaggcttcttcgatgacattctcatccccccagagtcactgcagcagccagccaagttcgacgaagcggagcaggtgtgggtgtgggagtacgagacggaggaaggagcacacgacctctacatggacaccggcgaggagatccgcttccgggtggtggacgagagctttgttgacacgtcccccacagggcccagctcagcagatgccaccacttccagtgaggagctgccaaagaaggaggctccgtacacgcttgtgggatccatcagtgagccaggcctgggccttctctcctggtggaccagcaactagccctggggctggacagtggaccctaccagcctgcgggaaggtggtatggccggctgtgaagacaacagcagctgaggccgatgctaaggagatagtgtctcgagctggacagtgaggcaaggccaggagtgcccaccagcttgccccgctcctccaccatctaggccctgctcctccttcactgcagtgatggatccatctgtggctgtggctgttgggcctccactgaccttgactgaaaagacccttcctggaccctggacttgacaacaaacggcacagacaccaatcactcacagaacagtcactggttttggattcttgttttccttgcaagaacaaaaggttctctagaatccttcagccaccaatgaaatgatcaggcaggagaaaaactttagatgggagtcttgtcatc

SEQ ID NO: 167619 - DNA, 1392 bp, Homo sapiens
  Payload ID: 12975
  Gene Symbol: POLR3K
  Gene Name: polymerase (RNA) III (DNA directed) polypeptide K, 12.3 kDa
  Uniprot ID: Q9Y2Y1
  ENST ID: ENST00000293860
  CDS Start-End: 43-369
agtgggagctgccgggagttggagcctgcggagttcgagaccatgctgctgttctgccccggctgcgggaacgggctgatcgtggaggagggacaacgctgccaccgcttcgcctgcaacacgtgcccctacgtgcacaacatcacccgcaaggtaacaaatcggaagtacccaaaactgaaagaagtggatgatgtgcttggtggagcagctgcctgggagaatgttgactctactgcagagtcgtgtcccaaatgcgaacatcctcgtgcttacttcatgcagcttcagacccgctctgcagatgagccgatgaccaccttctacaagtgctgcaatgctcagtgtggacaccgctggagggattagggccaggatggcccagctgccctagtgtgtgcttgccttgtccctcggggtagatgcttagctggcagtatgagttgtgtgtcctgagggtctttgctagtgtggtggaaagataaaccttttgaggtgaagagccagggggtcaggaaatatggcctatctgccaggcagggtggatgaagtcatgaatgtctgggagtttttctgtgtggggaggagacagagacccataactaaatatgctctgtgtaaagtcctattctttcatcttccactttattggcagttgacattcccttactcccaatcaacactcttaaatatttgtactgtttgtaaaacttagtacatgtccctaaatatttaactgttacttgtaaacttgtgtaatttattatttattttaatcaaaattctgaatatttcatttaaatgaaagttggaatattgccttctcagtgttttaaatagcttaagaggtagaaagcaaaccccaaatcacagtgatcccagaatagactacatacttacatttgaacaggctacgaaaatgttaatcaccgggatttcaatttctttctttattcctattcttactcccttattcatttttttgaacctcccctgatttgcttcctcgggttgctttaaatgtataagatactatttatttatttatttattttatttatttatttatttatttaagacagagtcttgttctgtcgcccaggctggagtgcagtggtacgaattcagctcactgcaacctctgccttccgggttcaagggattctcctgtctcagcctcccaagcagctgggactacaggcatgcaccaccacacctgggtaattttgcatttttagtagagatggggtttctccatgttggtcgggctggtctccaactcctgacctcagataatctgtctgcctcggcctcctaaagtgctgggattacaggcgtgagccactgtgtcccaccaatctttacatttaatatgactattttcttattgtt

SEQ ID NO: 167620 - DNA, 3835 bp, Homo sapiens
  Payload ID: 12976
  Gene Symbol: POLRMT
  Gene Name: polymerase (RNA) mitochondrial (DNA directed)
  Uniprot ID: O00411
  ENST ID: ENST00000588649
  CDS Start-End: 93-3785
cctccgtcgaccatgaaaccacaactcccggcaggcggcgcgggcgcatgcgcaggcgcgggccggtggggtggcctggagcggcgtgcgtaatgtcggcactttgctggggccgcggagcggcggggctcaaacgagccctacggccttgcggccgcccgggactccccggcaaagaagggaccgccggtggcgtctgcggccccaggaggagctcgtccgccagcccccaggagcaagaccaagaccgcaggaaggactggggccacgtggagctgctggaggtgctccaggcgcgggtgcggcagctgcaggctgagagcgtgtcggaggtggtggtgaacagggtggatgtggcgcggctcccagaatgtggcagtggagatggtagcctccagccacccaggaaggtccagatgggggccaaggatgccaccccggtgccctgtggccgctgggcaaagatactggagaaggataagcggacccagcagatgcgtatgcagcggttgaaggcgaagctgcagatgccattccagagcggggagttcaaggcgctgaccaggcgcctgcaggtggagccccggctcctgagcaagcagatggccgggtgcctggaggactgcacgcgccaggcccccgagagcccctgggaggagcagctggcccggctgctgcaggaggcccctgggaagctgagcctcgatgtggagcaggccccgtcggggcagcactcgcaggcccagctctcaggtcagcagcagaggctcctggccttcttcaagtgctgcctgctcactgaccagctgcccctcgcccaccacctgctggtcgtccaccacggccagcggcagaagcggaagctgctcacgctggacatgtacaacgccgtgatgcttggctgggcgcggcagggtgccttcaaggagctggtatatgtgttattcatggtgaaggatgccggcttgactccggacctgctgtcctatgcggctgccctccagtgcatggggaggcaggaccaggacgccgggaccatcgaaaggtgtctggaacagatgagccaggaggggctgaagctgcaggcactcttcaccgccgttctgctgtctgaggaggatcgggccactgttctgaaggccgtgcacaaggtgaagcccaccttcagcctcccgccgcagctgccgcccccggtcaacacctccaagctgctcagggacgtgtatgccaaggatgggcgtgtgtcctacccgaagctgcacctgcccttgaagaccctgcagtgcctctttgagaagcagctccacatggagctggccagcagggtgtgcgtggtgtccgtggagaagcccacgttgccaagcaaggaggtcaagcacgcgcggaagaccctgaagaccctgcgggaccaatgggagaaagcactgtgccgggcgctgcgggagaccaagaaccgcctagagcgcgaggtgtacgagggccggttctcactttaccccttcctgtgcctgctggacgagcgcgaggtggtgcggatgctcctgcaggtcctgcaggcgctgcccgcccaaggtgagtccttcaccaccctggcccgggagctgagtgcgcgcactttcagccggcacgtggtgcagaggcagcgggtcagtggccaggtgcaggcgctgcagaaccactacaggaagtacctctgcttgctggcctccgacgccgaggtgcccgagccctgcctgccgcggcagtactgggaggagctgggggcgcccgaggccctgcgggagcagccctggcccctgccagtgcagatggagctgggcaagctgctggcggagatgctggtgcaggctacgcagatgccatgcagcctggacaagccgcatcgttcctctcggcttgtccccgtgctctaccacgtgtattccttccgcaacgtccagcagatcggcatcctgaagccgcacccggcctacgtgcagctgctggagaaggccgcggagcccacgctgaccttcgaggcggtggatgtacccatgctttgccccccgctgccctggacatcgccgcactctggtgctttcctgctcagccccaccaagctgatgcgcacggtggaaggcgccacgcagcaccaggagctgctggaaacctgcccgcccaccgcgctgcatggcgcactggacgccctcacccaactgggcaactgcgcctggcgcgtcaacgggcgcgtgctggacctggtgctgcagctcttccaggccaagggctgcccccagctaggcgtgccggccccgccctccgaggcgccccagccgcccgaggcccacctgccgcacagcgccgcgcccgcccgcaaggccgagctgcgccgtgagctggcgcactgccagaaggtggcccgggagatgcacagcctgcgggcggaggcgctgtaccgcctctcgctggcgcagcacctgcgggaccgcgtcttctggctgccgcacaacatggacttccgcggccgcacctacccctgcccgccgcacttcaaccacctgggcagcgacgtggcgcgggccctgctggagttcgcccagggccgcccgctcggcccgcacggcctggattggctcaagatccacctggtcaatctcacggggttgaagaagcgggagccgctgcggaagcgcctggcctttgcggaggaggtgatggatgacatcctggactccgcggaccaacccttgacgggccgaaagtggtggatgggcgcggaggaaccctggcagacgctggcctgctgtatggaggtggcgaacgctgtgcgcgcctccgaccctgccgcctatgtctcccacctccccgtccatcaggacggctcttgcaacggcctgcagcattatgctgctctgggccgcgacagcgtgggcgccgcctccgtcaacctggagccctcggatgtgccgcaggacgtgtacagcggcgtggccgcgcaggtggaggtgttccgtaggcaggacgcccagcggggcatgcgggtggcacaggtgctggaaggtttcatcacccgcaaggtggtgaagcagacggtgatgacggtggtgtacggggtcacgcgctatggcgggcgcctgcagattgagaagcgcctccgggagctgagcgactttccccaggagttcgtgtgggaggcctctcactatctcgtacgccaggtcttcaagagtctacaggagatgttctcggggacccgggccatccagcactggctgaccgagagtgcccgcctcatctcccacatgggctctgtggtggagtgggtcacacccctgggcgtccccgtcatccagccctatcgcctggactccaaggtcaagcaaataggaggtggaattcagagcatcacctacacccacaacggagacatcagccgaaagcccaacacacgtaagcagaagaacggcttcccgcccaacttcatccactcgctggactcctcccacatgatgctcaccgccctgcactgctacaggaagggcctgaccttcgtctctgtgcacgactgttactggactcacgcagctgatgtctccgtcatgaaccaggtgtgccgggagcagtttgtccgcttgcacagcgagcccatcctgcaggacctgtccagattcctggtcaagcggttctgctctgagccccagaagatcttggaggccagccagctgaaggagacactgcaggcggtgcccaagccaggggccttcgacctggagcaggtgaagcgttccacctacttcttcagctgacaccccgtgagccttgtcagtgtgtaaataaagctcttttgccaccccca

SEQ ID NO: 167621 - DNA, 1043 bp, Homo sapiens
  Payload ID: 12976
  Gene Symbol: POLRMT
  Gene Name: polymerase (RNA) mitochondrial (DNA directed)
  ENST ID: ENST00000590573
  CDS Start-End: 1-1043
gtgctccaggcgcgggtgcggcagctgcaggctgagagcgtgtcggaggtggtggtgaacagggtggatgtggcgcggctcccagaatgtggcagtggagatggtagcctccagccacccaggaaggtccagatgggggccaaggatgccaccccggtgccctgtggccgctgggcaaagatactggagaaggataagcggacccagcagatgcgtatgcagcggttgaaggcgaagctgcagatgccattccagagcggggagttcaaggcgctgaccaggcgcctgcaggtggagccccggctcctgagcaagcagatggccgggtgcctggaggactgcacgcgccaggcccccgagagcccctgggaggagcagctggcccggctgctgcaggaggcccctgggaagctgagcctcgatgtggagcaggccccgtcggggcagcactcgcaggcccagctctcaggtcagcagcagaggctcctggccttcttcaagtgctgcctgctcactgaccagctgcccctcgcccaccacctgctggtcgtccaccacggccagcggcagaagcggaagctgctcacgctggacatgtacaacgccgtgatgcttggctgggcgcggcaggatgccggcttgactccggacctgctgtcctatgcggctgccctccagtgcatggggaggcaggaccaggacgccgggaccatcgaaaggtgtctggaacagatgagccaggaggggctgaagctgcaggcactcttcaccgccgttctgctgtctgaggaggatcgggccactgttctgaaggccgtgcacaaggtgaagcccaccttcagcctcccgccgcagctgccgcccccggtcaacacctccaagctgctcagggacgtgtatgccaaggatgggcgtgtgtcctacccgaagctgcacctgcccttgaagaccctgcagtgcctctttgagaagcagctccacatggagctggccagcagggtgtgcgtggtgtccgtggagaagcccacgttgccaagcaagga

SEQ ID NO: 167622 - DNA, 380 bp, Homo sapiens
  Payload ID: 12976
  Gene Symbol: POLRMT
  Gene Name: polymerase (RNA) mitochondrial (DNA directed)
  ENST ID: ENST00000590336
  CDS Start-End: 1-380
gcctggactccaaggtcaagcaaataggaggtggaattcagagcatcacctacacccacaacggagacatcagccgcccaacacacgtaagcagaagaacggcttcccgcccaacttcatccactcgctggactcctcccacatgatgctcaccgccctgcactgctacaggaagggcctgaccttcgtctctgtgcacgactgttactggactcacgcagctgatgtctccgtcatgaaccaggtgtgccgggagcagtttgtccgcttgcacagcgagcccatcctgcaggacctgtccagattcctggtcaagcggttctgctctgagccccagaagatcttggaggccagccagctgaaggagacactgcaggcgg

SEQ ID NO: 167623 - DNA, 966 bp, Homo sapiens
  Payload ID: 12976
  Gene Symbol: POLRMT
  Gene Name: polymerase (RNA) mitochondrial (DNA directed)
  ENST ID: ENST00000592863
  CDS Start-End: 14-184
agcggcgtgcgtaatgtcggcactttgctggggccgcggagcggcggggctcaaacgagccctacggccttgcggccgcccgggactccccggcaaagaaggtaacacaaagggagacggccaggcagcccgggggccacggcgtgggctcctccccgcgcggccggggcctttggcgctttgacctttgcctctttgcacctgggcgtgcgcagcccaccgacccggccccgctttccactcgcccttgcccgcttttcgactgaggctcctccgtgcagtctgacctttgactcgtggtttcttatgcagcctcctgaccccaggtggaccgccggtggcgtctgcggccccaggaggagctcgtccgccagcccccaggagcaagaccaagaccgcaggaaggactggggccacgtggagctgctggaggtgctccaggcgcgggtgcggcagctgcaggctgagagcgtgtcggaggtggtggtgaacagggtggatgtggcgcggctcccagaatgtggcagtggagatggtagcctccagccacccaggaaggtccagatgggggccaaggatgccaccccggtgccctgtggccgctgggcaaagatactggagaaggataagcggacccagcagatgcgtatgcagcggttgaaggcgaagctgcagatgccattccagagcggggagttcaaggcgctgaccaggcgcctgcaggtggagccccggctcctgagcaagcagatggccgggtgcctggaggactgcacgcgccaggcccccgagagcccctgggaggagcagctggcccggctgctgcaggaggcccctgggaagctgagcctcgatgtggagcaggccccgtcggggcagcactcgcaggcccagctctcaggtcagcagcagaggctcctggccttcttcaagtgctgcctgctcactgaccagctgcccctcgcc

SEQ ID NO: 167624 - DNA, 3828 bp, Homo sapiens
  Payload ID: 12977
  Gene Symbol: PTRF
  Gene Name: polymerase I and transcript release factor
  Uniprot ID: Q6NZI2
  ENST ID: ENST00000357037
  CDS Start-End: 421-1593
acctgattccgttcctcagctcgcattcctccgcccgtcccgctcccgccgccagcggaggccctagtctcccgctccaactattccaaccatcccgggaagggtggggcgctcggctcttgggtccccctccgccgccccgcctcgtcgatctccccttctgccccggtccctccctttctggggtggggccagccaatcagcgatcagactccggagtttggcccgggagctggggagctcaccgatcccccgcccagcagttctggccgctgtcccggtgcgcacggacgtggctcgagtttcctctgctctccgctctcgcccgctagctctcctcccttccgctcctgcttctctccgggtctcccgctccagctccagccccacccggccggtcccgcacggctccgggtagccatggaggaccccacgctctatattgtcgagcggccgcttcccgggtaccccgacgccgaggccccggagccttcctccgctggggctcaggcagcggaggagccgtcgggggccggctcagaagagctgatcaagtcggaccaggtgaacggcgtgctggtgctgagcctcctggacaaaatcatcggggccgtagaccagatccagctgactcaagcacagctggaggagcggcaggcggagatggagggcgcagtgcagagcatccagggcgagctgagcaagctgggcaaggcgcacgccaccacgagcaatacggtgagcaagctgctggagaaggtgcgcaaggtcagcgtcaacgtgaagaccgtgcgcggcagcctggagcgccaggcggggcagatcaagaagctggaggtcaacgaggccgagctgctgcggcgccgcaactttaaagtcatgatctaccaggatgaagtgaagctgccggccaaactgagcatcagcaaatcgctgaaagagtcggaggcgctgccagagaaggagggcgaggagctgggcgagggcgagcggcccgaggaggacgcagcggcgctggagctttcgtcggacgaggcggtggaggttgaggaggttattgaggagtcccgcgcagagcgtatcaagcgcagcggcctgcggcgcgtggacgacttcaagaaggccttctccaaggagaagatggagaagaccaaggtgcgtacccgcgagaacctggagaagacgcgcctcaagaccaaggaaaacctggagaagacgcggcacaccctggagaagcgcatgaacaagctgggcacgcgcctggtgcccgccgagcggcgcgagaaactgaagacgtcgcgggacaagttgcgcaaatccttcacgcccgaccacgtggtgtacgcgcgctccaagaccgcggtctacaaggtgccacccttcaccttccacgtcaagaagatccgcgagggccaggtggaagtgctcaaggccaccgagatggtggaggtgggcgccgacgacgacgagggcggcgcggagcgcggggaggccggcgacctgcggcgcgggagcagccccgacgtgcacgcgctgctggagatcaccgaggagtcggacgccgtgctggtggacaagagcgacagcgactgagccgcccccgctgccacccaccccattcctcgctccttccgaacttcctctttcgcattctctctcggctcgagctggctgagatttttctaaattgaaaacacgcccccctccccacacctccaggaactccactcccagtcttagagctgttaggacccgatggggaggcagcccccgcagtggacaacccccgcttggacacagtccgagtggaatgggaagggaatggtcaatccctgtcctggttgtccaagtcgggatctcagaggaaattgcagtgattccacggttaggcccccctgggggggctgccttcccctcagcctctccccacaccacccacccagctgctgtcattccgctcactgagctcttcttcattctcaccctgatccctgggggactcaaagccaaaactgcccaaagaggaaagattgaatcctaaaggggatccctgcccccatgggaggccccctactagaaggacgtgaaagcagcttttgggggaaactgaggcagtggggaagacagagcagaatgagccctcaccctggctgggggtccagcacaggctgtatctgcagagggtcccagaggaacgctggagccaagagaagccctgggaaggaggggtggggaacgacatgcatgtgagggatggcacactgatgtgtttatgcacctgtacacaggagcgcatggccatggctttggaaaggagaatggaaaaatagaagaaggtcggccgggcttggtggcttatgcctgtaaccccagcactttgggaggccgaggtgggcggatcacctgaagtcaggagttcgggaccagcctggcaaacaccccatctctactaagcgaaaacccatctctactaaaattacaaaaattagctgggcatggttgcgcatgcctgtaatcccagctactttggaggctgaggtggggagaattgcttgaacctgggaggtggaggttgcagtgagccaaggtcgcgacactgcactccagcctgggtgacagagtgagactccatctcaacagaaggaaaaaaaaggaaaataggagaaggtggaaatgggtgaagagagaagtcccctcactagctgcatgagaaatctatcttactgtggttctccatgggcagcaggaccatttttcagaatcaagagggaggacagtgtgagaaggcgatgatccaaagaagacagagaggtcagccccacccgatccctcaaatgggctcttggaggcacccccaggggcagcccatttctcaaagtccagaaaattagggtcccagaagggggcagcagcaggctgggagttaggagggagagcagggtgccggccctgccaccaagttgagagctggaggggaggtggggagagaacatcacagagcagccagccctggttcactcctggcagtttcttctcaagctccttccctaggagcatggtggcacgtgcctgtggtctcagctacttgggaggctgaggcgggaggatcgccagagcccaggagtttgaggctgcagtgagctatgagggtgcctctgtgctccatcctaggcaacagagtgatacgctgtttaaaaaggaaaaaatccttccctagagctagtatcctaaagctgcagagctagcccagacctcattggtttccttgtccttggggtgcttttcctgaatctttgcgggtgaagggagtgttgctcccagtccagaggcctgattctgtttggactgggttctcaagacacgaccaggttctcaagacacgagtccccttgttcctccccattaaagggggtttgtcagaagcaagaacagcccctctccccagtcacagcctgaagggaggccccgagagcttcctccttccccccacctgctccttaccttctctgccctgctttttagaactgcagttcattgttttaagggattgggggagggagcctggggacacaaaccttttatacaatacaaagctttgctttttttttttttttcttccttttccctttctcggttctcttctctcctctgaatggctgaagacccctctgccgagggaggttggggattgtgggacaaggtcccttggtgctgatggcctgaaggggcctgagctgtgggcagatgcagttttctgtgggcttggggaacctctcacgttgctgtgtcctggtgagcagcccgaccaataaacctgcttttctaaaa

SEQ ID NO: 167625 - DNA, 4279 bp, Homo sapiens
  Payload ID: 12978
  Gene Symbol: PIGR
  Gene Name: polymeric immunoglobulin receptor
  Uniprot ID: P01833
  ENST ID: ENST00000356495
  CDS Start-End: 185-2479
gagcagagtttcagttttggcagcagcgtccagtgccctgccagtagctcctagagaggcaggggttaccaactggccagcaggctgtgtccctgaagtcagatcaacgggagagaaggaagtggctaaaacattgcacaggagaagtcggcctgagtggtgcggcgctcgggacccaccagcaatgctgctcttcgtgctcacctgcctgctggcggtcttcccagccatctccacgaagagtcccatatttggtcccgaggaggtgaatagtgtggaaggtaactcagtgtccatcacgtgctactacccacccacctctgtcaaccggcacacccggaagtactggtgccggcagggagctagaggtggctgcataaccctcatctcctcggagggctacgtctccagcaaatatgcaggcagggctaacctcaccaacttcccggagaacggcacatttgtggtgaacattgcccagctgagccaggatgactccgggcgctacaagtgtggcctgggcatcaatagccgaggcctgtcctttgatgtcagcctggaggtcagccagggtcctgggctcctaaatgacactaaagtctacacagtggacctgggcagaacggtgaccatcaactgccctttcaagactgagaatgctcaaaagaggaagtccttgtacaagcagataggcctgtaccctgtgctggtcatcgactccagtggttatgtaaatcccaactatacaggaagaatacgccttgatattcagggtactggccagttactgttcagcgttgtcatcaaccaactcaggctcagcgatgctgggcagtatctctgccaggctggggatgattccaatagtaataagaagaatgctgacctccaagtgctaaagcccgagcccgagctggtttatgaagacctgaggggctcagtgaccttccactgtgccctgggccctgaggtggcaaacgtggccaaatttctgtgccgacagagcagtggggaaaactgtgacgtggtcgtcaacaccctggggaagagggccccagcctttgagggcaggatcctgctcaacccccaggacaaggatggctcattcagtgtggtgatcacaggcctgaggaaggaggatgcagggcgctacctgtgtggagcccattcggatggtcagctgcaggaaggctcgcctatccaggcctggcaactcttcgtcaatgaggagtccacgattccccgcagccccactgtggtgaagggggtggcaggaggctctgtggccgtgctctgcccctacaaccgtaaggaaagcaaaagcatcaagtactggtgtctctgggaaggggcccagaatggccgctgccccctgctggtggacagcgaggggtgggttaaggcccagtacgagggccgcctctccctgctggaggagccaggcaacggcaccttcactgtcatcctcaaccagctcaccagccgggacgccggcttctactggtgtctgaccaacggcgatactctctggaggaccaccgtggagatcaagattatcgaaggagaaccaaacctcaaggtaccagggaatgtcacggctgtgctgggagagactctcaaggtcccctgtcactttccatgcaaattctcctcgtacgagaaatactggtgcaagtggaataacacgggctgccaggccctgcccagccaagacgaaggccccagcaaggccttcgtgaactgtgacgagaacagccggcttgtctccctgaccctgaacctggtgaccagggctgatgagggctggtactggtgtggagtgaagcagggccacttctatggagagactgcagccgtctatgtggcagttgaagagaggaaggcagcggggtcccgcgatgtcagcctagcgaaggcagacgctgctcctgatgagaaggtgctagactctggttttcgggagattgagaacaaagccattcaggatcccaggctttttgcagaggaaaaggcggtggcagatacaagagatcaagccgatgggagcagagcatctgtggattccggcagctctgaggaacaaggtggaagctccagagcgctggtctccaccctggtgcccctgggcctggtgctggcagtgggagccgtggctgtgggggtggccagagcccggcacaggaagaacgtcgaccgagtttcaatcagaagctacaggacagacattagcatgtcagacttcgagaactccagggaatttggagccaatgacaacatgggagcctcttcgatcactcaggagacatccctcggaggaaaagaagagtttgttgccaccactgagagcaccacagagaccaaagaacccaagaaggcaaaaaggtcatccaaggaggaagccgagatggcctacaaagacttcctgctccagtccagcaccgtggccgccgaggcccaggacggcccccaggaagcctagacggtgtcgccgcctgctccctgcacccatgacaatcaccttcagaatcatgtcgatcctggggccctcagctcctggggaccccactccctgctctaacacctgcctaggtttttcctactgtcctcagaggcgtgctggtcccctcctcagtgacatcaaagcctggcctaattgttcctattggggatgagggtggcatgaggaggtcccacttgcaacttctttctgttgagagaacctcaggtacggagaagaatagaggtcctcatgggtcccttgaaggaagagggaccagggtgggagagctgattgcagaaaggagagacgtgcagcgcccctctgcacccttatcatgggatgtcaacagaatttttccctccactccatccctccctcccgtccttcccctcttcttctttccttccatcaaaagatgtatttgaattcatactagaattcaggtgctttgctagatgctgtgacaggtatgccaccaacactgctcacagcctttctgaggacaccagtgaaagaagccacagctcttcttggcgtatttatactcactgagtcttaacttttcaccaggggtgctcacctctgcccctattgggagaggtcataaaatgtctcgagtcctaaggccttaggggtcatgtatgatgagcatacacacaggtaattataaacccacattcttaccatttcacacataagaaaattgaggtttggaagagtgaagcgtttttctttttcttttttttttttgagacggagtctctcactgtcgcccaggctggagtgcagtggcgcaatctcggctcactgcaacctccgcctcccaggttgacaccattctcctgcctcaccctcccaagtagctgggactacaggcgcctgccagcacgcctggctaattttttgtatttttagtagagacagggtttcaccgtgttagccaggatggtctcgatctcctgacctcgtgatccgcctgcctctgcctcccaaagtgctgggattacaggcgtgagccaccgcgtccggcctctttttttcttttcttttttttgagacaaagtctcactgtgtcacccagactggaatgcagtgacacaatctcggctcactgaaacctctgccttccaggttcaagctattctcatgcctcagcctctcaagtagctgggactacagatgtgggccaccatgtctggctaattttttttttttttttttttttttgtagagacagggtttcgccatgttgacgagactggtctcgaactcctggcctcaagtgatctgccgcctcagcttctcaaagtactgggattatataggcatgagccactgagcctggccctgaagcgtttttctcaaaggccctcagtgagataaattagatttggcatctcctgtcctgggccagggatctctctacaagagcccctgcccctctgttggaggcacagttttagaataaggaggaggagggagaagagaaaatgtaaaggagggagatctttcccaggccgcaccatttctgtcactcacatggacccaagataaaagaatggccaaaccctcacaacccctgatgtttgaagagttccaagttgaagggaaacaaagaagtgtttgatggtgccagagaggggctgctctccagaaagctaaaatttaatttcttttttcctctgagttctgtacttcaaccagcctacaagctggcacttgctaacaaatcagaaatatgacaattaatgattaaagactgtgattgccaccaacgag

SEQ ID NO: 167626 - DNA, 2041 bp, Homo sapiens
  Payload ID: 12979
  Gene Symbol: PNKP
  Gene Name: polynucleotide kinase 3'-phosphatase
  Uniprot ID: Q96T60
  ENST ID: ENST00000322344
  CDS Start-End: 432-1997
tagaacatcgagggtgaagccaaagaaggacttaggggcgctgtcgggggcggaggtttcctcgactgacaatgaccatcagatgggaaaaaaatcttcctccctgggatgaaaattagaagtcaaggtggaaagaggcaaatctgctaacggaggatccagtccccgctaccggcctgagcctcgcgttgcagcaagagagatgaaggtcagggctgccgagagaccctgggggccgggagtcggggaaggggcgtggctgctgtgggaggaggccaggccccgccccccacccacgaggggacgagtcatttccgtccgccgaggaaccgaccgccgccggccgggttgcaggcggggcacctcgggcaggacctccctggtcggaagtggccgtgagcccaagccgcggtcccgggccggcacccaggatgggcgaggtggaggccccgggccgcttgtggctcgagagcccccctgggggagcgccccccatcttcctgccctcggacgggcaagccctggtcctgggcaggggacccctgacccaggttacggaccggaagtgctccagaactcaagtggagctggtcgcagatcctgagacccggacagtggcagtgaaacagctgggagttaacccctcaactaccgggacccaggagttgaagccggggttggagggctctctgggggtgggggacacactgtatttggtcaatggcctccacccactgaccctgcgctgggaagagacccgcacaccagaatcccagccagatactccgcctggcacccctctggtgtcccaagatgagaagagagatgctgagctgccgaagaagcgtatgcggaagtcaaaccccggctgggagaacttggagaagttgctagtgttcaccgcagctggggtgaaaccccagggcaaggtggctggctttgatctggacgggacgctcatcaccacacgctctgggaaggtctttcccactggccccagtgactggaggatcttgtacccagagattccccgtaagctccgagagctggaagccgagggctacaagctggtgatcttcaccaaccagatgagcatcgggcgcgggaagctgccagccgaggagttcaaggccaaggtggaggctgtggtggagaagctgggggtccccttccaggtgctggtggccacgcacgcaggcttgtaccggaagccggtgacgggcatgtgggaccatctgcaggagcaggccaacgacggcacgcccatatccatcggggacagcatctttgtgggagacgcagccggacgcccggccaactgggccccggggcggaagaagaaagacttctcctgcgccgatcgcctgtttgccctcaaccttggcctgcccttcgccacgcctgaggagttctttctcaagtggccagcagccggcttcgagctcccagcctttgatccgaggactgtctcccgctcagggcctctctgcctccccgagtccagggccctcctgagcgccagcccggaggtggttgtcgcagtgggattccctggggccgggaagtccacctttctcaagaagcacctcgtgtcggccggatatgtccacgtgaacagggacacgctaggctcctggcagcgctgtgtgaccacgtgtgagacagccctgaagcaagggaaacgggtcgccatcgacaacacaaacccagacgccgcgagccgcgccaggtacgtccagtgtgcccgagccgcgggcgtcccctgccgctgcttcctcttcaccgccactctggagcaggcgcgccacaacaaccggtttcgagagatgacggactcctctcatatccccgtgtcagacatggtcatgtatggctacaggaagcagttcgaggccccaacgctggctgaaggcttctctgccatcctggagatcccgttccggctatgggtggagccgaggctggggcggctgtactgccagttctccgagggctgagccccgcccagctcccctccacaataaacgctgtttctccttga

SEQ ID NO: 167627 - DNA, 1723 bp, Homo sapiens
  Payload ID: 12979
  Gene Symbol: PNKP
  Gene Name: polynucleotide kinase 3'-phosphatase
  ENST ID: ENST00000593946
  CDS Start-End: 31-186
gtttacctgctccccaggccggcacccaggatgggcgaggtggaggccccgggccgcttgtggctcgagagcccccctgggggagcgccccccatcttcctgccctcggacgggcaagccctggtcctgggcaggggacccctgacccaggttacggaccggaagtgctccagaactcaagcctgaagcaggccacactccccagaaatgagggacccaatcacacaaggatgcaaatcctgactccacccctccaatcctcagtggagctggtcgcagatcctgagacccggacagtggcagtgaaacagctgggagttaacccctcaactaccgggacccaggagttgaagccggggttggagggctctctgggggtgggggacacactgtatttggtcaatggcctccacccactgaccctgcgctgggaagagacccgcacaccagaatcccagccagatactccgcctggcacccctctggtgtcccaagatgagaagagagatgctgagctgccgaagaagcgtatgcggaagtcaaaccccggctgggagaacttggagaagttgctagtgttcaccgcagctggggtgaaaccccagggcaaggtggctggctttgatctggacgggacgctcatcaccacacgctctgggaaggtctttcccactggccccagtgactggaggatcttgtacccagagattccccgtaagctccgagagctggaagccgagggctacaagctggtgatcttcaccaaccagatgagcatcgggcgcgggaagctgccagccgaggagttcaaggccaaggtggaggctgtggtggagaagctgggggtccccttccaggtgctggtggccacgcacgcaggcttgtaccggaagccggtgacgggcatgtgggaccatctgcaggagcaggccaacgacggcacgcccatatccatcggggacagcatctttgtgggagacgcagccggacgcccggccaactgggccccggggcggaagaagaaagacttctcctgcgccgatcgcctgtttgccctcaaccttggcctgcccttcgccacgcctgaggagttctttctcaagtggccagcagccggcttcgagctcccagcctttgatccgaggactgtctcccgctcagggcctctctgcctccccgagtccagggccctcctgagcgccagcccggaggtggttgtcgcagtgggattccctggggccgggaagtccacctttctcaagaagcacctcgtgtcggccggatatgtccacgtgaacagggacacgctaggctcctggcagcgctgtgtgaccacgtgtgagacagccctgaagcaagggaaacgggtcgccatcgacaacacaaacccagacgccgcgagccgcgccaggtacgtccagtgtgcccgagccgcgggcgtcccctgccgctgcttcctcttcaccgccactctggagcaggcgcgccacaacaaccggtttcgagagatgacggactcctctcatatccccgtgtcagacatggtcatgtatggctacaggaagcagttcgaggccccaacgctggctgaaggcttctctgccatcctggagatcccgttccggctatgggtggagccgaggctggggcggctgtactgccagttctccgagggctgagccccgcccagctcccctccacaataaacgctgtttctccttga

SEQ ID NO: 167628 - DNA, 1602 bp, Homo sapiens
  Payload ID: 12979
  Gene Symbol: PNKP
  Gene Name: polynucleotide kinase 3'-phosphatase
  ENST ID: ENST00000600573
  CDS Start-End: 122-1594
atttccgtccgccgaggaaccgaccgccgccggccgggttgcaggcggggcacctcgggcaggacctccctggtcggaagtggccgtgagcccaagccgcggtcccgggccggcacccaggatgggcgaggtggaggccccgggccgcttgtggctcgagagcccccctgggggagcgccccccatcttcctgccctcggacgggcaagccctggtcctgggcaggggacccctgacccaggttacggaccggaagtgctccagaactcaagtggagctggtcgcagatcctgagacccggacagtggcagtgaaacagctgggagttaacccctcaactaccgggacccaggagttgaagccggggttggagggctctctgggggtgggggacacactgtatttggtcaatggcctccacccactgaccctgcgctgggaagagacccgcacaccagaatcccagccagatactccgcctggcacccctctggtgtcccaagatgagaagagagatgctgagctgccgaagaagcgtatgcggaagtcaaaccccggctgggagaacttggagaagttgctagtgttcaccgcagctggggtgaaaccccagggcaaggtggctggctttgatctggacgggacgctcatcaccacacgctctgggaaggtctttcccactggccccagtgactggaggatcttgtacccagagattccccgtaagctccgagagctggaagccgagggctacaagctggtgatcttcaccaaccagatgagcatcgggcgcgggaagctgccagccgaggagttcaaggccaaggtggaggctgtggtggagaagctgggggtccccttccaggtgctggtggccacgcacgcaggcttgtaccggaagccggtgacgggcatgtgggaccatctgcaggagcaggccaacgacggcacgcccatatccatcggggacagcatctttgtgggagacgcagccggacgcccggccaactgggccccggggcggaagaagaaagacttctcctgcgccgatcgcctgaggactgtctcccgctcagggcctctctgcctccccgagtccagggccctcctgagcgccagcccggaggtggttgtcgcagtgggattccctggggccgggaagtccacctttctcaagaagcacctcgtgtcggccggatatgtccacgtgaacagggacacgctaggctcctggcagcgctgtgtgaccacgtgtgagacagccctgaagcaagggaaacgggtcgccatcgacaacacaaacccagacgccgcgagccgcgccaggtacgtccagtgtgcccgagccgcgggcgtcccctgccgctgcttcctcttcaccgccactctggagcaggcgcgccacaacaaccggtttcgagagatgacggactcctctcatatccccgtgtcagacatggtcatgtatggctacaggaagcagttcgaggccccaacgctggctgaaggcttctctgccatcctggagatcccgttccggctatgggtggagccgaggctggggcggctgtactgccagttctccgagggctgagccccgcc

SEQ ID NO: 167629 - DNA, 986 bp, Homo sapiens
  Payload ID: 12979
  Gene Symbol: PNKP
  Gene Name: polynucleotide kinase 3'-phosphatase
  ENST ID: ENST00000599543
  CDS Start-End: 245-986
atcctttttatagatgaggaaactagaacatcgagggtgaagccaaagaaggacttaggggcgctgtcgggggcggaggtttcctcgactgacaatgaccatcagatgggaaaaaaatcttcctccctgggatgaaaattagaagtcaaggtggaaagaggcaaatctgctaacggaggatccagtccccgctaccggcctgagcctcgcgttgcagcaagagagatgaaggccggcacccaggatgggcgaggtggaggccccgggccgcttgtggctcgagagcccccctgggggagcgccccccatcttcctgccctcggacgggcaagccctggtcctgggcaggggacccctgacccaggttacggaccggaagtgctccagaactcaagtggagctggtcgcagatcctgagacccggacagtggcagtgaaacagctgggagttaacccctcaactaccgggacccaggagttgaagccggggttggagggctctctgggggtgggggacacactgtatttggtcaatggcctccacccactgaccctgcgctgggaagagacccgcacaccagaatcccagccagatactccgcctggcacccctctggtgtcccaagatgagaagagagatgctgagctgccgaagaagcgtatgcggaagtcaaaccccggctgggagaacttggagaagttgctagtgttcaccgcagctggggtgaaaccccagggcaaggtggctggctttgatctggacgggacgctcatcaccacacgctctgggaaggtctttcccactggccccagtgactggaggatcttgtacccagagattccccgtaagctccgagagctggaagccgagggctacaagctggtgatcttcaccaaccagatgagcatcgggcgcgggaagctgccagccgaggagttcaaggccaaggtggaggctgtggtggagaagctgggggtccccttcc

SEQ ID NO: 167630 - DNA, 534 bp, Homo sapiens
  Payload ID: 12979
  Gene Symbol: PNKP
  Gene Name: polynucleotide kinase 3'-phosphatase
  ENST ID: ENST00000598020
  CDS Start-End: 79-234
ggcggggcacctcgggcaggacctccctggtcggaagtggccgtgagcccaagccgcggtcccgggccggcacccaggatgggcgaggtggaggccccgggccgcttgtggctcgagagcccccctgggggagcgccccccatcttcctgccctcggacgggcaagccctggtcctgggcaggggacccctgacccaggttacggaccggaagtgctccagaactcaagcctgaagcaggccacactccccagaaatgagggacccaatcacacaaggatgcaaatcctgactccacccctccaatcctcagtggagctggtcgcagatcctgagacccggacagtggcagtgaaacagctgggagttaacccctcaactaccgggacccaggagttgaagccggggttggagggctctctgggggtgggggacacactgtatttggtcaatggcctccacccactgaccctgcgctgggaagagacccgcacaccagaatcccagccagatactccgcctggcacccctctgg

SEQ ID NO: 167631 - DNA, 637 bp, Homo sapiens
  Payload ID: 12979
  Gene Symbol: PNKP
  Gene Name: polynucleotide kinase 3'-phosphatase
  ENST ID: ENST00000596726
  CDS Start-End: 108-637
aggggacgagtcatttccgtccgccgaggaaccgaccgccgccggccgggttgcaggcggggcacctcgggcaggacctccctggtcggaagtggccggcacccaggatgggcgaggtggaggccccgggccgcttgtggctcgagagcccccctgggggagcgccccccatcttcctgccctcggacgggcaagccctggtcctgggcaggggacccctgacccaggttacggaccggaagtgctccagaactcaagtggagctggtcgcagatcctgagacccggacagtggcagtgaaacagctgggagttaacccctcaactaccgggacccaggagttgaagccggggttggagggctctctgggggtgggggacacactgtatttggtcaatggcctccacccactgaccctgcgctgggaagagacccgcacaccagaatcccagccagatactccgcctggcacccctctggtgtcccaagatgagaagagagatgctgagctgccgaagaagcgtatgcggaagtcaaaccccggctgggagaacttggagaagttgctagtgttcaccgcagctggggtgaaaccccagggcaaggtggctggctttgatctggacgggacgctcat

SEQ ID NO: 167632 - DNA, 351 bp, Homo sapiens
  Payload ID: 12979
  Gene Symbol: PNKP
  Gene Name: polynucleotide kinase 3'-phosphatase
  ENST ID: ENST00000597965
  CDS Start-End: 1-171
gccaggtacgtccagtgtgcccgagccgcgggcgtcccctgccgctgcttcctcttcaccgccactctggagcaggcgcgccacaacaaccggtttcgagagatgacggactcctctcatatccccgtgtcagacatggtcatgtatggctacaggtactgttggggatagcagggggcaggggcactggctgggccacatgatccaggctgtccctcactgttcccaccactgccaggaagcagttcgaggccccaacgctggctgaaggcttctctgccatcctggagatcccgttccggctatgggtggagccgaggctggggcggctgtactgccagttctccgagg

SEQ ID NO: 167633 - DNA, 1665 bp, Homo sapiens
  Payload ID: 12979
  Gene Symbol: PNKP
  Gene Name: polynucleotide kinase 3'-phosphatase
  Uniprot ID: Q96T60
  ENST ID: ENST00000596014
  CDS Start-End: 83-1648
ggaggaggcgggacttcctgcagcaaattggggctgtgcgccgctcaagcccgtttacctgctccccaggccggcacccaggatgggcgaggtggaggccccgggccgcttgtggctcgagagcccccctgggggagcgccccccatcttcctgccctcggacgggcaagccctggtcctgggcaggggacccctgacccaggttacggaccggaagtgctccagaactcaagtggagctggtcgcagatcctgagacccggacagtggcagtgaaacagctgggagttaacccctcaactaccgggacccaggagttgaagccggggttggagggctctctgggggtgggggacacactgtatttggtcaatggcctccacccactgaccctgcgctgggaagagacccgcacaccagaatcccagccagatactccgcctggcacccctctggtgtcccaagatgagaagagagatgctgagctgccgaagaagcgtatgcggaagtcaaaccccggctgggagaacttggagaagttgctagtgttcaccgcagctggggtgaaaccccagggcaaggtggctggctttgatctggacgggacgctcatcaccacacgctctgggaaggtctttcccactggccccagtgactggaggatcttgtacccagagattccccgtaagctccgagagctggaagccgagggctacaagctggtgatcttcaccaaccagatgagcatcgggcgcgggaagctgccagccgaggagttcaaggccaaggtggaggctgtggtggagaagctgggggtccccttccaggtgctggtggccacgcacgcaggcttgtaccggaagccggtgacgggcatgtgggaccatctgcaggagcaggccaacgacggcacgcccatatccatcggggacagcatctttgtgggagacgcagccggacgcccggccaactgggccccggggcggaagaagaaagacttctcctgcgccgatcgcctgtttgccctcaaccttggcctgcccttcgccacgcctgaggagttctttctcaagtggccagcagccggcttcgagctcccagcctttgatccgaggactgtctcccgctcagggcctctctgcctccccgagtccagggccctcctgagcgccagcccggaggtggttgtcgcagtgggattccctggggccgggaagtccacctttctcaagaagcacctcgtgtcggccggatatgtccacgtgaacagggacacgctaggctcctggcagcgctgtgtgaccacgtgtgagacagccctgaagcaagggaaacgggtcgccatcgacaacacaaacccagacgccgcgagccgcgccaggtacgtccagtgtgcccgagccgcgggcgtcccctgccgctgcttcctcttcaccgccactctggagcaggcgcgccacaacaaccggtttcgagagatgacggactcctctcatatccccgtgtcagacatggtcatgtatggctacaggaagcagttcgaggccccaacgctggctgaaggcttctctgccatcctggagatcccgttccggctatgggtggagccgaggctggggcggctgtactgccagttctccgagggctgagccccgcccagctcccc

SEQ ID NO: 167634 - DNA, 1600 bp, Homo sapiens
  Payload ID: 12979
  Gene Symbol: PNKP
  Gene Name: polynucleotide kinase 3'-phosphatase
  ENST ID: ENST00000600910
  CDS Start-End: 101-1468
gaccgccgccggccgggttgcaggcggggcacctcgggcaggacctccctggtcggaagtggccgtgagcccaagccgcggtcccgggccggcacccaggatgggcgaggtggaggccccgggccgcttgtggctcgagagcccccctgggggagcgccccccatcttcctgccctcggacgggcaagccctggtcctgggcaggggacccctgacccaggttacggaccggaagtgctccagaactcaagtggagctggtcgcagatcctgagacccggacagtggcagtgaaacagctgggagttaacccctcaactaccgggacccaggagttgaagccggggttggagggctctctgggggtgggggacacactgtatttggtcaatggcctccacccactgaccctgcgctgggaagagacccgcacaccagaatcccagccagatactccgcctggcacccctctggtgtcccaagatgagaagagagatgctgagctgccgaagaagcgtatgcggaagtcaaaccccggctgggagaacttggagaagttgctagtgttcaccgcagctggggtgaaaccccagggcaaggtggctggctttgatctggacgggacgctcatcaccacacgctctgggaaggtctttcccactggccccagtgactggaggatcttgtacccagagattccccgtaagctccgagagctggaagccgagggctacaagctggtgatcttcaccaaccagatgagcatcgggcgcgggaagctgccagccgaggagttcaaggccaaggtggaggctgtggtggagaagctgggggtccccttccaggtgctggtggccacgcacgcaggcttgtaccggaagccggtgacgggcatgtgggaccatctgcaggagcaggccaacgacggcacgcccatatccatcggggacagcatctttgtgggagacgcagccggacgcccggccaactgggccccggggcggaagaagaaagacttctcctgcgccgatcgcctgtttgccctcaaccttggcctgcccttcgccacgcctgaggagttctttctcaagtggccagcagccggcttcgagctcccagcctttgatccgaggactgtctcccgctcagggcctctctgcctccccgagtccagggccctcctgagcgccagcccggaggtggttgtcgcagtgggattccctggggccgggaagtccacctttctcaagaagcacctcgtgtcggccggatatgtccacgtgaacagggtacgtccagtgtgcccgagccgcgggcgtcccctgccgctgcttcctcttcaccgccactctggagcaggcgcgccacaacaaccggtttcgagagatgacggactcctctcatatccccgtgtcagacatggtcatgtatggctacaggaagcagttcgaggccccaacgctggctgaaggcttctctgccatcctggagatcccgttccggctatgggtggagccgaggctggggcggctgtactgccagttctccgagggctgagccccgcccagctcccctccacaataaacgctgtttctccttga

SEQ ID NO: 167635 - DNA, 1530 bp, Homo sapiens
  Payload ID: 12979
  Gene Symbol: PNKP
  Gene Name: polynucleotide kinase 3'-phosphatase
  ENST ID: ENST00000627232
  CDS Start-End: 1-525
atgggcgaggtggaggccccgggccgcttgtggctcgagagcccccctgggggagcgccccccatcttcctgccctcggacgggcaagccctggtcctgggcaggggacccctgacccaggttacggaccggaagtgctccagaactcaagtggagctggtcgcagatcctgagacccggacagtggcagtgaaacagctgggagttaacccctcaactaccgggacccaggagttgaagccggggttggagggctctctgggggtgggggacacactgtatttggtcaatggcctccacccactgaccctgcgctgggaagagacccgcacaccagaatcccagccagatactccgcctggcacccctctggtgtcccaagatgagaagagagatgctgagctgccgaagaagcgtatgcggaagtcaaaccccggctgggagaacttggagaagttgctagtgttcaccgcagctggggtgaaaccccagggcaaggatcttgtacccagagattccccgtaagctccgagagctggaagccgagggctacaagctggtgatcttcaccaaccagatgagcatcgggcgcgggaagctgccagccgaggagttcaaggccaaggtggaggctgtggtggagaagctgggggtccccttccaggtgctggtggccacgcacgcaggcttgtaccggaagccggtgacgggcatgtgggaccatctgcaggagcaggccaacgacggcacgcccatatccatcggggacagcatctttgtgggagacgcagccggacgcccggccaactgggccccggggcggaagaagaaagacttctcctgcgccgatcgcctgtttgccctcaaccttggcctgcccttcgccacgcctgaggagttctttctcaagtggccagcagccggcttcgagctcccagcctttgatccgaggactgtctcccgctcagggcctctctgcctccccgagtccagggccctcctgagcgccagcccggaggtggttgtcgcagtgggattccctggggccgggaagtccacctttctcaagaagcacctcgtgtcggccggatatgtccacgtgaacagggacacgctaggctcctggcagcgctgtgtgaccacgtgtgagacagccctgaagcaagggaaacgggtcgccatcgacaacacaaacccagacgccgcgagccgcgccaggtacgtccagtgtgcccgagccgcgggcgtcccctgccgctgcttcctcttcaccgccactctggagcaggcgcgccacaacaaccggtttcgagagatgacggactcctctcatatccccgtgtcagacatggtcatgtatggctacaggaagcagttcgaggccccaacgctggctgaaggcttctctgccatcctggagatcccgttccggctatgggtggagccgaggctggggcggctgtactgccagttctccgagggctgagccccgcccagctcccctccacaataaacgctgtttctccttga

SEQ ID NO: 167636 - DNA, 767 bp, Homo sapiens
  Payload ID: 12979
  Gene Symbol: PNKP
  Gene Name: polynucleotide kinase 3'-phosphatase
  ENST ID: ENST00000627317
  CDS Start-End: 1-767
cggggttggagggctctctgggggtgggggacacactgtatttggtcaatggcctccacccactgaccctgcgctgggaagagacccgcacaccagaatcccagccagatactccgcctggcacccctctggtgtcccaagatgagaagagagatgctgagctgccgaagaagcgtatgcggaagtcaaaccccggctgggagaacttggagaagttgctagtgttcaccgcagctggggtgaaaccccagggcaagctggtgatcttcaccaaccagatgagcatcgggcgcgggaagctgccagccgaggagttcaaggccaaggtggaggctgtggtggagaagctgggggtccccttccaggtgctggtggccacgcacgcaggcttgtaccggaagccggtgacgggcatgtgggaccatctgcaggagcaggccaacgacggcacgcccatatccatcggggacagcatctttgtgggagacgcagccggacgcccggccaactgggccccggggcggaagaagaaagacttctcctgcgccgatcgcctgtttgccctcaaccttggcctgcccttcgccacgcctgaggagttctttctcaagtggccagcagccggcttcgagctcccagcctttgatccgaggactgtctcccgctcagggcctctctgcctccccgagtccagggccctcctgagcgccagcccggaggtggttgtcgcagtgggattccctggggccgggaagtccacctttctc

SEQ ID NO: 167637 - DNA, 1545 bp, Homo sapiens
  Payload ID: 12979
  Gene Symbol: PNKP
  Gene Name: polynucleotide kinase 3'-phosphatase
  ENST ID: ENST00000631020
  CDS Start-End: 55-1512
tggggctgtgcgccgctcaagcccgtttacctgctccccaggccggcacccaggatgggcgaggtggaggccccgggccgcttgtggctcgagagcccccctgggggagcgccccccatcttcctgccctcggacgggcaagccctggtcctgggcaggggacccctgacccaggttacggaccggaagtgctccagaactcaagtggagctggtcgcagatcctgagacccggacagtggcagtgaaacagctgggagttaacccctcaactaccgggacccaggagttgaagccggggttggagggctctctgggggtgggggacacactgtatttggtcaatggcctccacccactgaccctgcgctgggaagagacccgcacaccagaatcccagccagatactccgcctggcacccctctggtgtcccaagatgagaagagagatgctgagctgccgaagaagcgtatgcggaagtcaaaccccggctgggagaacttggagaagttgctagtgttcaccgcagctggggtgaaaccccagggcaaggtggctggctttgatctggacgggacgctcatcaccacacgctctgggaaggtctttcccactggccccagtgactggaggatcttgtacccagagattccccgtaagctccgagagctggaagccgagggctacaaggtgctggtggccacgcacgcaggcttgtaccggaagccggtgacgggcatgtgggaccatctgcaggagcaggccaacgacggcacgcccatatccatcggggacagcatctttgtgggagacgcagccggacgcccggccaactgggccccggggcggaagaagaaagacttctcctgcgccgatcgcctgtttgccctcaaccttggcctgcccttcgccacgcctgaggagttctttctcaagtggccagcagccggcttcgagctcccagcctttgatccgaggactgtctcccgctcagggcctctctgcctccccgagtccagggccctcctgagcgccagcccggaggtggttgtcgcagtgggattccctggggccgggaagtccacctttctcaagaagcacctcgtgtcggccggatatgtccacgtgaacagggacacgctaggctcctggcagcgctgtgtgaccacgtgtgagacagccctgaagcaagggaaacgggtcgccatcgacaacacaaacccagacgccgcgagccgcgccaggtacgtccagtgtgcccgagccgcgggcgtcccctgccgctgcttcctcttcaccgccactctggagcaggcgcgccacaacaaccggtttcgagagatgacggactcctctcatatccccgtgtcagacatggtcatgtatggctacaggaagcagttcgaggccccaacgctggctgaaggcttctctgccatcctggagatcccgttccggctatgggtggagccgaggctggggcggctgtactgccagttctccgagggctgagccccgcccagctcccctccacaataaacgctg

SEQ ID NO: 167638 - DNA, 629 bp, Homo sapiens
  Payload ID: 12979
  Gene Symbol: PNKP
  Gene Name: polynucleotide kinase 3'-phosphatase
  ENST ID: ENST00000625216
  CDS Start-End: 1-264
gacggcacgcccatatccatcggggacagcatctttgtgggagacgcagccggacgcccggccaactgggccccggggcggaagaagaaagacttctcctgcgccgatcgcctgtttgccctcaaccttggcctgcccttcgccacgcctgaggagttctttctcaagtggccagcagccggcttcgagctcccagcctttgatccgccgggaagtccacctttctcaagaagcacctcgtgtcggccggatatgtccacgtgaacagggacacgctaggctcctggcagcgctgtgtgaccacgtgtgagacagccctgaagcaagggaaacgggtcgccatcgacaacacaaacccagacgccgcgagccgcgccaggtacgtccagtgtgcccgagccgcgggcgtcccctgccgctgcttcctcttcaccgccactctggagcaggcgcgccacaacaaccggtttcgagagatgacggactcctctcatatccccgtgtcagacatggtcatgtatggctacaggaagcagttcgaggccccaacgctggctgaaggcttctctgccatcctggagatcccgttccggctatgggtggagccgaggctggggcggctgtactgc

SEQ ID NO: 167639 - DNA, 3847 bp, Homo sapiens
  Payload ID: 12980
  Gene Symbol: GALNT1
  Gene Name: polypeptide N-acetylgalactosaminyltransferase 1
  Uniprot ID: Q10472
  ENST ID: ENST00000269195
  CDS Start-End: 104-1783
ggtatgaacgtgatttctgatgaaactggattggaataattttcatgatctttgtatatttatatatatatatttttaaattttgcatttgacttaaagtgccatgagaaaatttgcatactgcaaggtggtcctagccacctccttgatttgggtactcttggatatgttcctgctgctttacttcagtgaatgcaacaaatgtgatgaaaaaaaggagagaggacttcctgctggagatgttctagagccagtacaaaagcctcatgaaggtcctggagaaatggggaaaccagtcgtcattcctaaagaggatcaagaaaagatgaaagagatgtttaaaatcaatcagttcaatttaatggcaagtgagatgattgcactcaacagatctttaccagatgttaggttagaagggtgtaaaacaaaggtgtatccagataatcttcctacaacaagtgtggtgattgttttccacaatgaggcttggagcacacttctgcgaactgtccatagtgtcattaatcgctcaccaagacacatgatagaagaaattgttctagtagatgatgccagtgaaagagactttttgaaaaggcctttagagagttatgtgaaaaaactaaaagtaccagttcatgtaattcgaatggaacaacgttctggattgatcagagctagattaaaaggagctgctgtgtctaaaggccaagtgatcaccttcctggatgcccattgtgagtgtacagtgggatggctggagcctctcttggccaggatcaaacatgacaggagaacagtggtgtgtcccatcatcgatgtgatcagtgatgatacttttgagtacatggcaggctctgatatgacctatggtgggttcaactggaagctcaattttcgctggtatcctgttccccaaagagaaatggacagaaggaaaggtgatcggactcttcctgtcaggacacctaccatggcaggaggccttttttcaatagacagagattactttcaggaaattggaacatatgatgctggaatggatatttggggaggagaaaacctagaaatttcctttaggatttggcagtgtggaggaactttggaaattgttacatgctcacatgttggacatgtgtttcggaaagctacaccttacacgtttccaggaggcacagggcagattatcaataaaaataacagacgacttgcagaagtgtggatggatgaattcaagaatttcttctatataatttctccaggtgttacaaaggtagattatggagatatatcgtcaagagttggtctaagacacaaactacaatgcaaacctttttcctggtacctagagaatatatatcctgattctcaaattccacgtcactatttctcattgggagagatacgaaatgtggaaacgaatcagtgtctagataacatggctagaaaagagaatgaaaaagttggaatttttaattgccatggtatggggggtaatcaggttttctcttatactgccaacaaagaaattagaacagatgacctttgcttggatgtttccaaacttaatggcccagttacaatgctcaaatgccaccacctaaaaggcaaccaactctgggagtatgacccagtgaaattaaccctgcagcatgtgaacagtaatcagtgcctggataaagccacagaagaggatagccaggtgcccagcattagagactgcaatggaagtcggtcccagcagtggcttcttcgaaacgtcaccctgccagaaatattctgagaccaaatttacaaaaaaacgaaaaaaataaggattgactgggctacctcagcatacatttctgccacattcttaagtagcaaaaaaggaaaagtgctttcctcctctgcaggatgtaaggtttatcagccattaaaacttagacttctctagcttttcactagctgtgaaccagccttcctgtccatggacgtgaaactgcatagtaatgagactgtgcacactgatgtttacaagattgaaagagtctttctccgaaaatcatggtaaagaatactgagacaatgaaaaaaaatcaacaaaatatgctttctggagaactgtaccttttatggtttgcttgcacatcagtagtttctgctgaacgtgctgtcataatgaagagatttccaagattttttttcctgattagaactggtagccagtatattaaatattgatataaaaataaaagaactggaaccagattcagaatcatgaaaacaacatttttacaacaacaaaaaaactatattaaacagggtttaaaggaaattaaaacagaactatgagaagtacaatttgttatagtatagtatcaaatttctatatagattttatacctcagtggggaaaaataactgattccaatgacattcattttgttttcatctgtgatagtcatggatgcttttattttccttggggtgctgaaattgagctgaaaaaaaaaggctctttgaatatagttttaatttctctctacagttttttttgtttggtttgtgggctgttggaattgtaatttttaattgccttctaaaaaatggaaatttaacaatgtctgatctcagctgaacaaattagatgtttcagttgctcttgggtcaactggcttacagatttacatgtgcacacacacacaaatttcttatcacattttcgacttcttcacttgacctaactgattatgcgaaatacccaagattcatgctactgtaccacagatttgttttcacagcaataaatcttcagttctttgtttatgattccacttaacaaaaggcctgcagaagtgatttattatttgggtatttggagataatacatttgatggttttttggaaaacctttttcactccatactcagatatgcttcattgtcaaatgcatatttagattagattattgaattgtaatgtttatctgctgctttttttaaataaaatttgactgaaaatgtttaattggcattttttaatgacttagccaaagaagtgcagctattattccatattaataggcttgcatttcttttcctaaatcttatttaggctaaatcagttttatttttctctgattttttttaataccacagaatcacctgagtgtcaattgaaagttgtcaattaaaaggtaaccttttaatctcgtaggaggaatctcattaagacatttttcctgatatgtagagcagtctgttggcaaaaatgcatatattttctttcatatttgtaaaattatatttaatggaattcttttctttgattatcaaggactttcactgcaggcagtgctatttcttgtgcctaagaatgtttccaaaagtcgcatcgctaatgatatttgccaagttgagtgtacacaaagtttctcatatcctgttcaagttaatcaacatcaagcacatggggatgctttagggtgagtctatagtacaaaatgcataaaccatgtccccaggaaatttgaaaggaagcaggtgctgaatggaatttttttccttttccatgagctgtgttaattctatctccagtaggcctaatgcttgaataagcaagatgtctaatcaataaattattttcatgctcagaatttcaggtttttgtactccagcatagcttggtcttatttcttactgtatgaaagcttaacagcaatgtgatttaaggttttgttttaaatgggagatgtaagtgatttaattcatgggtacttttagaacctgatagataatcccattgcctttatttttctaattaaagaattcctaaatactttgaaaatacaaaatattcctgaata

SEQ ID NO: 167640 - DNA, 2346 bp, Homo sapiens
  Payload ID: 12980
  Gene Symbol: GALNT1
  Gene Name: polypeptide N-acetylgalactosaminyltransferase 1
  ENST ID: ENST00000589189
  CDS Start-End: 160-1323
aggagatgtgggacatgtggatttgggatatgaattcatttgaaaaaccactttggggtatgaacgtgatttctgatgaaactggattggaataattttcatgatctttgtatatttatatatatatatttttaaattttgcatttgacttaaagtgccatgagaaaatttgcatactgcaaggtggtcctagccacctccttgatttgggtactcttggatatgttcctgctgctttacttcagtgaatgcaacaaatgtgatgaaaaaaaggagagaggacttcctgctggagatgttctagagccagtacaaaagcctcatgaaggtcctggagaaatggggaaaccagtcgtcattcctaaagaggatcaagaaaagatgaaagagatgtttaaaatcaatcagttcaatttaatggcaagtgagatgattgcactcaacagatctttaccagatgttaggttagaagggtgtaaaacaaaggtgtatccagataatcttcctacaacaagtgtggtgattgttttccacaatgaggcttggagcacacttctgcgaactgtccatagtgtcattaatcgctcaccaagacacatgatagaagaaattgttctagtagatgatgccagtgaaagagactttttgaaaaggcctttagagagttatgtgaaaaaactaaaagtaccagttcatgtaattcgaatggaacaacgttctggattgatcagagctagattaaaaggagctgctgtgtctaaaggccaagtgatcaccttcctggatgcccattgtgagtgtacagtgggatggctggagcctctcttggccaggatcaaacatgacaggagaacagtggtgtgtcccatcatcgatgtgatcagtgatgatacttttgagtacatggcaggctctgatatgacctatggtgggttcaactggaagctcaattttcgctggtatcctgttccccaaagagaaatggacagaaggaaaggtgatcggactcttcctgtcaggacacctaccatggcaggaggccttttttcaatagacagagattactttcaggaaattggaacatatgatgctggaatggatatttggggaggagaaaacctagaaatttcctttaggatttggcagtgtggaggaactttggaaattgttacatgctcacatgttggacatgtgtttcggaaagctacaccttacacgtttccaggaggcacagggcagattatcaataaaaataacagacgacttgcagaagtgtggatggatgaattcaagaatttcttctatataatttctccaggttagcgttgttttgcattagaaatacaaggcttttaggttgatatttagtgtatatgtgtgtgtatctgtctgtctaattaacttctccaactcctgatattttcattatttattgtcccatagatacgaaatgtggaaacgaatcagtgtctagataacatggctagaaaagagaatgaaaaagttggaatttttaattgccatggtatggggggtaatcaggttttctcttatactgccaacaaagaaattagaacagatgacctttgcttggatgtttccaaacttaatggcccagttacaatgctcaaatgccaccacctaaaaggcaaccaactctgggagtatgacccagtgaaattaaccctgcagcatgtgaacagtaatcagtgcctggataaagccacagaagaggatagccaggtgcccagcattagagactgcaatggaagtcggtcccagcagtggcttcttcgaaacgtcaccctgccagaaatattctgagaccaaatttacaaaaaaacgaaaaaaataaggattgactgggctacctcagcatacatttctgccacattcttaagtagcaaaaaaggaaaagtgctttcctcctctgcaggatgtaaggtttatcagccattaaaacttagacttctctagcttttcactagctgtgaaccagccttcctgtccatggacgtgaaactgcatagtaatgagactgtgcacactgatgtttacaagattgaaagagtctttctccgaaaatcatggtaaagaatactgagacaatgaaaaaaaatcaacaaaatatgctttctggagaactgtaccttttatggtttgcttgcacatcagtagtttctgctgaacgtgctgtcataatgaagagatttccaagattttttttcctgattagaactggtagccagtatattaaatattgatataaaaataaaagaactggaaccagattcagaatcatgaaaacaacatttttacaacaacaaaaaaactatattaaacagg

SEQ ID NO: 167641 - DNA, 1770 bp, Homo sapiens
  Payload ID: 12980
  Gene Symbol: GALNT1
  Gene Name: polypeptide N-acetylgalactosaminyltransferase 1
  ENST ID: ENST00000590654
  CDS Start-End: 8-160
aagtgccatgagaaaatttgcatactgcaaggtggtcctagccacctccttgatttgggtactcttggatatgttcctgctgctttacttcagtgaatgcaacaaatgtgatgaaaaaaaggagagaggacttcctgctggagatgcgcaggtaaattgaacatgaaattggaaattgacaaggatgttgaagtagcagaaagttaccagtgagttaagttctagagccagtacaaaagcctcatgaaggtcctggagaaatggggaaaccagtcgtcattcctaaagaggatcaagaaaagatgaaagagatgtttaaaatcaatcagttcaatttaatggcaagtgagatgattgcactcaacagatctttaccagatgttaggttagaagggtgtaaaacaaaggtgtatccagataatcttcctacaacaagtgtggtgattgttttccacaatgaggcttggagcacacttctgcgaactgtccatagtgtcattaatcgctcaccaagacacatgatagaagaaattgttctagtagatgatgccagtgaaagagactttttgaaaaggcctttagagagttatgtgaaaaaactaaaagtaccagttcatgtaattcgaatggaacaacgttctggattgatcagagctagattaaaaggagctgctgtgtctaaaggccaagtgatcaccttcctggatgcccattgtgagtgtacagtgggatggctggagcctctcttggccaggatcaaacatgacaggagaacagtggtgtgtcccatcatcgatgtgatcagtgatgatacttttgagtacatggcaggctctgatatgacctatggtgggttcaactggaagctcaattttcgctggtatcctgttccccaaagagaaatggacagaaggaaaggtgatcggactcttcctgtcaggacacctaccatggcaggaggccttttttcaatagacagagattactttcaggaaattggaacatatgatgctggaatggatatttggggaggagaaaacctagaaatttcctttaggatttggcagtgtggaggaactttggaaattgttacatgctcacatgttggacatgtgtttcggaaagctacaccttacacgtttccaggaggcacagggcagattatcaataaaaataacagacgacttgcagaagtgtggatggatgaattcaagaatttcttctatataatttctccaggtgttacaaaggtagattatggagatatatcgtcaagagttggtctaagacacaaactacaatgcaaacctttttcctggtacctagagaatatatatcctgattctcaaattccacgtcactatttctcattgggagagatacgaaatgtggaaacgaatcagtgtctagataacatggctagaaaagagaatgaaaaagttggaatttttaattgccatggtatggggggtaatcaggttttctcttatactgccaacaaagaaattagaacagatgacctttgcttggatgtttccaaacttaatggcccagttacaatgctcaaatgccaccacctaaaaggcaaccaactctgggagtatgacccagtgaaattaaccctgcagcatgtgaacagtaatcagtgcctggataaagccacagaagaggatagccaggtgcccagcattagagactgcaatggaagtcggtcccagcagtggcttcttcgaaacgtcaccctgccagaaatattctgagaccaaattt

SEQ ID NO: 167642 - DNA, 542 bp, Homo sapiens
  Payload ID: 12980
  Gene Symbol: GALNT1
  Gene Name: polypeptide N-acetylgalactosaminyltransferase 1
  Uniprot ID: Q10472
  ENST ID: ENST00000591924
  CDS Start-End: 227-542
agtggccgaggagcgcgcggcggacggcggcccgagagtagcgcgctggccgcgggaccggccgcgaccgccgcggccggcccggaggacgcctgccgccgccgccgccgcgcgcctagcgagggtatgaacgtgatttctgatgaaactggattggaataattttcatgatctttgtatatttatatatatatatttttaaattttgcatttgacttaaagtgccatgagaaaatttgcatactgcaaggtggtcctagccacctccttgatttgggtactcttggatatgttcctgctgctttacttcagtgaatgcaacaaatgtgatgaaaaaaaggagagaggacttcctgctggagatgttctagagccagtacaaaagcctcatgaaggtcctggagaaatggggaaaccagtcgtcattcctaaagaggatcaagaaaagatgaaagagatgtttaaaatcaatcagttcaatttaatggcaagtgagatgattgcactcaacagatctttaccagatgttaggttagaagggt

SEQ ID NO: 167643 - DNA, 1120 bp, Homo sapiens
  Payload ID: 12980
  Gene Symbol: GALNT1
  Gene Name: polypeptide N-acetylgalactosaminyltransferase 1
  Uniprot ID: Q10472
  ENST ID: ENST00000591081
  CDS Start-End: 92-409
atttctgatgaaactggattggaataattttcatgatctttgtatatttatatatatatatttttaaattttgcatttgacttaaagtgccatgagaaaatttgcatactgcaaggtggtcctagccacctccttgatttgggtactcttggatatgttcctgctgctttacttcagtgaatgcaacaaatgtgatgaaaaaaaggagagaggacttcctgctggagatgttctagagccagtacaaaagcctcatgaaggtcctggagaaatggggaaaccagtcgtcattcctaaagaggatcaagaaaagatgaaagagatgtttaaaatcaatcagttcaatttaatggcaagtgagatgattgcactcaacagatctttaccagatgttaggttagaagggtaagtacttactgtggtcctgatagtatgtgaatgaaaagtatattctgaattttcagtaaattgcacttgagtgctgattgttcttaaggcaaatgttatatcactatgttactacttaccccacttagaaaataattaaatgctgatagaaataatatctcaagcttctactgattattagcactatgtatttcaggcattggaagataattatttatcttaatggattagaaggggattttaaactttattattaccaaaatactcacatactcaactttttacaaaaagatttaagttgtatgtaacttgaaacagtgaaatacacagtcgtaagtatacagctcactgaattttttgctatgtatacacctgtgtaaccatcagccaaatcaagacatagaatgatcccatcacccctgaaagtctccttatgttttttgtagtcattacttacatccccagaggcagccgttatattgacctctctaaacatagattagttttgtctctttttgaactttttatgatggatccacaccattttttgtgcctttaagattcatattgttgcatgtatcagaattttattcttttctactgcaaatagtgatttgtaatatgaatatgccattgtttatttatacattgatagacctttggattatttctactttttgacccctataaataaagctattgtgacattctt

SEQ ID NO: 167644 - DNA, 5961 bp, Homo sapiens
  Payload ID: 12981
  Gene Symbol: GALNT10
  Gene Name: polypeptide N-acetylgalactosaminyltransferase 10
  Uniprot ID: Q86SR1
  ENST ID: ENST00000297107
  CDS Start-End: 138-1949
gcggagttggagcggggccggcgccgcagccgcttctgctggctgagctgctgccgccgccgggcggacgggcggacgcgcggagctgggggcggcgcggcggggccggcggggcgcggcggggctgaccggccccgatgaggcggaaggagaagcggctcctgcaggcggtggcgctggtgctggcggccctggtcctcctgcccaacgtggggctttgggcgctgtaccgcgagcggcagcccgacggcacccctgggggatcgggggcggcggtggcgccggcggcgggacagggctcacacagtcgacaaaagaaaacgtttttcttgggagatgggcagaagctgaaggactggcatgacaaggaggccatccggagggacgctcagcgcgtaggaaatggagaacaaggaagaccttaccccatgaccgatgctgagagagtggatcaggcataccgagaaaatggatttaacatctacgtcagtgataaaatctccttgaatcgctctctcccagatatccggcacccaaactgcaacagcaagcgctacctggagacacttcccaacacaagcatcatcatccccttccacaacgagggctggtcctccctcctccgcaccgtccacagtgtgctcaatcgctcgcctccagagctggtcgccgagattgtactggtcgacgacttcagtgatcgagagcacctgaagaagcctcttgaagactacatggcccttttccccagtgtgaggattcttcgaaccaagaaacgggaagggctgataaggacccgaatgctgggggcctcagtggcaactggggatgtcatcacattcttggattcacactgtgaagccaatgtcaactggcttccccccttgcttgaccgcattgctcggaaccgcaagaccattgtgtgcccgatgattgatgtaattgaccatgacgactttcggtacgagacacaggcaggggatgccatgcggggagcctttgactgggagatgtactacaagcggatcccgatccctccagaactgcagaaagctgaccccagcgacccatttgagtctcccgtgatggccggtggactgttcgccgtggatcggaagtggttctgggaactcggcgggtatgacccaggcttggagatctggggaggggagcagtatgaaatctccttcaaggtgtggatgtgtgggggccgcatggaggacatcccctgctccagggtgggccatatctacaggaagtatgtgccctacaaggtcccggccggagtcagcctggcccggaaccttaagcgggtggccgaagtgtggatggatgagtacgcagagtacatttaccagcgccggcctgaataccgccacctctccgctggggatgtcgcagtccagaaaaagctccgcagctcccttaactgcaagagtttcaagtggtttatgacgaagatagcctgggacctgcccaaattctacccacccgtggagcccccggctgcagcttggggggagatccgaaatgtgggcacagggctgtgtgcagacacaaagcacggggccttgggctccccactaaggctagagggctgcgtccgaggccgtggggaggctgcctggaacaacatgcaggtattcaccttcacctggagagaggacatccggcctggagacccccagcacaccaagaagttctgctttgatgccatttcccacaccagccctgtcacgctgtacgactgccacagcatgaagggcaaccagctgtggaaataccgcaaagacaagaccctgtaccaccctgtcagtggcagctgcatggactgcagtgaaagtgaccataggatcttcatgaacacctgcaacccatcctctctcacccagcagtggctgtttgaacacaccaactcaacagtcttggaaaaattcaataggaactgagccctcatgtccccttggcaggccccccagggtctggcactcactgcagacttcctctttcaagggaggcagggcccctgtgggcactaggtgtaaaaggtgctggccaaatggttcagggtgaagagggctcttgattcaggggctggggtctgcctggtccttgagcccctgagttgtgggggtagggtgaagagcatatcccacaagaggccccacagggagcagagactgctttaatccctgctgacatcacggaaaagcaacagagccttttcaactttgtcactatgtccccttgaacattatgtgggagaacaccaaggtagcctaggccacccaaaagtgagtcctgcgaggttgcccagccctcagatggctctcctacatgatggtgctttagaaacaaaggtaaaatttgcctgtttggggcagcttttagtatcgatgccactcatctgcagcagaagagaaagaagtcctcttggggctttttagtttctgccgtcctggggggaacattgcagttactgcacagcttctgttctctgtcacaaccccaggtgatttggtccggtcaaaggccatacttggggccctaagagtgttcagtattgaatgctgatcagctgccaggtgaggagtcagaagagggagcccccctagacatttctttgcagctatggacatgcgggatatctccccctgctctctgggtatttgaaatgtcaattttagcactctccaggcacaaggacagcccagcaccagctttacagggcagtgtttcagatggccctgagcccacggaaaaggccaggtagacctccaaactagaaatgctggctgatttgccctgatccatgcttccatttccctgtctctcttccccaggcaattactggcctcaaaagaggaacagaggtgctgcgaggtgctcacctcacagagtctggaggcctccaggatcaactgtgggcaaagtgcctgcctctgacctcatcatggttctagttctcatacagaactccagaatttttaaagaactctataattggattgcaaactaggatgctacataggattctggtattccacatccaatatggatttctagaatgctgtgattaaaggagccagccaggtgtaatacagtcaaggcagcccccagcctagagacaatctgtgaaatccaaagttggtggtgttgggaaagcagggggacatgtgtccctcagctcagcagaggctgtggtacaacatggtccttggtgaagacctgcacccctggaacctcccaccatcatcacaactgtagtctcatttgcagtggagaaaagaacccgacgtcccacagccagatatacacccagctccatgccagcccttcatgtttaccttttgctttgttaattacatgtcagactcctagagggcctccagactaataggaagcatttctgtaaccaacctgccacccactgattcagaaatggaaatcacattccacaatctatggcttccaccagctagcccaggaaatacttgaaatcagcattccaattagtgttgagtctcttgattgtgtcatttaccaattaaataactgagacctaagtctgggaacagagccacgaatctgcctttgagatgctggcagatctcaaggccatcaattattgggggagggagggacaaacactcccaatcatccaccagtcagactgaatgtgtagctggcgaggaattacttccacttctggcccagcacaagccctgctttggccacctgtctgcaagagaggcggcccctgtgcttgcaacgcttacgtgttgatcccagtgtccttttccaaatgagtgctgtagctttagaagtggccctctatagaaagaagtcaaaagatgaggccccttctagaatctaggataacaagagtgttgacagtttgaggagtcgaattgagattcatcatcaaagagcaatgcagcgtcgttaaaataaaaactgtgccttttaaaaagaaaaatgcaaatatagagcaaatccctaaacttgaaccatttcctagtgccttgctagacaaacataaaggggcagggttgtggggaggggaacgtttttggtggtgtgtgcagttcctactggatgagtgtgtgtttcttaatgtctcatttcaagcaggagatgttgggtctggagcaagatctgagactgagatgtcccccaagggtgacaggtcagatttatttcagtcagtgcaagtcacactccaaactaaaggctgggcagtgcgtttagtctgtggcctagaagacctcatcagcccccgagaggaggccttgcattacctcactgggacctgtttgggggccatccctgcggtccaccctctgaacccccagcatgtttgtcctgtttctcaccattgggttaaggggtgccgagcactagctagacttccacatagtcccaccccaagtgggcggcagtgttcctggcatgaccaggattcctgtgaaagcaggagcagcagcaagccgtcccgggcctgcctttcccatcctttggttctcctttccagtctgggttcacaccctgaaaagggatgggtgtgtcctctgagcactctggcatttgtcattgctgagcccatatcagtaggtcctgggacttgacaaagtatgtgggaggggaaggaaggacagaacttgactggctccatttcatggaccaactgatcaattgccagtactaagccactcattgttatggcttcctttttgaaaaccacctgtctcaaggattcaggtttctgctcacatccccagctgatgctcaataaaactcagccaggagcatatggagatgctgacagccaggtaatgggtgagactgtggggtcccttttcctctaaagcctttactctgaggataaggtcacaaagtagggtgtgacttgaaagtatcgtgaccatgtggcccaccagcagcctttccaaaggggaactccagagacatttcataatgcaaacagcactgttgctttaagaacaaggcctttggaggtggctaaacttgcacgcacgtgtgtgaaaagccatcccatcttctgcctccagttggagctttcagctgttaaaacagtcagaaactattgattcttccctttaggaaaaaatgctcaggcagaacggggtacatccacaggaggaatcggacgagaggatgtgacattcggtccaggagagaaagagcagtttctgttaaagatgtaacaaatggatttccaaagtctacatgacattcacttttcaaacttcccaccagttgaatttctttttttccttaagaaacaggtgatgtcttggaaaacagctccttatgtctctctgtgcatctccattttcctagtctctggagtctcaaaaagagtggcaaagcactttacagtagtaactgaggaatcagagtctctgcttcagcgatatctagtttgtacagttgggtgatcttttgtaattcctaggaggtaatgcatttttaatgttttctgaagctttgtaagtgtgagagagggacaagaagtgcagttctgttctggaattccttattgctttcaacggacactctttgtgaaaaatccaagtaatattttagttcaaacttgatcttgagccaaggcccactgccacctctgggatgggagtcggacctacataccaagtgacaagttcaccttaacatctgcttccagaatggctttgattcagccgtgccaggcaacagaacagggtcagactcctgctctgttattggcttgaagactaggatcccaaaggggttggaggcagggaatatttgaaaattcagactggaattccaggccaaaagctcaagaccaccagcctctcctcctgcctggaaaaataagcctttgtgaaagactgatttaccatgtacaattgtgattgtgaacgttgttgagtaaacctccagactttctctaaa

SEQ ID NO: 167645 - DNA, 3778 bp, Homo sapiens
  Payload ID: 12981
  Gene Symbol: GALNT10
  Gene Name: polypeptide N-acetylgalactosaminyltransferase 10
  Uniprot ID: Q86SR1
  ENST ID: ENST00000377661
  CDS Start-End: 94-1719
gagctgctgccgccgccgggcggacgggcggacgcgcggagctgggggcggcgcggcggggccggcggggcgcggcggggctgaccggccccgatgaggcggaaggagaagcggctcctgcaggcggtggcgctggtgctggcggccctggtcctcctgcccaacgtggggctttgggcgctgtaccgcgagcggcagcccgacggcacccctgggggatcgggggcggcggtggcgccggcggcgggacagggctcacacagtcgacaaaagaaaacgtttttcttgggagatgggcagaagctgaaggactggcatgacaaggaggccatccggagggacgctcagcgcgtaggaaatggagaacaaggaagaccttaccccatgaccgatgctgagagagtggatcaggcataccgagaaaatggatttaacatctacgtcagtgataaaatctccttgaatcgctctctcccagatatccggcacccaaactgcaacagcaagcgctacctggagacacttcccaacacaagcatcatcatccccttccacaacgagggctggtcctccctcctccgcaccgtccacagtgtgctcaatcgctcgcctccagagctggtcgccgagattgtactggtcgacgacttcagtgatcgagaccgcattgctcggaaccgcaagaccattgtgtgcccgatgattgatgtaattgaccatgacgactttcggtacgagacacaggcaggggatgccatgcggggagcctttgactgggagatgtactacaagcggatcccgatccctccagaactgcagaaagctgaccccagcgacccatttgagtctcccgtgatggccggtggactgttcgccgtggatcggaagtggttctgggaactcggcgggtatgacccaggcttggagatctggggaggggagcagtatgaaatctccttcaaggtgtggatgtgtgggggccgcatggaggacatcccctgctccagggtgggccatatctacaggaagtatgtgccctacaaggtcccggccggagtcagcctggcccggaaccttaagcgggtggccgaagtgtggatggatgagtacgcagagtacatttaccagcgccggcctgaataccgccacctctccgctggggatgtcgcagtccagaaaaagctccgcagctcccttaactgcaagagtttcaagtggtttatgacgaagatagcctgggacctgcccaaattctacccacccgtggagcccccggctgcagcttggggggagatccgaaatgtgggcacagggctgtgtgcagacacaaagcacggggccttgggctccccactaaggctagagggctgcgtccgaggccgtggggaggctgcctggaacaacatgcaggtattcaccttcacctggagagaggacatccggcctggagacccccagcacaccaagaagttctgctttgatgccatttcccacaccagccctgtcacgctgtacgactgccacagcatgaagggcaaccagctgtggaaataccgcaaagacaagaccctgtaccaccctgtcagtggcagctgcatggactgcagtgaaagtgaccataggatcttcatgaacacctgcaacccatcctctctcacccagcagtggctgtttgaacacaccaactcaacagtcttggaaaaattcaataggaactgagccctcatgtccccttggcaggccccccagggtctggcactcactgcagacttcctctttcaagggaggcagggcccctgtgggcactaggtgtaaaaggtgctggccaaatggttcagggtgaagagggctcttgattcaggggctggggtctgcctggtccttgagcccctgagttgtgggggtagggtgaagagcatatcccacaagaggccccacagggagcagagactgctttaatccctgctgacatcacggaaaagcaacagagccttttcaactttgtcactatgtccccttgaacattatgtgggagaacaccaaggtagcctaggccacccaaaagtgagtcctgcgaggttgcccagccctcagatggctctcctacatgatggtgctttagaaacaaaggtaaaatttgcctgtttggggcagcttttagtatcgatgccactcatctgcagcagaagagaaagaagtcctcttggggctttttagtttctgccgtcctggggggaacattgcagttactgcacagcttctgttctctgtcacaaccccaggtgatttggtccggtcaaaggccatacttggggccctaagagtgttcagtattgaatgctgatcagctgccaggtgaggagtcagaagagggagcccccctagacatttctttgcagctatggacatgcgggatatctccccctgctctctgggtatttgaaatgtcaattttagcactctccaggcacaaggacagcccagcaccagctttacagggcagtgtttcagatggccctgagcccacggaaaaggccaggtagacctccaaactagaaatgctggctgatttgccctgatccatgcttccatttccctgtctctcttccccaggcaattactggcctcaaaagaggaacagaggtgctgcgaggtgctcacctcacagagtctggaggcctccaggatcaactgtgggcaaagtgcctgcctctgacctcatcatggttctagttctcatacagaactccagaatttttaaagaactctataattggattgcaaactaggatgctacataggattctggtattccacatccaatatggatttctagaatgctgtgattaaaggagccagccaggtgtaatacagtcaaggcagcccccagcctagagacaatctgtgaaatccaaagttggtggtgttgggaaagcagggggacatgtgtccctcagctcagcagaggctgtggtacaacatggtccttggtgaagacctgcacccctggaacctcccaccatcatcacaactgtagtctcatttgcagtggagaaaagaacccgacgtcccacagccagatatacacccagctccatgccagcccttcatgtttaccttttgctttgttaattacatgtcagactcctagagggcctccagactaataggaagcatttctgtaaccaacctgccacccactgattcagaaatggaaatcacattccacaatctatggcttccaccagctagcccaggaaatacttgaaatcagcattccaattagtgttgagtctcttgattgtgtcatttaccaattaaataactgagacctaagtctgggaacagagccacgaatctgcctttgagatgctggcagatctcaaggccatcaattattgggggagggagggacaaacactcccaatcatccaccagtcagactgaatgtgtagctggcgaggaattacttccacttctggcccagcacaagccctgctttggccacctgtctgcaagagaggcggcccctgtgcttgcaacgcttacgtgttgatcccagtgtccttttccaaatgagtgctgtagctttagaagtggccctctatagaaagaagtcaaaagatgaggccccttctagaatctaggataacaagagtgttgacagtttgaggagtcgaattgagattcatcatcaaagagcaatgcagcgtcgttaaaataaaaactgtgccttttaaaaagaaaaatgcaaatatagagcaaatccctaaacttg

SEQ ID NO: 167646 - DNA, 4344 bp, Homo sapiens
  Payload ID: 12981
  Gene Symbol: GALNT10
  Gene Name: polypeptide N-acetylgalactosaminyltransferase 10
  Uniprot ID: Q86SR1
  ENST ID: ENST00000425427
  CDS Start-End: 138-1238
gcggagttggagcggggccggcgccgcagccgcttctgctggctgagctgctgccgccgccgggcggacgggcggacgcgcggagctgggggcggcgcggcggggccggcggggcgcggcggggctgaccggccccgatgaggcggaaggagaagcggctcctgcaggcggtggcgctggtgctggcggccctggtcctcctgcccaacgtggggctttgggcgctgtaccgcgagcggcagcccgacggcacccctgggggatcgggggcggcggtggcgccggcggcgggacagggctcacacagtcgacaaaagaaaacgtttttcttgggagatgggcagaagctgaaggactggcatgacaaggaggccatccggagggacgctcagcgcgtaggaaatggagaacaaggaagaccttaccccatgaccgatgctgagagagtggatcaggcataccgagaaaatggatttaacatctacgtcagtgataaaatctccttgaatcgctctctcccagatatccggcacccaaactgcaacagcaagcgctacctggagacacttcccaacacaagcatcatcatccccttccacaacgagggctggtcctccctcctccgcaccgtccacagtgtgctcaatcgctcgcctccagagctggtcgccgagattgtactggtcgacgacttcagtgatcgagagcacctgaagaagcctcttgaagactacatggcccttttccccagtgtgaggattcttcgaaccaagaaacgggaagggctgataaggacccgaatgctgggggcctcagtggcaactggggatgtcatcacattcttggattcacactgtgaagccaatgtcaactggcttccccccttgcttgaccgcattgctcggaaccgcaagaccattgtgtgcccgatgattgatgtaattgaccatgacgactttcggtacgagacacaggcaggggatgccatgcggggagcctttgactgggagatgtactacaagcggatcccgatccctccagaactgcagaaagctgaccccagcgacccatttgagtctcccgtgatggccggtggactgttcgccgtggatcggaagtggttctgggaactcggcgggtatgacccaggcttggagatctggggaggggagcagtatgaaatctccttcaaggtgagccagctctccagacgccccgttcttggcacagcctcctgagtgcctgtcccagtaggtgtctcagcttctgcctgagcttggaaagactggaggcctcagggttctgtagcccttctgcccatcaggtgaagaagacaggggctcatgggccactctttgttgtggggtgggggggtgtgggagggaaggggagtactctccagctgccaaaggctggtcctcaccacagctctgactggcatttgccttgtgtcttcttaagatgttggaataaggtcttgcttctactcagatggcaggtctgagattgagatgtccagcaaataagcagtgggccagagaagctaggaaggccaaacaggatacgtaggcctagaggagtcctctcagtcaccccaagttttccctttgtacctgttgctctaggagtttgacaaagaccagtgagcataagctccagttgtaaagttacaaaggcctggattcagatcccagctccatcatcaggagctatctgactttgggcaagttagatcacccccccgagctttctttcctcatctgaaataagggaataataatactacctagcttacagagctatcgtgaagattaaatgagatcatgtctagaaagtgcttagcatacaacctgggaacatgaccagcaattaataattggtagaaattgttaaagtttcggtgagtaaatatttactgtaacctacttgaccagcctatggactctggaagctttctgacagtagtggtaaaggagttactagttaactaataactaattaagcacccaaacttccaaggctacattctccactttatttgtgggagtctgtcttgttctcaagtgaaagcttggaccttctgaggggagggttagcttgtcccatgcccttgtggcctgtcagagtcagcttctaacagcttagacccctggctaaggcatatccccagcccacaagggacagatagcaccattactgatctgacccctgtgaacacacaactctgatgccccctcatcgggcctcaactttcagtgcaaaggaccattgtcaggcacagtgaattaaggctttggtattggtgccagagtgccacgatcagatcctagctctgccgtgtcctgccagctgtgtgatcttgggcaaggaatcctcacctcactgagccttggtttctacttccataaagtgggtttaatgaaacgttaatcctcacagagttgttgagaggattaagtgagaccatgcttattaggtgcttcttaataaattatcctaaagattattatcaatacattaatattattatctgcaacagtggttgagtagttcagaactggagaacataaattcttgattagcccaaaaaaaaaaaaaacctacaattcttttgatgttatttaggtttgaaaagcagtttatatcctttttttttcttttcttttcttttgtttttttttttttgagatggagtttcactctgctgcccaggctggagtgcagtagtgcgatcttggctcactgcagcctccacctcctgggttcaagtgattctcctgcctcagcctcctgagtagctgggactacaggcgcccaccaccacgcccagctaatgtagagatagggtttcgacatgttgaccaggctggtcttgaccccctgacctcaggtgatccacccacctcggcctttcaaagtgctgggattacaggtgtgagccactgtgcctggccagtttatatctattttaaccaccagagttctgaagttgtctcccataaggagaccagccccctaaataaaattaatattcacataagggtaatgttcaaaatatgtaacaactgtgataacacaagcacatccagtcagaacagataccagctataaacaatggtgcatccactccagcgtgtaacaagtgaagttcggtcctgatcatagctaacaggacagtgtgccaagcccttcatacatgctgacttgtttaatcctcacaacaaccttaggagagttgtatcattattatacccgtttcaccaggaaggcaagcaaagctcagaccaaggcctcgcacagccggaagaagcagaactggggcccaaacgcaggtctgcttgactccaaagcccacgctctgacctgctatttttgttgttgtttaaatcatacccagactgttctgaaaacctgccatgttttatggacctctgcctcaccctttctgggattttttttttttttttgcctcttctggtattattcctagtttacttggatattctgcaatttcttagttaatggaattaataacaatctaagtcggaagtggcaaatagggccaggaatggtggccgagatgggaggatctcttgagcctaggagtttgagaccagcctggacaacacaacacgaccccatctcattaaaaaaaaaaaaaaaaagaaggaaagaaagagagagagagaaggagtggggagggagagagggagggggaaagggagagagagagacagagagagagacacagcaaataggtttctactccctgccaggccaactctgatccattggtaggggctgccccaggtgggtgttgatatgcattctgaggctgcttccaagcttatcagcaaagagtagtcagtgggggagggatctttttgtgtttcactcaccgccatatcccaagtacctaaagcctggtccaacacagaaaagacactatgagaccaatttttatgagtcataatttttattattgtattaaatcttttctaaaattatatttatataaatatcttataaatattctaaaaatatgtaaaatgtataaaagtctagtagttctgatataacactgtcagccataattctggttatcatgttaaaatactacatataataaaataactaaattcaagaccagcctggccaacattgtgaaaccccatctttactaaaaatacaaaaattagccaggcgtggtggtacatgcctgtaattccagctactcaggaggtggagacaggagaattgcttgaagctgggaggcagaggttgcagtgagccgagatcgtgccactgcactctaatctgggcgacaaagcgagactccatgtc

SEQ ID NO: 167647 - DNA, 4359 bp, Homo sapiens
  Payload ID: 12981
  Gene Symbol: GALNT10
  Gene Name: polypeptide N-acetylgalactosaminyltransferase 10
  ENST ID: ENST00000520647
  CDS Start-End: 133-741
gttggagcggggccggcgccgcagccgcttctgctggctgagctgctgccgccgccgggcggacgggcggacgcgcggagctgggggcggcgcggcggggccggcggggcgcggcggggctgaccggccccgatgaggcggaaggagaagcggctcctgcaggcggtggcgctggtgctggcggccctggtcctcctgcccaacgtggggctttgggcgctgtaccgcgagcggcagcccgacggcacccctgggggatcgggggcggcggtggcgccggcggcgggacagggctcacacagtcgacaaaagaaaacgtttttcttgggagatgggcagaagctgaaggactggcatgacaaggaggccatccggagggacgctcagcgcgtaggaaatggagaacaaggaagaccttaccccatgaccgatgctgagagagtggatcaggcataccgagaaaatggatttaacatctacgtcagtgataaaatctccttgaatcgctctctcccagatatccggcacccaaactgcaacagcaagcgctacctggagacacttcccaacacaagcatcatcatccccttccacaacgagggctggtcctccctcctccgcaccgtccacagtgtgctcaatcgctcgcctccagagctggtcgccgagattgtactggtcgacgacttcagtgatcgagatctgccgactgcatcaactccctctccctttgtgtgctagagacccttcagcatacgcagctctgggatgatgccaggattccatttggagacttctgcacccgttgcttttgtgtcttcccatctgcatagcacctgaagaagcctcttgaagactacatggcccttttccccagtgtgaggattcttcgaaccaagaaacgggaagggctgataaggacccgaatgctgggggcctcagtggcaactggggatgtcatcacattcttggattcacactgtgaagccaatgtcaactggcttccccccttgcttgaccgcattgctcggaaccgcaagaccattgtgtgcccgatgattgatgtaattgaccatgacgactttcggtacgagacacaggcaggggatgccatgcggggagcctttgactgggagatgtactacaagcggatcccgatccctccagaactgcagaaagctgaccccagcgacccatttgagtctcccgtgatggccggtggactgttcgccgtggatcggaagtggttctgggaactcggcgggtatgacccaggcttggagatctggggaggggagcagtatgaaatctccttcaaggtgtggatgtgtgggggccgcatggaggacatcccctgctccagggtgggccatatctacaggaagtatgtgccctacaaggtcccggccggagtcagcctggcccggaaccttaagcgggtggccgaagtgtggatggatgagtacgcagagtacatttaccagcgccggcctgaataccgccacctctccgctggggatgtcgcagtccagaaaaagctccgcagctcccttaactgcaagagtttcaagtggtttatgacgaagatagcctgggacctgcccaaattctacccacccgtggagcccccggctgcagcttggggggaggcgctttcaaggtatggtccctggaccacctgcacctgagtcacctggaatgggggtaaaatctggttcctggacctgtcggttcaatttctccaggagtagggccagggagtcctttaccaactcctcacctccactcccccaccaccaacccaggactctgcatactctacaatactacttacagcagtgctttaaggattacattctgtggactgagtcttccttcattgagaggctcaagatccgaaatgtgggcacagggctgtgtgcagacacaaagcacggggccttgggctccccactaaggctagagggctgcgtccgaggccgtggggaggctgcctggaacaacatgcaggtattcaccttcacctggagagaggacatccggcctggagacccccagcacaccaagaagttctgctttgatgccatttcccacaccagccctgtcacgctgtacgactgccacagcatgaagggcaaccagctgtggaaataccgcaaagacaagaccctgtaccaccctgtcagtggcagctgcatggactgcagtgaaagtgaccataggatcttcatgaacacctgcaacccatcctctctcacccagcagtggctgtttgaacacaccaactcaacagtcttggaaaaattcaataggaactgagccctcatgtccccttggcaggccccccagggtctggcactcactgcagacttcctctttcaagggaggcagggcccctgtgggcactaggtgtaaaaggtgctggccaaatggttcagggtgaagagggctcttgattcaggggctggggtctgcctggtccttgagcccctgagttgtgggggtagggtgaagagcatatcccacaagaggccccacagggagcagagactgctttaatccctgctgacatcacggaaaagcaacagagccttttcaactttgtcactatgtccccttgaacattatgtgggagaacaccaaggtagcctaggccacccaaaagtgagtcctgcgaggttgcccagccctcagatggctctcctacatgatggtgctttagaaacaaaggtaaaatttgcctgtttggggcagcttttagtatcgatgccactcatctgcagcagaagagaaagaagtcctcttggggctttttagtttctgccgtcctggggggaacattgcagttactgcacagcttctgttctctgtcacaaccccaggtgatttggtccggtcaaaggccatacttggggccctaagagtgttcagtattgaatgctgatcagctgccaggtgaggagtcagaagagggagcccccctagacatttctttgcagctatggacatgcgggatatctccccctgctctctgggtatttgaaatgtcaattttagcactctccaggcacaaggacagcccagcaccagctttacagggcagtgtttcagatggccctgagcccacggaaaaggccaggtagacctccaaactagaaatgctggctgatttgccctgatccatgcttccatttccctgtctctcttccccaggcaattactggcctcaaaagaggaacagaggtgctgcgaggtgctcacctcacagagtctggaggcctccaggatcaactgtgggcaaagtgcctgcctctgacctcatcatggttctagttctcatacagaactccagaatttttaaagaactctataattggattgcaaactaggatgctacataggattctggtattccacatccaatatggatttctagaatgctgtgattaaaggagccagccaggtgtaatacagtcaaggcagcccccagcctagagacaatctgtgaaatccaaagttggtggtgttgggaaagcagggggacatgtgtccctcagctcagcagaggctgtggtacaacatggtccttggtgaagacctgcacccctggaacctcccaccatcatcacaactgtagtctcatttgcagtggagaaaagaacccgacgtcccacagccagatatacacccagctccatgccagcccttcatgtttaccttttgctttgttaattacatgtcagactcctagagggcctccagactaataggaagcatttctgtaaccaacctgccacccactgattcagaaatggaaatcacattccacaatctatggcttccaccagctagcccaggaaatacttgaaatcagcattccaattagtgttgagtctcttgattgtgtcatttaccaattaaataactgagacctaagtctgggaacagagccacgaatctgcctttgagatgctggcagatctcaaggccatcaattattgggggagggagggacaaacactcccaatcatccaccagtcagactgaatgtgtagctggcgaggaattacttccacttctggcccagcacaagccctgctttggccacctgtctgcaagagaggcggcccctgtgcttgcaacgcttacgtgttgatcccagtgtccttttccaaatgagtgctgtagctttagaagtggccctctatagaaagaagtcaaaagatgaggccccttctagaatctaggataacaagagtgttgacagtttgaggagtcgaattgagattcatcatcaaagagcaatgcagcgtcgttaaaataaaaactgtgccttttaaaaagaaaaatgcaaatata

SEQ ID NO: 167648 - DNA, 2371 bp, Homo sapiens
  Payload ID: 12982
  Gene Symbol: GALNT11
  Gene Name: polypeptide N-acetylgalactosaminyltransferase 11
  Uniprot ID: Q8NCW6
  ENST ID: ENST00000422997
  CDS Start-End: 173-781
tgtcttccacaggtctatagtgagcgagagctgctactttttacttgggcattcattcaaagtgttgaagaataacagcctctaccatcccttattcactggctcatcagctgtcccaggttttgctcttctaggaaattgacaatggcccttcagctatgctaggtctataatgggaagtgtcacagttcggtatttctgttatgggtgcctttttacatctgcgacctggacagttttgctttttgtttatttcaacttcagtgaagtgactcagccacttaagaatgtgcccgtcaaggggtctgggccccacggaccatctccaaaaaaattctatccccgtttcactcgaggcccaagtcgagtgctcgagccacagttcaaagcaaacaaaattgacgatgtgatagacagtcgtgttgaagatccagaagaaggccacttgaaattctcttctgaattaggtatgatttttaatgaacgcgatcaagagttgagagacttgggctatcagaaacatgcttttaatatgcttatcagtgaccgcttgggctaccacagagatgtgccagacacaaggaatgcagcatgtaaagaaaagttctacccacctgacctgccagctgctagtgttgttatctgtttctataatgaagcgttttctgccttgcttcggacagtgcacagtgtcatagaccgcacgccagcacacctgcttcatgagatcatccttgtggatgatgatagtgactttggtaaggaatgctgcacctggtaacattggatccaggctgtcagtcactacagcactgacaaacactaacacagctgaactttcaagtacgtggtaggtggggatcctacacgtgcagtcacagctgggctgaccacaaataagtctgaagaaatccattatctttgtaacctgcttataaactatgctacccaaatttgggccgtgaaattttttccgtggcttactttaaaaaacacacctctttttatttgaaataactgtaggttcacaggaagttacaaagacggcctatgtacctttatccagttgctccatcataaaattcccctgtcagaaccaggaatccacattggtacagtgtgtgtggtccagggtcattctgtcacacaggtggactcccacaaccctcactgcaatgatacagaactgtttcctcacccggagggcccttgtgctgcctctttctagtcacacctcctgctttcctctactcttccccagtccctgaaaccacgactctatgattttgtttccatctctgattttgttatttcaagaatgtcatataaatggaatcacacggtatgtgaccttttgagatgggcttttttcatttggcatgatgccttggcttatgcttctctattaagtctcttacactgatcgtccccagataaaagtggattgcattctgatagctcctcaatgatctctgaatgccagtattttatgattcactacatattctatattctgtacgcctttcttaattcaacatagactcttgctaagaatggctttgtgtacccaaacaggatagaaggctttttattacactgctcattcagctctcagtgaccttgcaagaaaggctggaagcccattttatagagggagaaatataaaaagtaatttgctcagaccccatagctgttaagtagtagagtggaaatgagacctctggtctgcatagctccaagccttctgctcttttcatgacagcaggctgcaggaacacagtggtacaggtgtatgccagtgactttttcatgcactcgagcgtttattaagtaccacttgtatcaacatcagagttggtataccagtatacttaaatatagaaggtaaagaaatggagagagtcatgggagcaaaattctcaaaccttggccaaaaacaaacaaacaaaaaacctaataaataaatctgagtctggaccacgtagaagattggttacatactgatttctagaatttatggttggtttttgtttttttttaagtcaacttgtattttggttttcactttgtggctattttacctaaaaggaaaaattcataatttgaggtggtttgtatattaactatggaaagaattactgcttattatcttacacgatctttcaagttattctgaaatatacaggtgaatgacatagaattccttaaaaaatatttagcaaccttggaagaaagatgctaaattaataaaaggacatattcaatgctgttcttgttattcttggtaggggcaatagaagttgtttcttaactattttgaaatggactaagacttaataaattcctttgtaataaaaggcatttatatctc

SEQ ID NO: 167649 - DNA, 600 bp, Homo sapiens
  Payload ID: 12982
  Gene Symbol: GALNT11
  Gene Name: polypeptide N-acetylgalactosaminyltransferase 11
  ENST ID: ENST00000431940
  CDS Start-End: 1-196
gatctggatgtgtggcggtaagctcttcatcatcccttgctctagagtaggacacattttccgaaaaaggcgaccatatggatctcccgaaggccaggacaccatgacacacaactctttgcggctggcacatgtctggttggatgaatacaagacacagcccacacacgcagaccctcctgggagttttccgtaatttttaagaacatcgatgactgagactcacgagtttgagacccactgatctcatatatacgcctgtttcattgattctcagatacagtttaaggagcagtatttttccttaagacctgacctgaagacgaaaagctatggcaatatcagtgagcgtgtggaactgagaaagaagttgggctgtaaatcatttaaatggtatttggataatgtatacccagagatgcagatatctgggtcccacgccaaaccccaacaacccatttttgtcaatagagggccaaaacgacccaaagtccttcaacgtggaaggctctatcacctccagaccaacaaatgcctggtggcccagggccgcccaagtcagaagggaggtctcgtggtgcttaaggcctgtgactacag

SEQ ID NO: 167650 - DNA, 580 bp, Homo sapiens
  Payload ID: 12982
  Gene Symbol: GALNT11
  Gene Name: polypeptide N-acetylgalactosaminyltransferase 11
  ENST ID: ENST00000423337
  CDS Start-End: 126-580
ctgcgggtcggactggggctgtggcgggagagaagatgccgcagcccgagtcccagaaggcggcgatcctgggctgcgggcaaggcggaaattgacaatggcccttcagctatgctaggtctataatgggaagtgtcacagttcggtatttctgttatgggtgcctttttacatctgcgacctggacagttttgctttttgtttatttcaacttcagtgaagtgactcagccacttaagaatgtgcccgtcaaggggtctgggccccacggaccatctccaaaaaaattctatccccgtttcactcgaggcccaagtcgagtgctcgagccacagttcaaagcaaacaaaattgacgatgtgatagacagtcgtgttgaagatccagaagaaggccacttgaaattctcttctgaattagagttgagagacttgggctatcagaaacatgcttttaatatgcttatcagtgaccgcttgggctaccacagagatgtgccagacacaaggaatgcagcatgtaaagaaaagttctacccacctgacctgccagctgctagtgttgttatctgtttctataa

SEQ ID NO: 167651 - DNA, 626 bp, Homo sapiens
  Payload ID: 12982
  Gene Symbol: GALNT11
  Gene Name: polypeptide N-acetylgalactosaminyltransferase 11
  ENST ID: ENST00000431668
  CDS Start-End: 332-626
ctgaggaggcgcggccgccactgcgcccagcgcctgcgcgacgcctggctgctgggccccggggcagttcagcccgcgccgctcctgcgggtcggactggggctgtggcgggagagaagatgccgcagcccgagtcccagaaggcggcgatcctgggctgcgggcaaggcgtcctctgtaagcaggaagtgtcccagtctgacgtggctgctgcgtaaatgtgtccggaattggttccttccagtggattcttggtctcgctgacttcaagaatgaagccacggactgtcgcggaaattgacaatggcccttcagctatgctaggtctataatgggaagtgtcacagttcggtatttctgttatgggtgcctttttacatctgcgacctggacagttttgctttttgtttatttcaacttcagtgaagtgactcagccacttaagaatgtgcccgtcaaggggtctgggccccacggaccatctccaaaaaaattctatccccgtttcactcgaggcccaagtcgagtgctcgagccacagttcaaagcaaacaaaattgacgatgtgatagacagtcgtgttgaagatccagaagaaggccacttgaaattctcttctgaattag

SEQ ID NO: 167652 - DNA, 1231 bp, Homo sapiens
  Payload ID: 12982
  Gene Symbol: GALNT11
  Gene Name: polypeptide N-acetylgalactosaminyltransferase 11
  ENST ID: ENST00000447778
  CDS Start-End: 148-549
ggcagttcagcccgcgccgctcctgcgggtcggactggggctgtggcgggagagaagatgccgcagcccgagtcccagaaggcggcgatcctgggctgcgggcaaggcggaaattgacaatggcccttcagctatgctaggtctataatgggaagtgtcacagttcggtatttctgttatgggtgcctttttacatctgcgacctggacagttttgctttttgtttatttcaacttcagtgaagtgactcagccacttaagaatgtgcccgtcaaggggtctgggccccacggaccatctccaaaaaaattctatccccgtttcactcgaggcccaagtcgagtgctcgagccacagttcaaagcaaacaaaattgacgatgtgatagacagtcgtgttgaagatccagaagaaggccacttgaaattctcttctgaattagatgtaaagaaaagttctacccacctgacctgccagctgctagtgttgttatctgtttctataatgaagcgttttctgccttgcttcggacagtgcacagtgtcatagaccgcacgccagcacacctgcttcatgagatcatccttgtggatgatgatagtgactttgatgatttgaaaggagaactagatgaatatgtccaaaaatacctccctggaaaaattaaagtcataagaaatacaaagcgtgaggggttgattcgagggagaatgattggcgcggcccacgcgacaggagaagtccttgtgttcctggacagccactgtgaagtgaatgtgatgtggctgcagcccttgctggccgccatccgtgaggaccggcacaccgtggtgtgcccagtgattgacatcatcagcgccgacacgctggcctacagctcgtcccctgtcgtccgcggagggttcaactggggactgcacttcaaatgggatcttgtccccctttctgagctaggacgagcggagggagccactgcaccaataaagtcaccaacaatggctggaggtttgtttgccatgaacagacagtatttccatgaacttggacagtatgatagtggcatggatatctggggaggagaaaatttggaaatatcatttcggatctggatgtgtggcggtaagctcttcatcatcccttgctctagagtaggacacattttccgaaaaaggcgaccatatggatctcccgaaggccaggacaccatgacacacaactctttgcggctggc

SEQ ID NO: 167653 - DNA, 2727 bp, Homo sapiens
  Payload ID: 12982
  Gene Symbol: GALNT11
  Gene Name: polypeptide N-acetylgalactosaminyltransferase 11
  Uniprot ID: Q8NCW6
  ENST ID: ENST00000430044
  CDS Start-End: 231-2057
gactgggcgagggccctgggcctgaggaggcgcggccgccactgcgcccagcgcctgcgcgacgcctggctgctgggccccggggcagttcagcccgcgccgctcctgcgggtcggactggggctgtggcgggagagaagatgccgcagcccgagtcccagaaggcggcgatcctgggctgcgggcaaggcggaaattgacaatggcccttcagctatgctaggtctataatgggaagtgtcacagttcggtatttctgttatgggtgcctttttacatctgcgacctggacagttttgctttttgtttatttcaacttcagtgaagtgactcagccacttaagaatgtgcccgtcaaggggtctgggccccacggaccatctccaaaaaaattctatccccgtttcactcgaggcccaagtcgagtgctcgagccacagttcaaagcaaacaaaattgacgatgtgatagacagtcgtgttgaagatccagaagaaggccacttgaaattctcttctgaattaggtatgatttttaatgaacgcgatcaagagttgagagacttgggctatcagaaacatgcttttaatatgcttatcagtgaccgcttgggctaccacagagatgtgccagacacaaggaatgcagcatgtaaagaaaagttctacccacctgacctgccagctgctagtgttgttatctgtttctataatgaagcgttttctgccttgcttcggacagtgcacagtgtcatagaccgcacgccagcacacctgcttcatgagatcatccttgtggatgatgatagtgactttgatgatttgaaaggagaactagatgaatatgtccaaaaatacctccctggaaaaattaaagtcataagaaatacaaagcgtgaggggttgattcgagggagaatgattggcgcggcccacgcgacaggagaagtccttgtgttcctggacagccactgtgaagtgaatgtgatgtggctgcagcccttgctggccgccatccgtgaggaccggcacaccgtggtgtgcccagtgattgacatcatcagcgccgacacgctggcctacagctcgtcccctgtcgtccgcggagggttcaactggggactgcacttcaaatgggatcttgtccccctttctgagctaggacgagcggagggagccactgcaccaataaagtcaccaacaatggctggaggtttgtttgccatgaacagacagtatttccatgaacttggacagtatgatagtggcatggatatctggggaggagaaaatttggaaatatcatttcggatctggatgtgtggcggtaagctcttcatcatcccttgctctagagtaggacacattttccgaaaaaggcgaccatatggatctcccgaaggccaggacaccatgacacacaactctttgcggctggcacatgtctggttggatgaatacaaggagcagtatttttccttaagacctgacctgaagacgaaaagctatggcaatatcagtgagcgtgtggaactgagaaagaagttgggctgtaaatcatttaaatggtatttggataatgtatacccagagatgcagatatctgggtcccacgccaaaccccaacaacccatttttgtcaatagagggccaaaacgacccaaagtccttcaacgtggaaggctctatcacctccagaccaacaaatgcctggtggcccagggccgcccaagtcagaagggaggtctcgtggtgcttaaggcctgtgactacagtgacccaaatcagatctggatctataatgaagagcatgaattggttttaaatagtctcctttgtctagatatgtcagagactcgctcatcagacccgccacggctcatgaaatgccacgggtcaggaggatcccagcagtggacctttgggaaaaacaatcggctataccaggtgtcggttggacagtgcctgagagcagtggatcccctgggtcagaagggctctgtcgccatggcgatctgcgatggctcctcttcacagcagtggcatttggaaggttaaggtggatgctgtggtgggaacgttgcttcatcaggcgttgcctccggtgtggagtttggggctttaggaaagcctgggttgggtggagcagaaccatcttggagaagatgacagttccctgtcctcccggagatgcctgggtgtgttagcagaggtgacacgtgtctgacagagacgggagctctgagtgtccacgggtgaagaagtgagtgtccacgggtgaagaagtgagtatgtttcacctggacattaaggtgatgtttgagctgctgttaaggaatttcttgcttatagaggcaaaccacagtatcattttaactctagaattgggcttgtacagaaggataaaacccaggaaaatggatatttctattcagatttatttatgcctctttttaatcccctttaatgatgcagtggtttttatctgatcaggaacttgtcatgatttcctttcttagacttcataggagatagtgctttaaaaaaaaaaaaaacttctattatttgtttagtatgttgtaagtagatcattttaaaaaactgaatctatattatgtttaacttcagaaggcatcatttataagacagtatggcagttaattataaaattattttgatgaattatgatacaatctacataataaagaatccttttgattatttagga

SEQ ID NO: 167654 - DNA, 716 bp, Homo sapiens
  Payload ID: 12982
  Gene Symbol: GALNT11
  Gene Name: polypeptide N-acetylgalactosaminyltransferase 11
  ENST ID: ENST00000419245
  CDS Start-End: 157-716
tttcactgccgttggttctctgagcattaacccacaggcctgaggttttcattgttgaaccctttttaaaaactcagtactatccatacatcttcttgtatttgaatatccgttaactgaaattgacaatggcccttcagctatgctaggtctataatgggaagtgtcacagttcggtatttctgttatgggtgcctttttacatctgcgacctggacagttttgctttttgtttatttcaacttcagtgaagtgactcagccacttaagaatgtgcccgtcaaggggtctgggccccacggaccatctccaaaaaaattctatccccgtttcactcgaggcccaagtcgagtgctcgagccacagttcaaagcaaacaaaattgacgatgtgatagacagtcgtgttgaagatccagaagaaggccacttgaaattctcttctgaattaggtatgatttttaatgaacgcgatcaagagttgagagacttgggctatcagaaacatgcttttaatatgcttatcagtgaccgcttgggctaccacagagatgtgccagacacaaggaatgcagcatgtaaagaaaagttctacccacctgacctgccagctgctagtgttgttatctgtttctataatgaagcgttttctgccttgcttcggacagtgcacagtgtcatagaccgcacgccagcacacctgcttcatgagatcat
